United States Patent Application Publication US 2015/0376612 A1 - sequence listing, part 37

SEQ ID NO: 88913 - DNA, 1651 bp, Homo sapiens
ctcttttctttcattaagatagtaatattaataccagtttacattaagacaaatttttcttttaattttataggatccagaatttctgatgatttgggttcttttccatagtccaaagaaacagatcagctcttcaggtatcatgtttacactgtgtgggaattgctttaatctgtagctagataaactacaaatttgagatgtatttcctttgtcaataaatgtcagtacttcgaaatctgtcaactattttatgtttttttgaaattgaggcagatggcatgctgttttgggtcaatcctgtgtaagtgtgggtaactcctgcagatagcactgaaaaccttttagaatattttctgttaattgatcttatcacatttaccagttggatgttttctttcttttatcacctttctcttcactcatttctattcttttaactctttaaaaaatctgcttgcctaaattttcttattgcccctaagggcactgtgtgggactgctgatggcatttagaattaaataactctctggtctccaagctaaaagaatgaacttttttttagatattctggactcagcagaagaattctcggcaaaagttgatatcgaagttgacagcccaaaccctacgcccgttcttagaagtgtgagtctccgagcaagagcaggaatagctaggatccatgctcccagggacttgcaggtagcctcagtcctcctttctgccgttactgctttcattcatgctgatttcactttgtgacagttcgttgaaatgtctgtcttgccccatcctccagacgatgcatttcttggccaaagtggcttcctcaagaaagcagcacttacctttgaaaaatgctgggaacattgaagtttatttggatatcaaggtatgcacttccatgagagtgccataagatagtctttcctcagactgtgagagctccttgctttctgcaggctgttgtgctcttcctggcccaacagagtgccctgaacctcagatgaaagaatcgctgagagtttttaaaaactgggtgttatatagcataaaatatatgctgtggtgctttttaagtttaaagttcagtgtcttgaatatgagaaccaagttcttagattagttcctgaaaaacatgcatgtcaccctttggttagagttggtgaagaatgatccgcacacgttgacatcatttctgagacctgagggtgaatgagagggggttagtgatccaaaattgtgggtgaggtggaagataaggtttgttgtagaagagaaagaaatatcctttccaagagaataggacaagttgagaccgtgacagacaagaaggggacaaacaacctgtcctggtaaatgagaaacgcacgtaaggcaggagccactgagcgaaaactgcgtttttgtaagtcggcattcaattatgattatgtaactatatttaggtcccagaacaaggaagtcacttttcagtggatccaaagaatctactccttaaacctggagaagaacatgaggttattgtttcatttactccaaaggatcctgaagcctgcgaggaaaggtaatataaaaatgttataatggaccgggcacagtggctcatgcctgtaatcccagcactttgggaggccgaggtgggtg

SEQ ID NO: 88914 - DNA, 1052 bp, Homo sapiens
gtccgtatatttcttacctaatacatggtgtgactctgtttaatctcctttcatttaggttcagattgtcttctctttttttgactaaaaatcttcttttaaaccagctgaatcgaaatgaataaattactattttcaagtatattctgacaaaagtaaataataaaagatcaatttgatgtttctcactttttctcctgaaactattagttgaccttgtcagctattaagatatctttctccatttcttctccaagcccatgacttcttggcacccaaatcataagtgaatatcaacttagagtcagagccccactgtcgtgagtactgagcttgcttgcgtaaccctagcttaaagtacactctcctctgagacacacatggcttatccccctgcctgggttatagaacactttatcgtgtgctcagtctgttcttgtgaccttacagaagaggagagtcaggcctgcaccagtgtgaatgcctctgcctggaatgctagccctcaacctccctgggctggcgccttctgggagactttcctccactcctcccaaatgtctcataaatagcattcccaaagcacgatggcttctcacacccccctgtgcagatgccattgtgatcatctctcttcttgtctgtattctctgcagcacaagctctaagggtgggaatatcattgtatccccagcacccagttcagtcttttggacaatggaaacatataggaaatagttgcgaaaagaattgaatacaggaccttcaacttagaattctttctttcttaggatcttgaaaatatttgtgcagccatttggacctcagtatgaggtagtgttaaaaggcgaagtcatttcttcaggaagtaaacctctgtcacctggaccttgcttagatattccatcgattttgtccaacaaacaatttctggcttggggaggagtccctctaggtagaacacagtaagtgtcaaagactgacaaatcgtccactatttatacatattttggagcagactacaaattaatgtttgcaggaaaattttgtca

SEQ ID NO: 88915 - DNA, 1728 bp, Homo sapiens
tttgagtacatttaactgatgatatgactctatggaaacctagcctctcccatcccacctgataactaactctatacttgaaaatgataaccacagtgctttacaaattattaaataaatacatgagaatgaaaactttacaaaataatgtttctttcacgtaattcttccccagtcattgtacctgtggaaggcttttcctggagatgtcaatagccaaagttgtctgcgtttctcttaacacaaggtggatgagacgtagacctcagctgctgatttattagctgctgatcttccccaaatttgagtaaaacagagatttactcatgtattctctgttctccaatgaagacagcattcacatagtttccacaattgaagtgtttttatcagtcaggtgctattttatgtccattcttttgcattgtagcttctttaaaagtagagttaattcaatatactgtgtaaaagactactttgtgcaaatgagcctcttagcctaggaccccttgtttccctgaaagctcgcttggttgagccaggtattccaggtaggtgtgatattgacttaatgactcgatgaatttcttcacctggattttcattgattgatgttttatatgacagataatacctatacacatagtattaataataaggtcagctgcagagctataactggagagagattaaaccaaaaagcctctataaggtgagtcttgagcctacaatttcagaaacgtagagcctaggactgtggggagacaattccaggctactgaaatggcttgtatagttagtccatctctagacattgtggttggttttaattggctttattcttataatggtagcaatatccatggagaaaaaccatatttaaaatgtctaattgtttttaggcttcagaaactagctttaagaaataattctgcatctacaactcaacatttacgactgcttattagaggacaagatcaggactgctttcaggttcgtagagtacgtggattcttgttatgtcttctgtctgggtctggaacacttgcatatgcagacctttttgtgttatttagcttttaagaatctgtgttaatggtatgttttatttgtgctactgctttgttttatgcatttaactgtttttaaattgtagcttcagaacacttttggttcagaacagcgattgaccagtaactgtgagatcagaattcacccaaaggaagacattttcatctctgtattatttgcacctactcgattatcttgcatgttggctagactagaaatcaaacaacttggaaatcgatcacaaccaggcattaagttcacagtaagatcattttattgcctttcccttcccctggagtttatgccattttataactattggtttaatgttgtaaattatacagtctgccttttataagtgaaactatgtaattatctagacttacaaacaagttagggagtaatttatatgctttgtagaattggcaagttataatagcagccagcgtagtattcctataagtattagtctttctaatgcttttaagtttcattttaatttggagattttaaaatgtacccagctttttaggaacacatctttgggtaaatccatgtggagctgtttaagatattaactttcccattaaattttattttctcaattatcagcaaaaatactgtctctgtctgttcagtcggctataactaaatacc

SEQ ID NO: 88916 - DNA, 1051 bp, Homo sapiens
cccttgcacttcccaggtaaggcgacgccccaccctgcttcggctcaccctccatgggctgcatccactctctaaccagtcccagtgagatgagctgggtacctcagttggaaatgcagaaatcacccgccttcagtattgatctcgctaggagctgcagacaggatctgttcctatttggccaccttgccagccaccagttcatctttttagtgcatttcaaagtaaattaaaaatatgtgaatattttactctataaacttcttaatcaagcatatctgtactaatctttatattattcctgtgtcatcaaagcttggcttttgaaatagttaattcttagcctatcagaagccagatacttttgcagctctttggtttgttttttccttaagacaaagtcttgaatatactgctggactggaaatggggaactactacccaaagtacacaaacatttaaatttttaattgtattaaatctttctgaattttcttctcactgtaattcagtgtttcgctttctgcttaacattaaaataattttggatatgtatatcttttttagatacctttgtctggatatggaggaacaagcaatcttattttggaaggcgttaaaaaattatctgacagttacatggtaacagtgaatggcttagtacctggcaaagaaagtaaaattgttttttctgtccgcaacactggctcccgagcagcttttgttaaagcagtaggttttaaggattctcagaaaaaagttttgctggatcctaaagtattgaggatttttccagataaatttgtactcaaggaaagaacacaagaagtaagtacaaaagtttctgtgctaaaaacatcaactcattttaaaattgttaataattatgtattttaaagccaaaagctaaaataatacttgaaaataatgtaggaatagaagtacttatgtgatcttggaaatgccatgcgtatgcacttgtgtctgtgtcgaatttttaggctcgtaagattgttgaatcagattgaaattacttaaaaatatttaatat

SEQ ID NO: 88917 - DNA, 1062 bp, Homo sapiens
attatcacaaataatgaaaatgtaggacctgaaaagaatctaattttactcttcttttagggaattcttgtttgatgttaatatttaactgaaactgataattttactaccatgtgtaatttttcaaagaacttccaaaacaggtttttcttttaggtgtaaggtctgtgtactaatatatcagtattagtgggatttgccaaatgcattagtgaaaatctaattaaagttattttatatataacgtcacttttaaataataaaaaaaaatctctcctggcagggccctgttacataaaccagagatgataaaacagatacttccagaacatagtgtgcttcaaaacattaattttgttgaagcatttcaagatgagctattagtaactgaaggtaagaattccggcgtgtcttgatgtattaaatcttttgggtcatttatagtattatctatgtccaatgatgtgatataagaaggaagtgttagtttagatgcagtgtcaggcagagtttgagccacagccctgctgtatgagtttgaacaaattacatcattgaatgtcagtttccttatcttgtaaatggaaagaagagcgacatctagctcatctagcttttcatccatacagagttgttataagtattcgatgaaagagctttgctgctgtataaatgttacatgttactttctgcacttattctctaggcacccttgtaaacaggaagaggaaaatggtcattattaaatcaaattaattgctacttagatttgattgcaaacttgcactcattttgaggttactgtgctatcgtgcctattgtaagatttatggaagatgtagtggtggcaaaaaaacttcaaaatagatagtaataaggtgacactaacctagatggttagccctgtttacactaaacatttcaaatatttaacaatatttattattcatacaaaatataaatatattgagacatacagactgtgttaaaatgtatatacagattttcaccatagtgttgtttataatagcaagaagctagaagtaaccttaatgcccaaga

SEQ ID NO: 88918 - DNA, 1109 bp, Homo sapiens
gcctgtcaagattgcccatctaaggtggggttgagctaggactcaggccaggtctttgggacaccagaatttcacctcaaggaatactatattccttgtgattataagtttattgcccagaggaatggaggaaacagtttcactttttcatgttggttggtaccatagatcacctggagtataatgcagttgaagcttttatgtgatgaatttcagtaacatttgcttgagcatgttactattccaaggatttgtaacaatcttgcttttacaaaatgtgtaatttgtggcatgtatttttgtagttgatttaaactttttcagtcaggagtcttgcttaagttataaatttaaatttatagttactgtgttcttttaaaatttccatgtcaaaatatatgactcaaagactatctaatttaacatttcttgtttatacaaatttgggtgtcctaatctagagatgtttatcttgaacactctttcattaatctataaatatttaattaaatgaatagttctagtttctagatttactttaaattgaatgtctatgagactgccacttaaaaatcatggacccttaatttctgtgcttcagatttttcctctttgcagtagaggtaatagtacctatctcaaagaattgttttgaaaattaactaaattaatatatataaagggattagaacaatgtccacattaagcttcatataaatgtttgttgccgaatatatctacaaaggcattcttattttaatgctcacaacccctgatacagatcgttactctatattatagttggggaaactaagttcagggaggttaagtaacttgccaaaagtcacaaagtaaatgagtggcaaaggtagttcaaattcaggttccaagtctgagctgtcagccactggtgctgaattgactgtaattttgtgccaggtggtatactgctaatccaaatgtcacctcccccaacccaggaaactaatattctatagctataaatatacaaatgtatctgttactttgtggtatgcttgtgtgaacattcatgtatttcaaacattattttctatttcagtatatgatcttccccaacgacctaatga

SEQ ID NO: 88919 - DNA, 1325 bp, Homo sapiens
ctgtagcctgtgactctcatgacttcccgtgtgctcgggcccaggcatcacaccctggcgcctgcttggcttccacatgtgggcatctcatgggcacatcagatgtgatatgcccaagagaggccctacgcctcctccaggctcagcctcatgtcagtaagtggcaccactatctgttcattggttgttatttctgatttatcttcttcctccctcctgccactctgtccatcagcaagtcctttgaagcctgtcttcaaagtagaggccacacatgcgcatgtctttttctcccctttgccactgtccaagctggaggcagtcaccctgtgcatcatctcatagccaaactgctgcagccctgacttacctgggcttcctcgtccccttcaatgccttgcagtctcttttttacagagcagtctgtaacgctttaaaaatgtaaatcatcttattgctcctctgcataagcccttcggtatttttgcattatacttgtaataaaacctaaaagagaatatctgacatacctgatttttaaagaaaatactgtggttcttgttgaactcctttagggatctaatgattggggttttttaaccccagtatgaggtagttaggcctgtcacagtcatctgcttgttctccagtctctccgagtttgagttatgatatatgtgttccttttagagagctgtctagaactcgagaatcatggcaccacagacgtgaaatggcatctgtcatctttagcgccaccttatgtcaaggtcagtcatgactgcctcagatataatcgttttaatgtttagactttatccaggatgttctaaaaactgactatgagcataggttgatattactggttatttgcttgtttgttttctgagacaaaaaagtcttgctctgtcgcccaggctggagtgcagtggtatgaacactgctcactgcagcctcaacctcccaggctcaagcaatcccctgccttagcctcccatgtggctgggaccacaggtgtgcaccaccatgtccagctaactttttgtttttttgtagagatggagcctcaccacactgcccaggctggtctcgatctcctgacctcaagcaatcttcccacctcagcctcccaaagtgctgggattacaggtgtgagctgctgcacctggccttgctggttatttgttccaccaattcatttagttggttttctctttagatgaggatgatatatgcctagtctttttcacaaggtggttttgagaatcaaattagagaatatgtgtggaaatacatgtttgctccatttaatgctgtctcctagc

SEQ ID NO: 88920 - DNA, 3001 bp, Homo sapiens
ttacccattcctttgtttttcaccctttccttccttcatcttcttagtgtccaagcccctggtggtgtaattctctagtcagatgctctcctctccctgaccagtcctgcttttgcctccaggctctcaaaagccttgagctcaggctggctgggttattatgtttaaggttctgcgtgggcagaaattaggccacctatgtgttttaatgtttaagtccagactcaggaatactgatttgttgttaacctgattcattgttaactgattcattgttaagtgatcagtattatcaacactaaattatttgataaagctaaggctcttaatattggtaattgttataaaatgctgtttttaaacattacagttttctcatgattgagctttttacaggttgtacacatgcagggtgtttatcactgagctatgtgcccagggtcactggctgactgacatttggaagctaatcataatgcgagctgccactgtggagcgtctggcgcttgtcttgttctgcctcctgtagccgccgcccccctcactgttgtcagtcctctacagctcctggccgctgtgaggcccttgtcctggtactgcttggccagcagagggttccataagcacacaagggaagacaattgcgggtctgtggttggaccttcctcgtgtaggtgttgtgcttcacagctttagtgctttctgataacatttccccccacagtaaagcatttattgtacattttaagaaatatgttatataaagccttaagcaaaaatgtgttttggatctggtatagtaacccgctagaaatgaaattgtccaaattctttcaattaatggcaaaactagccagtgcaaaagcatttgttcctttaatttttttcataccaaatctttgaactggtgatctagctaacactgtgtttaatgatcagtgtctaaatttctcttctgtatgtatttcgtaggtctccatcacatttttgcccagaggtaggggggattatgcccagttttgggatgttgaatgtcaccctcttaaggagcctcacatgaaacacacgttgagattccaactctctggacaagtgagtagtacactgaatttaagtaaattattgtatgtattttaaaaacagaaagggaaattaataagaaaagttggcctgaaaatgcagaatatagccccataatcttaattttcttgtttgtctttattaattggcatgtttgaggactggatttggctgtattgttcatacagcccatgaaacccatgtttgacttagttatataagaaactctgtgcgtgtgcatcatgtatgcacatgggcacatgagagagaggaaccaggcaggacagagtacagagcttgcaatttaggggatttaaaaatcttaaattgccttttaaaaatttttaaaggaaatgatagaattcaaataagtaaatgtccatatattttcttagtttttatttcttctccgttaccctgtgatttttctgtatagagcatcgaagcagaaaatgagcctgaaaacgcatgcctttccacggattccctcattaaaatagatcatttagttaagccccgaagacaagctgtgtcagaggcttctgctcgcatacctgagtatgttgtttttgtcattcttatgagttttttcccagtactttattgaggaatagagtcagtaaaatgctcgatgactttacctgagttcacatgtgttaccagcactccaaccaagatacagaatattcctctcgcccagaaagttcttacgtgtccctttgcagtcaagatttgtcctgttctgatttctgtcatcatagattcattttgcttgaacttcatatatatacatatgtatgtatatattctttgtgtctggcttctttttctcaacatactatttttaaaaatccattcatgttattgaatgtacctatagttcattcctttttattgtttagtattccattaaatgaacgtatcacagtttattcattttcctgttgacttttggatgtcttataatttggaatgattattaattaaggtgctatgaatattactgtatgtgcatttctaaagatgacatacattttcgttactttttagtaaaaatacctacttttacccacaattgcgaggtcacatgataaccatgtgttgaactttaaaataaactgccaaatagttttccctaaatagttgtaccattttatgttcccataagcagcatatgaaagtagattcttaaaaagctttaaaatgtaaaacttataccagccgcatatatagctttaatgagaatattatttagtattctaccttatgaaaatatttcttataatccttaattaactagtaattaggtctaattaagttcttgaggaggatgcctggaaggacaatatatgttaaatatctgctgaatttaatataaatttagtcatttattttttaatgggagccaataatgcatttggaagaaattagagccctttaatgaatgcatgttcttggcacactccctccaggctgttatcccttgcttctctcttgctctctgagccccgcgcctccacagctcccttctggagacacagcctcgccaacccagagcccacacgggctgcggggaaacaaacgagaaactgggagaagtgacagaggcagcttggtctgtgaaacctgggaaggagttccctgaaaggggacatttaagttgaggaggatgagtggaaacggcctaggtgaggagggtcggagaagttcccaggagaagttcagtgtgaaaggggagtggtggggggcaaggccagagctgggcctaggaggtgtttgcttttctggagagctgggaagccagggagtgacatgatcaggtatgcgtgtgtaggacaatcccctagctgtggtatgactgataagaaggaggtgaggaggggctattttaaaggagtccaggagtaaaatagtgtcaagg

SEQ ID NO: 88921 - DNA, 1740 bp, Homo sapiens
gaatggcatcctcctctctgtatcttccctggagcttcaggactgagtattgaatgacagagaaggttctgcaaagtctgcacagggagactgccattgcatcaagtcatgtctgcattctgtatatggtattgtcttttctagtctttaactcgagtgtgttgtcatctgtaactctccctttgtactctgcacaattcttctggaatatagtctttgtgttcagtcaaggatcagagtgtcaaatctgagtcattacatagacaaatgaggatgtctgagtattacccatgtatatttattgaattatatttggtttcccatcaacccttgaaatgttatttgatggacctttctaagcagtgctttttaaaacagggggctaacttccttatgatctttgaaagcttaattctttttaagagcttcattttgctattgacattgaacacagtgttaggaattagggctgggaatgtaaatgccagtaagggatttgctgtaatggaattgtagctaccttcctcccttgttttaaatgacctctctaatttcttaacattctgctgttacccttggaagggcttgccattgttggccatggtcctggttcgtgtaggtttgtatttacattggagaagactcttcccggcaggtttttagggctgtctcttgaatcctctcatgggcttggtttgcaagaccacaatcctgcagtggaacgcagccagtgccagctgcttattaagggattttgtgccaatttgttggcacattatttgagactcctgcaccccaccctactcccactggagtatatacatacatagacaaatatttattttcccccaactgctgacagtgttctaagaatagttttcttgcctggcacgcggagagcaagggcccgtctgcagaggtgtttacagtttgggactgtgctgtagtcttggttgacttagcagcctggcagaccagcctcatagctcctgggacgctctctgtttttgctctgggctgctgcaggggtaacctccctgactgatagggaagcacagtcagaggagagtgacttttgctccttgtgcatggtttctggcaggcagtccagcagagatccctgagctcctgacgtctctgcatgtagccagcataaagtctccttgtggtgggtgggaggtgactgctctacgtcatcacgtaaaaccaaagccacctcagggccctgggcaggaattcttgaaattgtagactgctctgatctttctggtagtccttgccatgtttcttctcatctttctttggaatctgggcttatccagtctctatgatgtgtccttcttcctgtgtaagagttagtagagaaggaaaaatgttatccctcaagaagtgataaaacattgtaaaagaagagcgcaccatattaacctggaaaaatttttggaaatagttaacagaatgtatagcggcacatggatattaaatatgaatagcggcaaaattgctatgtagtccaaaattattcttttctttcttccttcctctctgtctccttccctctctccctctgttccttcctttttttaggtctcagaaaaaaatctcctggaagccattattttctgatgtcaaagagactttctgcctatatgaactgtgttagtttagaattacatcttgacctatattacgggtgtacatggaagatgagtcttaagtttcaaaataggaatgcaaagg

SEQ ID NO: 88922 - DNA, 1082 bp, Homo sapiens
ttgctagaattttgttaaggccaaacatcataatgtcagtggatgatctcagtaggtggggtaagacctttgtgctttttaaaatttgaataaaataaaataaaataaaataaaataaaataaaataaaataaaatagaattaaattctactcaggtaggttcagggcaataaacattctaataacatgtcttttaaacaaattataggatacgatgggcatagactgctcttggtcttcccccagcctcctcatcctccctctttaggggtagccttgaacttgcaatggagaatgagggccaggagggggtggagtcagcacctggctgtctggatagccccaccataccttgttcagtcgcttctcttcatttcaaatgatccctattggacctcacactctttgctagtcttgcccctaaggatgcagacagaaaattcatgatgggcagacagaaaattcatgatcctccatactccattcttgtgtcgtctgtggaggacctccacatcctctgcaaatgtgctaaagttttctgctttcctccaaggcatcagcccttccagagttgcaacaactatgaacagtgcctgacctcttaagctgttgctcctaaagcttgagagagatgaaaaaatcactttactaggtggtgatgaactaattaaagacagtctttcattgaggggttggaagcagctggaatggagggtgcttaccgtgctggagggagcaagatggcaccactttctctagggctggtcatgatcggtgtggttttgttcacaggcacctgagcacatcaggtggggagaccctcatgtactgtgcaaggtgctcacctgctctttggtgtatgctgggggtgcacttccacctggcattgcctggtggacagtgagtgggtcccacaggacctggtgggcccatgtattagtccgttctcatgctgctatgaagaaatacccgagactgggtaatttataaaggaaagaggtttaattgactcacagttccacgtggctgaggaggccttgggacacttacagtcatggcggaagtggaagcaaacatgtcct

SEQ ID NO: 88923 - DNA, 1091 bp, Homo sapiens
tgttgtctcgtgcatcttacatcttttactgtgattaaaaataaatgtcgtggggttcacgtcccacagacccttatgtactgcagaggtcaaactggggcgggtttctcacacgcgtcatcacgcgaggccagtgtccgtcggggtgtgtgtctacaagcacggggcttcgtggcctatctttatgaaccctccagggtgatgtgaagccagccacaaacaaacacacacatcatctgaaaacaataacaaaagatcggggttctaggaaaaagagaaaatagtttaacagagcttcattaaaccaagaacgtgcttctgacttgttgacctactggaatcgcttgttttcacgtctgcaggaaattcatcaaaacaattttgtctaggattccagtatttcaagttttacccggtcacgtcagtgcttgatttgatcatctgcattttccaattaaaggttaagattttaggaagctctttgaagaggttgtttaattcctgctggtactttggtttcaggcctggagctgtggccggggtgatcgggtgattagtggaatccaactaaggtaaggcaggcaagaccttcgtggacttcactttgatatggaaaaaccactttcacacacttactaatgatagatttttagaacaatagtaaagaggttggtaatattttaccctttaaaatcccatgtagtctgtatagtatatagaaaaagaaataagaactaaatgcaaatgtggtattttttttgcaagccactctgcattgttattttttaattaaaaaattaaaaaaatagatttatggggtacaagtgcagttttgttatatggatatattgccttgtggtgaagtcttggcttttagtgtaaccatcacgtcaatagggtacattgtacccattagatgtactgttttacttaactctaataaaggtaattttgaagtagtttatttaaatcttatccaacagctttggcctttcaggcagctctgaccccagctgttcgacttgggtttcagctgttacacagtgggcttatccacctacccatccacccatccatctgtgctggcagga

SEQ ID NO: 88924 - DNA, 1047 bp, Homo sapiens
tgcatgtgcacatacaggcatgtgtgaacatatgtgtgggtatgtgtgatttcccatagggcccagggtccaggtgggatgggagcccttccaggtttggagcagagcagtgtctgggtgtaggtttccagagggtcagggtctctggggaatagatcacggtggaggcccaagggagaggcagggtgccataggggctgttgcagcgttgaggccctagggacggctccccaggccagggctgtggggtgcttggagtggaggaggaaccagaggatgcactgaggtggagagctggccgagggagatgtggtgcgtctgaatttctgctgagcactggaattccattttatcaggatgaggatggctggggaagggatggctttgatcattgcttttattgtgaggagacaatttgtcatcagcattggtgttattttggcctgacttttatcactcttgttcatcatgatcttgtttctgcctaactttcgtgcttgctaccctcttagaaaatgatgtatcacttatttaggatattatgtgttaattgttgtccagaaatcaaactaagtttctttccaagaaagacgtgatgtaaagcactttgattccctgggagaacaggtgctgtgtgtgcacaaggttttgctgcctgattattctagggaaaatgagacagtgattatatatgttggcaggactcagatcacaaactgccctggatgtagggggaggcttgggtgaatctaaaagcatcctcctgccatttgaggtgagtcctctccatgttgggagtagaaatggctcttcttttaaaatagggtccctttcttggctctgtctctgagtcaccctcctggggtcacagatcagctgcatgggcacaggttaggaatgtggtctcagcctcagccttggaccccatccccccatcaaaatctgccttttaacaagatccaaggggattcttgtgcaccttaaagtttgggaaatactgagttaggacagttttaaaacattctgaggacttcttgcttcgagatc

SEQ ID NO: 88925 - DNA, 1026 bp, Homo sapiens
gttaatagtggctcccaagctgagcaagatttcaatgccaatggttatttttcagtggtctcatagagaaaatactgggaaatattctaagaatggtgtaaaatgaagaggaacttggtaattttttaaaacactggctcaatgaaatgtaagcagctggcttacacacagtgacaatctttacaatcagatattgtgctctgaactagtgctctgatgaggtagtagaagcatgtctctattttcaattaaaatgatccgttaatgtgggaatatttggagcatctgtgtcttttcaaatgaaccggggtagatgatctttttttttttttcctgaggggaagcccatttgcgtggtggcttctgctggtagcatccgtgcctgtttcccagcctgctggggccctagcgagctgtccgacgtcatgtgctcacacttggagtcagtctgagtcggcagtgtgggagttccttccagagagatgtgttcttttcatcttgaatggttcataggtttctgcagcaggcatggtctcattctcaaactcagtgtcctcacagccttcttcgaccccttcctcctggtatccccttggatgttctgtcctccatcctcccatgtggccctgtccgtcacctgacatccatgttaacatgcttatgggtatcactcgaatagctgccttcacagcaggctcttgctgctgtggatttgaacaagtatttgtagaggagtcaaggcaggctaccttgatctgcaaacacaccagggctgtctagagccgtgtcactggaccgctgtgctggtgtctcctgggggcttgctagaaatgtggaggctgggcatggtggctcacatctgacatcttagcactttgagaggccaaggtgggatgatctcttgatcccaggagtttgagaccaggctgggcaacacagcaagatcctgattgtacaaaaattttaaaaattagctgggcctggtggcgtgcctacctgtgatcacagctgcatgggaggctgagg

SEQ ID NO: 88926 - DNA, 1006 bp, Homo sapiens
acatcttgtgtaacgctgcaaattcgcggaaggctttgaaccgtcaccagagtagcaaatactcattgtgaaagtttttgcaatgaggtacggaaaaccatttcagctgctctgattgtcagctctcctgtgttttctttagctcctgacttaaagttacgtgtcctgtcagttttgatactcttactacttagtgctttaggttttatcagctggtgccacatcttttaaaattctgtcccactagcctctgtgctggtcctgaccgattcaccagctcttgggactgtgtccagatgccttttgtgatgcctcttttctaaaatgcttttatttgggtttaagatgtactaattctttcacacacccatagctgaataccaaatattggtatgcatactaccaaacttttgtgtatgaagttcgtacaaggcactaagtcatttaaaacattttaattgtgtgctgagctcgtaagtgtacaatatgactgtctagtaaattcttaattatttgtcgactctttatcgaagaaaaaagtaagtaggggaaaagataaaggagcatccagccggtggcaaaggaacaagccgtgtagctctgcttctcacccactctcagctagcttgggccacggctgcctgaagtgacaccaaacaggaaccccactgggaggactgtacgggccacacccatggacgtgatctgtctatgaaacaggtcttctcagtgcttcggggtgaattttgacttctcctgagccatcctcagagcacagctggtggggaacttcacccgtctggtcactcctgaagcagtctggctggcagccacaggctgggatcccagttgttggaggtcagtgcacacagcggctatctgctgtagcagaaagaatttaggggaggaaaggcttgagaaggaagggcaagagagagcagactttgtggcatcagtcaggtatatgtgcttgtattaacatgaacctgagaggctgatggtatta

SEQ ID NO: 88927 - DNA, 1014 bp, Homo sapiens
aggcttccaccttcatcgtcttcatcagtctccgtttattgtgagctttcagagcttatgctgaattttcttgctatgttcaaatcaccagggccccaagccttggacctatgttgggctttgatttcatgagagcgtgttagaggttactcatggaacacctgtcaggccaaggtaaaagtgtataaggtgggtcctaccctggcacacttagcctgtctttttaagcttgaaacatttaaaagtatttagagatcttgttgatgaagactctgattcaaagtcagaacttggagaaattcagatagacatcctgagaattttcagcagaaagtaatataggctttttcagctagaagggccatagctcaccattgtggatcaattcagggaactggggtgctggagaaagcatgatccatacagtcccaacagacttttgcctcttgccaggaagttggagagattggagattattgttgttgtatttcatgtgtactttgtcgtatatgttaactcttgtactaacttctagtaaactgtatataggtctcattccataataggggcccacccattttcaaagaatccataataactcgtggagggctgaagtcctgggttgtatcctgactctctctgtgaactgtgaccttggaagagtaaaccgtttctttaaacctcagtttcctcctctctacaatgagataataaaccaatttcacataattactgtgggaattagatgaatacaaataaatcacctagcacagtgtctagcatataataaatatacaacagatatcgattccatttataaagcttccttcctccatttataaagctaagagttaaataacccattctcgtataattgaccatggatatccgagtcaggtgggcctcgctgacaggtgagccaggattctagggccaaatagagacagacgaggtaatgggaaaggctgacatcataggccgtggtagccctctctggggactacttgttaacac

SEQ ID NO: 88928 - DNA, 1411 bp, Homo sapiens
acctatgtgtgaggtattaagaatcatcaattccagtggatgcttatgtccccactacccagttccagcagaagaatgttcctgtcatcttccacttcccttacacagacacatcttctttctctaactggatgactccccatgtgggacaactgcctgcacgatacacatgagtaatgatgtggttttccctccacaaggtcccgaggaaccagaggtagctccgttttggaaagagcttcctggttgcccatgggttatgaagtctgctggtgaggcttccttagatgtctgaatgtctctggtggccatctgtaagatgcagtcagtcactgtgttcagggagggcggcccgtggatgcctggcttccacacaagcagtgtggtcctggaggcacacgtggggttcctggaaggagtgcagtttgcagttgttgaagccccacaggtgggagaatatttcgctctagctacctctaggtctttatatgacatactgttcttataatatgtctggacatgactttctttttttttgtttgtttttgagatggagtctcgctctgtcgcccaggctggagtgcagtggtgcgatctcagctcactgcaagctctgcctcccgggctcatgccattctcctgcctcagcctccctagtagctgggactacaggcgcccgccaccacgcctggctaattttttatatttttggtagagatggggtttcgctgtgttaggatggtctcgatctcctgaccttgtgatctgcccgcctcggcctcccaaagtgctgggattataggcgtgagccaccgcgcccggccatgactttcttttcttttctttttgtcctgtttgttattttgtgagattcctagtctgtggattggtgtctttcagcagttctggaaaactcgcagattttcaagatctcctcaaacattgcctccgtcttggtctcattatcctcctcttgtgatgagttgtgggttagagcttcccactctgtcctctgcactccttctctctcttctgtatttcccatctttctgcttttacatcctgggtaacttcctacagtcattagttcactcctcagctgtgtctcgtgttactagacccatccagtaggtttgtgtttcttgtattatattcttcattccagaagctgtatctgttcttttcaaatgggattgtcattttaaaaagtcgtctttctccttatacaaagttcccaatgtcttcttttctttttaagctattaaacatacttaattttacccactctatctggtatttcccacatctgaagtctttgcaagtctcattaaacttcccgtgtttatgctggatctcactcatggtgctttgtttcttgtttgttttgtgattttcgttttttaaaagtgag

SEQ ID NO: 88929 - DNA, 1050 bp, Homo sapiens
agtcagaagttacgcagccagatgccagggaggttgagtaaaacagaatattttgtttggtttgttttcatgccaaatcttcccaatttatctgtgtttgtcttttttaaaaaatacaagttttaaaaaaactagcaaaagatatgggccaagaaattgagatccccgtaattctttgtttagtctgtaaggcagagtacatttgcatctgaaattaaatggccattgaataaacacagggactcaatatttgtaagggcactaatgtttgcagatgtctgcagttgttaagggcaagccaaggaaacaggaaatgctgggactcatattttttttctggaagaaatgggcattccaaatgcatcctatataacctttttttcttcttcttcttcaggtacatccataatagtttctgaaaggtattcaatcctggtggagagctggagatgtgtttatgctgggggttgttaaatatatttacagccttttcagagagttccgtgggggttcgtcagtggttatttattagtctgcttcaacatctgctggctggaaaataatctgtccaaggcaattcacaggaacattataaattgcttccgattataatgagcagtaggaaaggtaatttgagggaaattccacgcatgttagttacagcgtgtcagaagcaagatctggtgtgaaatgcccagagaatcagtgtctgctgataacagttataagatggaaggttctgggtgtctcgaccgtgtttttcttcctgtctcacttctgggcttgctgggcaacttgcctgcttgctggggttctttggagcctgtgggcaccttcatgtgggcactgagcagagccagccctgccccttcctgcaggcactgccagcggtccctgagtggaggtggaggtggaaaccttgagtgttgaggcccctgggggctgctgcattctagtttccaagacagagtctgcagagctgtggcaaccctcagaggcccacacacacctccaaagccagcccgaccccgcaaggcactctcaccgggg

SEQ ID NO: 88930 - DNA, 1050 bp, Homo sapiens
ctttcccagttttttctttcatacactgccgagctttggaaaatttttaaaaaatgaatggtacacaaagttaatgttgccattctaagtagcaaaattcaataaacaagcagtgcagcaagcccccgagatgggggcgcatccagtcatggctgcatggggggccgggctccctgcgcccacagcagaatgtctctgagcctgccagtgaccaacgccatgagccggtcctttgagggagggcttcggactgggtgccgggtgtctctctactagcaatcagtatctggcctgaggacatatttgaagtgctctgcaccagagccttcctaaaaagaagagccgctggatggaagatagaggatggcccctgtcagagaagggaactgttggttcagagaggaaggcagggatttggatggattcttctaggtcagagaagatttctaaaagtgcttccttttgagcctttctcattcttatgaagatgaaataaaggtgaaagagatcaaacggagatacgcagaagttcaagaagtcctcgcctgggtacaaaattcctctgctggtgtcaggaggcctcccccatttactgttggcccctatttcctgcctcataagtttgagccaaaattagtgaatggaaatgcagtcctcacgataaatcttttaaaaattcgcttctgctctcttgggatttcttgtggcttgggtgtgtgtccatgtgtttatgtggtggggagggtgaggacatgcttgtcaagcttctgtattagtaaattttggacactaaaaatagaagaactattgaaatacataatttgcttcatgaaatctcttttccattaaggattgcgtcagtatttaaagagaatgctagagtttctgaaaaagcaaacgtatgctggaagattgtgttcttatagatgggattcaagatgccttgggtctcctacaccgggaacaagggacaaaagtcagcggtatgcccaggagtgttcattcccaccaaatgttcttcctaacaatgcaatccacactttgctggaa

SEQ ID NO: 88931 - DNA, 1153 bp, Homo sapiens
gggagcctctttgctgcctgccttggaattcaaccacctgagccagaaatctatagaaccagaggtggggaattttacctattcattttgcagatgttaacattgttctcttttggatcatttgtatgttatgtagtattaagttagtactaaatgagattgcagaacgtactgcatcatgttccctgaggacaatgggagtcaagacctcattcttcctttctggacttgaatggtctgggggaccacacctccttcccagaattcatctgcaatcatgaattttggcctgaccttctggttcttgaaacatctttcccctgcatttggcgcttgtaacttgtctttgagaaatgctgagtcaggccaattgatgatattttccctctagaatttttcctttgtgacttttgtgtcaagtttgttcattttaagtagtcaaaacaagcttttaattgtcttgcttcttcagggttaggctttgaaaatcaagctgtattcttctttatgcatcattgacagtcaccaacaataataattacagatcataattatcttgtggcaattatgataagaattattttcttagtagaaagaatgcatcctgatttcagaaacctccagggcagtgtataacatgaagcctgttctttgttccggtgacttgattggacagtcatagtggagagatgcacaggccgccagaggcattctcagagtatcaagtctctacagatgaagggcgcttgtggagaagcatgtttcagtgcgttttctctgggacaacatgccccataagaaaagttgaatacaattaaacacgtcctgcctgcagccaaagcagattttcactgtccttgaaagtgaggattgaacacaacctcccttccctctccctccctctgtccagcttcttctcttttggattttgaacaatgtaaatgttagaaaaactttgaagtgagaaagaaaaagacaaatttgccctgagcatgtcaggtacacgttctgcttgacgcttctgtgtgggcctccctgttgcagtctctaggggaggataggcacactgtctccagaaagaggacagtgaacttccagctgcatttgactgatactaggccatttttagttcttagagaaacaacattaaaac

SEQ ID NO: 88932 - DNA, 1086 bp, Homo sapiens
ctcccagtagtgaaaataataaatttatcccttgaaatataatcgtgtgtttatttgtcacagaatctacacttacttacaaatgctttatgctcaggatgaaatggagatactggctctcttgtttcagtgatcttagatgataattccaggaattttaaagatatatatatatatatatatttttttttttttttttttttttttttttgagacagagtctcgctctgtcgcccaggctggagtgcagtgataacgatctcggctcactgcaagctccacctcccaggttcacgccattctcctgcctcagcctcccgagtagctgggactacaggcacccgcgaccatgcccggctaattttttgtgtttttagtagagacggtttcaccgtgttagccaggatggtctcgatctcctgacctcgtgatccgcccgcctcggcctcccaaagtgctgggattacaggcatgagccaccgcgcctggccttaaagatcttaatagtatgcgcagaaagatgtttgaagaaaagaaggaaattgtatatttgacacactgagcttctttctgtgttcttagtgttgggtttgggtcattcaggatttcttaaccaattcagacatgaatcaggctgctgtagaagatagtaattacaatggaatggacagaagatgatttttagccaatgaggcaaaaaaagtcatctttcctgctttttctgaaatgatatgttgagaagatgtttttgtgagatacacatttctgaattaaaggattccttctgaaaatataacttgttaggtaatgtggacatattttttctgttggccaaagttcattttttgaaatgggggccttcatttattttttattttcaaaattgagtttctataaggcctaaaataaaatagattaaatgtcaccaaagttgtttgtacctgtttaaatatcttttttgcaagccacttacattttttggtactgaaagctcactactcaattgtccttatgagcatggaggtgtctcagtgtgtctgatcatactggcccagatgcctgagtggcacatgtgcactcagagaa

SEQ ID NO: 88933 - DNA, 1907 bp, Homo sapiens
tagttgccgaaatatactagttctctgagggttaaagaagtaaaatacctttttaaagttaaatatcactagaaaaatcagtgttattacaagggaagaaatgaacccagtttaagaatttgccatcagtagcagtattaagcagtggttaatgtcttagaagtcagacttctttttcaaggtcttcagaaccacacttgatttctgttttgttgcagctgtaattgacacatactaggcagctgactccttgaatatccagtgtgacccataaaatagtctgttaataccggatcttaatttttatgttattcattaagattttaactatattcagtacgtaatttggagacaaactagcatcatcaaaactgcctgtaaataaggtgtttagtctttctataaaaacagaatagagcagttacctaccagttaaaatatcttatatgaagaaaatagaataaagatccagtcatatatgtaaataagatgtactgattgtacgtaaatgaaaaatggaccctttaaaaattatttttacctgaagcttgtcataatttttttaaagcaaatatatatatggtgatggtacttttcaaagtgtgtattagtggtgatcacctcaaacataaacctctgttgtgaatcatttgtgtccttttcaactgtctttcagaggaaaggtaaaaaatcattaaaccttaaattcattgttaaaatcaaatatttgtcagcagtaactcaagctcatggttctcaagcagaaaaaggtttgggagactaaaaatggagtcaggttttcatggagactgctaactccttggggtagacatgggccttgcctcagcaaaccagtgcaatttcccaatgtcttagtttcagaattcatgctgatttcattatggagtaaagttttaaattgtggctgctgctttttgtcttacattgaagggaaatatccttgtttgagcattctacttgattttttttttttttttttttttttttgagacggagcctccctctctctctcccagactggagtgcaatggtacaatctcggctcactgcatcctctgcctcccaggttcaagtgatcctcccgcctcagctttccaagtagctgggagtataagcgtgtgccaccacactcagctaatttttgtatttttagtggaggtggagtttcaccatgttagccaggctagtctccaactcctgacctcagcctcccgagtagctgggactacaggcgcccaccaccacgcccagctaatttttttgtatttttagtagagatggggtttcaccatcttaacaaagctatcattaaatcatttgcttgtaatgaaattcagccgttgtcagctgtgagcgttgcggggctggtggggtgtgtttgagtatgtaagtgtctatttcctgtgctctaacagtgactatttcagttctaacccttcaattgctaattggatgagggaatggcctcttagattgtccttgttttgacttatctgctaaggcgagagaatgtctgggtttgccacacagtcccgcagggacccctgctctttgccaggatttttatatcaagtacttagtttggccaaatttagagtatagtttaaaggggaaaaaaagtttgtatttgatgagtctaattactatattagaatgctttttaaatgaatatgctgtgattggaatctcttcttgggggccggggagagtgctgagagatgcagctgtgtctctgctctctgcagtcttgggcaggcagcaccgctgtctcctgatacagagggttgaatgcactgcttcacattgatgccacattttcaaatctaaacatgattaacatgttttttaagtatttatcaaataattcacatttttgcaggtttaag

SEQ ID NO: 88934 - DNA, 1029 bp, Homo sapiens
cttgctgtgtcacccaggttggagggcagtggcccgatctcagatcactgcaccctccgcttcccgggtttaagtgattcttctgcctcagcctcctgagtagctggaattacaggtgcccaccaccacacctggctaatttttgtatttttagtggagatggggttttgccatgttggccaggctggtctcggaactcctgatctcaggtgatccacccgccttggcctcccaaagtgctggggttacaggtatgagtaaccacacctggcctttatgagattttaaaattacactgtgcttaaactctataccctaacatcagtttttgtggattatgtagcagtgtctgtctttttacttcctaatggttaatgattgattttcaaatgaattgatttaaaatggaaacctaagtattacctaatttttttgaaaaattgtctttgtagaagctgaaacctatcaacactcttcaaaatgcaatggaatgtaccacggactgtatctcgactggcacgcaggacatgcttggaaccacataatgctggtctctttggacactgtcaaaatgtaaagggacctttacttttatacaatgctgaatccaaagtggttttggtacaaggccctcaaaaacaatggttgcatttatctgctgcccagtgtgttgcaaaggaaaggaggccattggatgctcatccaccccaaccaggagtccttcgccataagcaagggaagcaacatgtttcattcaggagggttttttcatccagtgccacagctcagggaactccggaaaaaaaggaagagcctgatcctttgcaagacaaatctattagtctttatcaacgattcaagaagacatttagacagtatggaaaagttctgattccagtgcatctaataacttctggtgtttggtttggaacattttattatgcagccttgaagtaagtttttgcttagttgaatgtctttccctgtcttaccagaatattaatctttttaattgtactaatgatagct

SEQ ID NO: 88935 - DNA, 1035 bp, Homo sapiens
ttatgtcttcttttcattcttgttattatacagtgcccctctttaactcttataatcaaagaatgtttgcagtctgctttgtctgaaattaatctccagtatcacttttttttttctttttttgagacgagtctcactctgttgcccaggctggagtgcagtggcgcgacctcgggtcactgcagcctccacctctggggttcaaatgattctcctgcctcagcctcccaaatagctgggattacaggcgtgcaccaccatgcccggctaatttttttttatatttttaggagagatggggtttcaccatgttggccagactggtctcgaactcctcaccaggtgatgtgcctgcctcggcatcccaaagtactgagattacaggcgtgagccaccgctcccagcccagtatcactttttaaaagacttcttgggagcctatttattttgcaagatttgcagtttcccttatcaactcatttgtactgttgttggattatctgtgagagtctgttaggagctgatgttaattattcatttgggagggatgagtcaggggattaatttttgtaggtggataattactaatgaatgtttttatatgatgacagtttttgttttgccagtcaactttgtacaccagataaagaatattcgtgtaagatggagtatctgtatttattgcagtgctcatttataggggtgctaattcagatctcactgtctgttacttaggatatagttaaagtgtctgttctcaacatgttagtagtaaggtagagctggcattgggagtgggaaggcatgtgtggtaccacctgatgttgaaggaaggggactgattgactatatggtaatggctactataattacatttaccactgggagaacctttgtctagagaggctaagtaattatctggaagtctctataattcttaaaaaaaaaaaaaaaaaaggcttgcagtcttgctgtattgtccaggctggagtggagtagctgttcacaaatgcattacagcctcaaatacctggg

SEQ ID NO: 88936 - DNA, 1044 bp, Homo sapiens
ctttaaggttacagagtggctgctggaacccccagaatccatatgtttccttgctcacccccagtttaggagagagaattaggtccccaaaccatggaatgtaagttctcaaaatccttagactcccctaagtcacatgcccatccctggaccaataacagtcagccagccacacaatgctatgagccctgtccttttgatcgggatccatcattggagctgggggctctggtagacagctacctgagcagaacagggcctctgaagagggaagaggggagaggatgcttagtaggcagccaacactttccattaccttatctaaccagtaatttagttaacactgttttatctattgttcttttttgtaactagacaatcttaaagtggaagtctttctgtatactatgaagccatgttgtctaatacagtagccatcagccacttgttactattgtattgtaacttaaagtaattaaaattaaaatagaaaaattagtacttaagtcacactagttacacttcgggtgttgagtaggcagctgtgtgtagtggctaccttattgaacagcacagatatagaacattttcatcatttcagaaaaatctgttgaacagagctgctctaaattgtttcaggtaaagtttttgtgtaagcattgagccacagtagaaacaaggatagcacctactttactaggttttcatcttatgttggggattataggatctgaaatttagccgaaatgggaaataggaattcattcatgttgaggtgattgaatataatgtttgatactacttaggacttaaaaatatcagagctgtttttaaaaatatacttttttccattaagaaagtacaaattattttttgttgtgtaataactctgtgcaagtttggtgatatcttgaagttcagaatatggaaaatgttgtaatgtgaacaactttatgtggtggtaacatacccatgataatgaatctcacagtataatgaaagtgactgcccagtttgtcattctagtagagtatgctaaacttt

SEQ ID NO: 88937 - DNA, 1305 bp, Homo sapiens
aagagcggcgcacgcggagcagttgccgggttcgcgccgcgagtcagctcccggacacacgcccagggttgaaggtgccctctagacccctcccgctgccccacagaggcctgggcccatgctacctcttaggacgctggagccgccgccgccgcttcccgccgcgcaggctggaccacagctcctcggatgccacggcggtgtcactcagcagagcagcccgacaaagcgtgggtccgcgtgcaggaacccgccgggctcagccggacgctagccccctgccgcccccggccccgccagccgcgcccactagcaacgtgctcgcgacctccagtgcccgctcagtgaagcttctgcatgccgcgcgcggcacgtcgggactcgtagttccggcgcggaggacgtgcgtcgcggcactctcgcctgaccgtctccacgtgactctcgcacctccggaagtgacgtaagcagacacgcgtggcgcgggccgccgtttccgcaaacagaatcgcgtttggctgtgctggtgagtgtgacggctggaactccggcccttcctttctttgtgtttgtccctcggccgccgtggaggggtggaactggcactcccacccctgacatgggctcacttcgcattagccctgtgcttcactacccaacgcgtgggtctattgccttgtgtcctcagtcccaaggaaaatgggaactccttggggtgggcgggcgctgttcctcctccagactgggcgagcccgggtgggagaagcagctcgaagagctgctccagctcgcgccccagggccgtgctggggaggggcgtggggtccgcaggtttgtcttcagcggcgcttcggaaacctgaaccagaggttgagtaacaggccgcgctaatgacggagggggtgaacttggctggagaagtcccttctcgcctctgtgcgtcctctcgggccccgtggtagagggtcaagcgggcgggtcgggacttagagcttatcccgcttgggctttatcccggcggccctggcggcctgctcgctcgtaccctgaggagctgaaatgacgcagagacatagcttgcttcggaggtgtgactggaaagccgggtcgaaatgttcgtgtggttatttatcgcgtgtccatctccatgtcagtcgaccacctttcgaaggtttcttgaagattctgagggacagctctcttccctatggagtgttttcattattccactttgagtttggtttgggttttttttcccccaatttgttaaattgatacatagaagttgcacatatttgcaggtgc

SEQ ID NO: 88938 - DNA, 1049 bp, Homo sapiens
tatacctgttggccatttgtgtgtcttttaagaaatgtctattcagatcttttgcccatttgtagtaggattgcttctttttttttgctattgagttgagtttcttctgtattccggttgtgaatcccgtcagatgaatggttttgcagatattttctcccattctctaggttatctcttcactcttgtttcctttgctgtgcagaagttttttagcttgatgtaatcccatttgtctgtttttgcttttgttgcctgtgcttttgaggtcttaccacaaaaatctttgcccagaccagtgtcttgaagcatttccacaatgttttcttcaagtagtttcatacttttgggtattaaatttttcagtccattttgatttgatttttgcatatggtgagagagagtggtctagatttcccagcaccgttttttgaagagactgtcttttcactatgtacgttcttggcacctttgttgagaacaagttggctgtaaacatgatgcttggttttaaacgttcttacttatttttgtggtcatctggaatgctgtgtcatttcttctgacctaattatgtttttattatgtcacatctgtgatatcatgaaagtgacataagtaaaattcatgcttaaatctcaatattaattttaggtaataaatatagctaaagataagtcacatttctttatttgaatttaaagccaatttccattaggaaatcaatggcagaggaggagaaataggaatttgataagttggtatccagtttttctagataatcattttaagtatttgttctgaaaatcacttttctgatttgttgttgttgttctctgattcagttctatttggtacttcttggtattttgttacctcaaatggtgggtcatgaaaactaataaccattgaaacccttacccattcatagtgagtgacttgttacccattcctttaagcaacttgatttcttattctttttcattatccaaaaggctttttatttatttacttttttttttaagcacaaacacttccttcatgaaaaa

SEQ ID NO: 88939 - DNA, 1072 bp, Homo sapiens
aatcccagcactttgggaggccaaggcaggcggatcacctggggtcaggagttagagaccagcctgcccaacgtggggaaatcgcgtctcagctaaacatacaaaaaattagccaggcgtggtggcaggtgcctgtaatcccagctactggggaggctgaggcgggagaatcacttgaaccccagaggcggagcttgcagtgagccgagatcatgccattgcactccagcctgggcgacaagagtgaaactccgtctcaaaaaaaaaaaaaattgttttaaagtcttagtgtttacaagtaataccaatttttttcctattctagtgttggttcatgaagttttaccatcaattcaagtaatcataaatggcaaattctgcaaaagcagaagaatatgaaaagatgtctcttgaacaggcaaaagcgtcagtgaattctgaaacagagtcttcattcaatattaatgaaaacacaacagcttctgggactgggctttctgaaaagacttctgtctgtaggcaagtagacatagcaagaaagagaaaagagtttgaagatgatcttgtaaaggaaagttctagttgtgggaaagacactccatccaagaagagaaaacttgatcctgaaattgtcccagaggaaaaagattgtggtgatgctgaaggcaattcaaagaaaagaaaaagagaaactgaggatgttccaaaagataaatcttctactggagatggcactcaaaataagagaaaaatagcacttgaggatgttcctgaaaagcagaaagtatgttcagtgtattttcatttattcataatagaatatgtaagtttgaaatgtggaacacccgtggattcatactggtttttacataatagcttaagaatgttctatttttaatagatatggtcctaagacaaagtaggcttttaactcttatgatttctgttaaggtgaaacatctcctgctaatgagatagattttttagtttttgtttgtttttattttctaatgagataatgtttatcttattttagaatatttaactagaaacttttttttccgagacagag

SEQ ID NO: 88940 - DNA, 2217 bp, Homo sapiens
tctagggcctcaggaagcacaaattgaaaactgttgggttacatgtaacatatataatagcattattataatagaaatcactaacgctgcacatagcctactgaattctaatctctctttttttttgagagtctcgctctgttgcccatgctggagtgcggtggcccgatctcggctcactgcaacctccacctcctgggttcaagcgattctcctgcctcagcctcctgagtagctggaattacaggtgtgcaccaccatgcccagctaatttttgtatttttagtagagatagggtttcaccatgttggccaggctggtctcaaactcctgacttcaagtgatcctcccacctgggcctcccacagtgctgggattataggtatgagccacctcacccaggcctaatctctttatatacattatcttatttaattttcacaacagctttataataataatgtaattatagcttattcctaatttattcctttgtagaaacaccaaacattgactgtcatttattgaactgaataaatcagaactctggaagagtactgggtttattaagacattgacactaaaattaatgcagatgaaatatcacaatgaaaattttaaacctagagatgtttttcaaaataaggtgatatggtttgggtgtgtccctacccagatctcatcttgaattatagctctcataattcccacatgtgtgggagggacctgatgtgagataattgaatcatgggcgcagttccccatacttttctcatggtagtgaataagtctcacgagatctgatggttttataaggggtttccccttttacttggctctcattgtctcttgcctgccgccatgtaagacctgcctttcaccttccaccatgattgtgaggcctcccccgccacgaggaactgtgagtccattgaacctctttttgtttataaattacccagtctccggtacgtctttagcagcaacattaaaatggactgatacacagggacacagaaaacaaatcttaggtctaatgataattagtgagacttctgtggttaattgccattgtttagtgaagtttaccaattctaatagcattttatccattcacaggtcaaatgttctgaggcttatttttaccatgttctgatccttgatttttttctattctcttttattttcagaatctggaagaaggacacagctcaacagtggctgcccattacaatgaacttcaggaagttggtttggagaagcgtagtcaaagtcgtattttttacctaagaaactttaataattggatgaaaagtgttctcattggtatgatccaacaccaagctactgagtctttaattcctattcatttaattatcaaaccttgactttataaagctagagccaagactaggtcttgaagacaaattcttctaatatttacttttggttgactgtgtaagattttaatgagtgtttaattattatgttaatcaggttttcagaaggcaatattttttttaatgcacagaattaaggttacctagtactattaagtaatgattctattttactctaatagttttggagcaactgcatattgttggttaaacattcaggtttcattaagtcaagaaataggcagtgtcttgatttgtttaggccttcaattagttgataaagatcatgtgtattacattgaggatagataaaaacattcaacttttttgagccaacattttatctatggaaactcacctttgaaattaaaatgaaagtgaacagagaaaatatgattcagaatacaattcttgtcggcaccgtaagatagggtaaaaaaaagaatataattattgctctgtatatttagtgcattaagtagactcttagataaatttagagaactttaaaaagtggtttgttttaaaatttttcataataaagatttttttaaagccagtcaaagaagaagtgagaatgctttcttaattatgctagaaagaataaagtgctaattatgggtacttcctactagttttgatgataatttactaattttcaaagataaattacctaatctgataagtattagcagtaggaactaactaggcttactttgaacacattttaacattttgtatatcacttgtttttaacattcatgttctgttacaaaaatatttatttgactctgccatgtgtcagcttaggctaaat

SEQ ID NO: 88941 - DNA, 1002 bp, Homo sapiens
tctaggattcagtattgtatcaagttttagaactgttgaatacttaacttgcctgagaatattaatatgcttttaatcgacgtttgaacaatttgcctattgatgtttggttgcctactgattttatctgttggctgttaatgtcatttagtagactggggtctaccaaatactgatgatgctaaaactaaaagacatagtgctttttttttttctagtttttatatttctcttggtggtaagcctgacatctttgataatcaggctcttttatcattccataacaactttgatttacttacgtgtctactgttaaacacctagctatggaaagagaaagctacaaaaaaaaatatgaataattagtttttctaatccttacttagctttttctctcatcctgaacaagtgttgtgttgtcttatattagaattttaaatatctgctatttaaaattcatttttgaaagttaacattcaaaatgctgcctttattttccaaaacaccagacacgtactctttaatgatagaggatcagattaatcaactcttagtcatatttttagttacttatcagaagttacaaattacataaatggatgtgtaatagtttatgttacatattgggcaaaagatagtaggttattagaggtaacagtttatacttcagtaaaattgaagaagaggtagtttattgtgactgatttctctcttttaggagaatttttggaaaaggtacgacagaagaaaaaacgtgatatcactgttttggacctgggatgtggtaaaggtggagatttgctgaaatggaaaaaaggaagaattaacaagctagtttgtactggtaagataaataatgatatgggaaagaataatttgtagtcagataaatggaaaataagaaggattgtctcaaattgcaagatatctgggactatgcatgagatgggttttttttaaattaattacggcctgacgcggtggctcatgcctgtaatccaa

SEQ ID NO: 88942 - DNA, 1996 bp, Homo sapiens
aataatagatctaggcaataattttttttttttgctacggaagccattaagggaaaagtcgatagtaacgcaatgaatcaatcaatcaatcaccttagcccggtggttagtcttaacactgaagtgggacaagcagacgtcagcgtctttctgatgtggtgagttaaaagagatacatacccccactactgaagtactgcccaaattagcagttctcagattttttggttttatgagccctgtatacttaaaaattattgaggaccccagaaagcttttttgtatgtaattatggtaagtagctactgatatttactatattggaaattaaagctgagaattttgaaaatattttttagttcattaaaagtaacaaggctggcttttacatttttgtaaatccctttagagtttgaaattgcaggagacaactggattctcacacctgtttctgcatccaatatgttgtgattttattttggttgataagtagttgtaaaataaagaagtattttaatagccttttttgataattgtagatattcctctgttactacatcaaaactcagtaagtggtagtttcttaaagagtagttacaatatggaatctgaaaccttagtgatgaactttttataccgtgtaacattaaaatccattaatctgtcttgcacttcctgcatgattttatagtacttggaaaatactgttcactaaagttatgcagatctaattgttgagaatcaaaaaatcacgtgtttaatatcactgccaatcagaaaagtattgggaagaagtccagcccacagtgatcaatacgagtttttcagggttgtaattcttatttgaaagtcaattttatttttggcaacaaatacactgtcccttgtctccctttaaattagcgatccctaacctttttggcaccaggggccggtttcatggaagactgtttttccacagaagcggggggatggaattctacctcagatcatcaggtgttagattctcataaggagtatgcaacctagcttgcctgccactcacctcctgctgtgcagcctggttcctaacaggccgtggacctgtactggtttgtcgcccaagggttggggaactttaagtgacaggttcactttgttcattttcaagaaaatatgtgccaggtactgaagtctgcataaccgtagtttgtcagtcattcaagtcaaaataattttctcagaaaaaaagtggccagtacagctcaaaactcagaacagtcatatcagtactgttcttgaagatgaccatcatactttgttaggtagcagaaatgttttgttacttcccatttcatcacacaacattttaaaaagtgtgtattcaaaagcccaggtttaataaaattaattttcactattttataaagggtattcttaaatgaaactgtttttctccccctgcatattgtatagtggtgaagaatacatgaagtactgccagtaccatttagtgctgctactttgtatttgtgataagatcccattgcctttgcattatcagtgtgaatctttaaacagggaaaagggcaggctgggcacagtggttcatgcctataatccccagcactttgggaagcaaaggagggtggatcacttgaggccagaagttagagaccagcctggccaatgtggtgaaaccccatcctctaccaaaaatacaaaaaattagctgggcatggtggcacacaacctataatcctagctactcgggaggctgaggtatgagaatcacttgaaccctggaggcagaggttgcagtgagtgaagattgcaccactgcactccagcctgggcaatacagcaagactctgtctcaaaaaagaaaaaaagaaaagggctaataacattttattataaaaatatacccttggtatttccaaaactgggcttattgatagtgttaggttttataattcagattggaataaaactttctcctttttactttgaataa

SEQ ID NO: 88943 - DNA, 2015 bp, Homo sapiens
aaggcaggaggattgcttgaggccaggagtttgagaccagcctggacaacatagtgagaccttgtctttacaaaaaatttacaaattagccagcatggtggcacgcccctgtagtccttgctcaggaggctgaggcaggaggatcacttgagcccaggagttggtggctgtagtgagctatgatcacaccaccacactccagcctgaatgacagattaagaccttgtcactttaaaaaaaaaaaaaaaaggtagcccagatataattaaaaggctaatcaagtgtgcatcatgtagtttttcacatgcataatctgatcaaaataagtctacactaatcacaattttaatctttttattttggttgggggataaccttgatagaagacgccttgaagcttcagaaacagaatcatttggaaatgaaatatatactgtgaaatttcagaagaaaggagattatcctttatttggctgcaaatatgacttcaacttggaaggtgttgtggatgttcctgaattcttggtctattttccattgctaaatgagtaagaagtcattaatctgttcactcttttctttttgtcttaagggaaagaaaagcggggaaaagcaatatttattttactctttattttaaatgagggctaaagaaaaagtataatcttgtttttttgtttttgtgtttttaaaaaaaaaaaacaaaacaagactagcttcacatctaggggattattgccataggtctcataatagcctaacttagttttctctcattcctggaattttttaatcctgtgggtgaaaaagggaaccagttgccttcagcttgtggcacaaaatgcctgacactgcaaatagcaaaagttttttttttttttttagtgactactggtaactttgatgataaacaatgagtcttcataaatcaaagatccggccgggcgcggtggctcacgcctgtaatcccagcactttgggaggccgagacgggcggatcatgaggtcaggagatcgagaccatcctggctgacacggtgaaaccccgtctctactaaaaatacaaaaattagctgggcatggtggcgcgcgcctgtagtcccagctactcgggaggctgaggcaggagaatggcatgaacccgggaggcggagcttgcagtgagtcgagatcgcgccactgcgctccagcctgggcgacagagcgaaactccgtctcaaaaaaaaaataaataaataaataaataaataaataaataaataaataaatcaaagatcctccttttgacagagatgagtattaaaagttgtttgcatttcactataactttgaaattgcctatgtctcacaggcaatgttgatgataaaatcctgattcaggaatgtattctcccatgtgcctgaattcctaggagtcctggcaaactgtagacacaggaaaagctgggggtaactgggccttaccaggtaaggcttcaaggccttgtgatacaccttggtttccagagtttccccggtggggagagtataaaagtcagcttaaatgtaggccatgtcatgattgattgaacttgattttctactttttagaaacaaaaatcttttgttttgaatattaactgagaaaaagaagaggtatattgtctgcttacttctgcttggtgcttattttaattgtaactcagtcagtctgtaaaattagggttacagtattttcaggagttctataatagcttattcaataatataagaaagccaagtagcattgtgactgaacatgaggaaaatactgtgcataattttataaatataaaccatttacaaaatttaaaaatatcaattacattttccttttaatttttaaaactaataaactggggaaatgttactgctcttcaactttatttaaaaaagaacttaattgtggaatgttattgagtatgtttaatatgttagcttgagattttagttaacagtttggtgattttagtataatcaaaaagataataaaacaa

SEQ ID NO: 88944 - DNA, 2258 bp, Homo sapiens
aacggagagacctaatataattaagatttaaggaaggtgcctgtaaagaatcgatgtttgagtcaggatctaaaggatggaaaagtaggtgggcagctgaggactggagggaagaatgctcctgacaagaggacagcgtgtgtgagggcccagcagtgggaaagctaggctagtccaagatgttgaaagaaggcccatcctgatttatatcgggggctgtcccaaaatgaggcagcattcctttacagatgaatgtcttcgagaccatgttctgtatcctaagtgcactggagcccagtggagggtgttaagggggtagtgacatgactcaggtccgcatttctgaaagcttaatctggctgcgattggaaaattcattgagggagagtaagaatggaagcaggggacaagcaaagtgagtttatggactggtgccactgagtggtgatggtgactgaagcagcaggatggtgccaaatgcaggaggtaagaagtggacctatttgaaattgatgttttctaggtaaaatagaaaggacttagtgatgtgtattgagcacagtgggtaaaagagaaggggagatggcatggatcactaggtggatttactgaaatggcaaagattggcagtaaaagagcagtgatgttcagccttagatgtgggacgttagagagtgccagtgacacatgcaggtgaagatttctaataagcagtagaatccatgagtgatgagagacagctgaactaccgatagctggggggtggaagtgagtagggctctggactgtactctacagaaccttgaagtttagaagttgggtaaaaaaaaacctgtaagtgaaaaggaaaaaaaaaaaacctgcaaagaagcagttcatgatgtaggggaaaaattaatagtgtatcttgccagagaagtcgagatgaaagtgaatctttaagaaggaagttggcagctgtttgcagtgcagctgtgagagatcaagtaaagtgaaatggaatcagtagaaaagagtttcctacactttttccgcatctcacagctccggagactctcatttacttcctgacctttatgttatactaatagagccctctgaaacccctgagatttagaatgcatgtttcttttaggtgtgatatgttactcttgattcattttgtattactgtattgtgaatttatcaagggagtggtagcttttttagttaagtccagaagatgtcattgctgtacaaaagtaagttgaggaattacaaacatgtggaagctttttcattaagtattcttttttggacagaatggcaaagaagtacaatatgaaactagtctacaaaaaaacatttctggaattctacgaagaaaagattaagaacaatgaaaataaaatgctcttaaaacgaatgcaggccttggaggtgagtatttagaaaagatgtacaaatttcagtcatggtgaacttgtttggctgttcttgagatccttgcaaggccatctgaacatgaaatagttatgtgtattacgctcttcagcacctaggacggagcttgatacagaaactgcatggtgagtgctcagtaaatacttgatgaaagaatgagtactggtgttaccaaattctgttttctaggatagtactgctttaaaataggatttctcagcctcaggactgttgacattttgttctggataatgccttgctgtgggatgctgtgcattgtaggatattcagtagcattcctggcttctacgcactagatgccttccagtaacactcttgtccccagttacgataaccagaaaactctctccagacattgccaaatgtcccctggtggacaaaattgccccaagttgagaaccagttctttacaacagtgccttttggttacgacagtaatttagaaccttcctggccagtgtccagacaagctcaaaccatacataattttattgcatggtaattctttagcagggttccagtcttttagactgtgttgttgctgagacctctcctgtcctaatgcagcagtgaaggtatctatataagcttcaattacacagccattgattgtttttcctttttctccttaccagacaatgtttggttggacagacctaaaatattcagtgagcatttttattattgatcagtagaatcatattcatcaaatggacattaaacttccttagagagtttattcagtttaagtactttaagcatactctgacttctttatccttataattacctcc

SEQ ID NO: 88945 - DNA, 3581 bp, Homo sapiens
ggatgaagctgaaaaccatcattctaagcaaactaacacaaggacagaaaaccaaccaccacatgttctcactcataggtgggagttgagcaatgagaacacatggacacaggaaggggaacatcacacaccggggggcctgtcatggggtgggggcctgggggaggtatagcattaggagaaatacctaatgtaaatgatgagttgatgggtgcagcaaaccaacatggcacatgtatacctatgtaataaacctgaacgatttgcacatgtaccctggaataatataccctagtataatatttaaaaaaaattggtttaagagaggattcttccttttttttaatttttttctgtatttcaaaagtatgtatagtttgtattcctgaagtagtacttacggattattctcctaattatgttatttcagtgatttagcatgtttaattctgaattgtaaatttccgttattgtaactaggactttcatttctttccccagccatatcctgcaaatgagagttctaaacttgtctctgagaaggtggatgactatgaacatgcagcaaagtacatgaagaacagtcaagtaaggttacctttggtaagttttaatttatgaaagtattttatagagaatgaaaaaaagaacatgcttatatggagacataggaaatgatttcacttgtttacaatacttaggctcactgacttacaaatcagttgtttccactaagtgatgttgacttgttataaccacagaatatggaataaaatttatttcaatggactgagaatggagtgctatatctaaggcaatgaggacagtgaaaaaattacagggttggtgtgcaagttccctgctaatgtaggcaccaatgaaccacagcatttcatacatagaatgcagcagtccaggaatttaaatgggaaaaaattacatcttcacctatactaatttctgcgtaaaagtttacattttaagaatgattactacaatagtaccacagtggtattagctgctgctgtgactttgtcatcagtagaagttacagatattttcatagcacatttttgctaatatcttagaatattgttttcatttatcacatctggaaaaatgacatcactagaactgccactagatcttgttattatagttaatggtgtgtgcaaagcaacacatatctttaatattttgatagctacataaatataatttatttcctttgtgtgatatgtactttattttgttattcctttgaaaaaacacaaaaattgtattttttccaccagtgctgtttgatatttcaagataggccttttttattttttcattttccaaattaagaatacaagatagggccgggtacagtggctcacgcctgtaatcccagcactttgggaggccgaggcaggtggatcatgaggtcaggaaatcgagaccatactggctaacagtgaaaccctgcctctactaaaaatacaaaaattagctggacgtggtgacgggcccctatagtcccagctacttgtgaggctgaggcaggagaatggggtgaacccgggaggcggagcttgcagtgagccgagatcgcagcactgcactccagcctgggcgacagagccagactctgtctcaaaaaaaagaaagaatacaagataggccgggcgcaatggctcaacgcctgtaatcccagcactttgggaggctgaggcgggcggatcacaacgtcaggagattgagaccatcctggctgacacggtgaaacctcgtctttactaaaaacgcaaaaagttagctaggcgtggtggcgggcacctgtagtcccagctactcggcaggctgaggcaggagaatggcatgaacccaggaggcagagcttgcagtgagccaagatcacgccactgccctccagtctgggcgacagagcaaggctctgtctcaaaaaaagaaaaaaaaaataatacaagatagatgcattttccagttacacacacacacacacacacacacacacacacacaatgccctcttcacacacattcaccctttggatgagaatttgagaatttggcaggaggataaaagtctgagaagatgactttcaaagtgaatctcaccgatttcttttatatgctcaggtcacaatatgattaacagtgaatcgaatgtgtatttacagtgaagttagggtcttttggccatctctgcccattatttagaaataagcatatgtttacttccatattgaatctaaaattttctttttctcttttgtaattttagggaaccttaagtaaatcagaatgggaagctacaagtgagtatatcatcagcatagattaactgataatttcaaaagtcctgtttcaaagtgatcattaaaacctgaaaaaaggctgggcactgtggctcacaccagtactctcagtattttgggatgccgagacagacagattcctcgagcccaggagttgagaccggtctgggcaacatggcaaatgcttgtctctaccaaaaatacaaaaaaattagccagtcatggtggcatgtgcctgtagtccagctactcaggaggctgaggtgggaggattccttgagcctgagaagtcaaggctgcagtgagctgtgattacatcactgcactccagtctgggcaacacagcgagactctcaaaaaaaaatctgaaaactttgagtttttctgacattttaggttgtgtttgtgtttacacacacacacaaatacgtatatctctacatatgtctaatcctcctttcttgcacagctgtgtagtgccaagagaagatacactgtacacagggtcttcctcagcataaacttgagtgagcatgtgtaaacattctcattgcctatttgttactaagtagccatctccatttgaagtgtttacctcagatttctactggaatttttggcttatagaatacttgcatgtcttttttttatttggccactctgatgtgacagtgaaggcataataatactagaacattcaatgaaacatccatgagcaggatgtgttagaggtgtgcatgataggggacaaatgtggtgcaaagatattctgaagtgaggttcctgtgttcagaagagaagccagaagcacagcaaatctgtgaaggcctgtggttcttcagcagtgggtgttgaggaagtcaggttgcagagcctcattgttactgtaggaatccccttacatggttgttggtgatgttgaggcacaagtggtcattaaggacaatccatttgataaacattattgatttacgtgaagttctgtgaaaggtaaagtaaaataaagatgttaaatctctaccttctagaagtctacactgtaatggaaggaacaggcacaaataaacactactaggcaaatttttaagtgctaatgatactgtagtggggcacaaaggtgaaagagagcttaatgaaaactaaactaatgacatctgggatgtagtaatattgatattactgagtgttgaacatgtgcaggtgcgtgtaacgtttttaatccttgtaataactcacatgttgtaactcatttaatcct

SEQ ID NO: 88946 - DNA, 1026 bp, Homo sapiens
cagtagtcccagaggggccgtgttctgtcctgcacaaatttgaacaactcatctcgatatatttgatatttctctgtctgttgattttaattctaaatgtgcaggatgctgccagaaactccaatgtagaaattcaacatttgctgtctgtgacagatgaacttttgcatgtgtatataagaatgagttgggacctctgtctttaaaaatctatttttaggtaatgttctaagaattccatttgcctctatgatcttagctcataaaaatataatatgacttgataaagcaactaaactctttccacagtgttcagatttgtcctgtgtgtgtttacagtattcaatttattgcagttatagaattggtcagagagcattttcatagtgtgctcatttctatggttttgttatatagcatttttcaacatttaatggtctgtacagttgaatgtaagtgttcaatatgtattgctgaagttataagtttaaaactcaatttcagatgctcataaaagttacttagctaaaattttagcaatttattgcattttgaaataatcattaacatgctgcaattcaggagctggttagaacattttaagtggcagcatagaattttggaattttggggctttcttttcagaaattgctaccatagtaattaatgtttccagttatcaagattgtgattagacacatttacctttcttcattgaacaaatggtgccatagttatttttctcaaaatttagtgaaaatccctcccatgtagacatgttgcacattttttccaaatttatacatggaactgcagtaggaatattctcaccatctgatgccatgtacccacttcagaaataagcaatacttgttcctctgttacaacctcagcactttgcaccgtaggagccattgttaaagttgtcacttgtgtaactgactgcttttccaaaactggtacttatgtgaactgttgtccttgctttacaccaccatttggaaaacttaccagtttttagatgta

SEQ ID NO: 88947 - DNA, 1035 bp, Homo sapiens
taagccatgatttacaaaaacattactttctgtaattcacaatacttgttttaaaaacatagtgtcttcattagtgtgcatctattaactgttcatggtgttagagttgcaaactttttagcaagaaaatatggatttcctcatttcagttccttctgcagcctgtgaatctccacaaagtgttaccagtttacaaaaataagtctttttgccttaagtcattttggaaataagtaatactgcatctgactctggtggctgtattagctaggaaaggtttgtaaatggtgtcagtgaggtggggaaaggaagtcttcctgtcacatatgcaggttcgttttcattctagggcagtgccaggaagtatattgatagctttgtaggtacaggaaaaacatcatcattatttcctctgttcacatttactggtcttaattaacaggtaataataatacatgtacttttagcctgaaacctcttccacgccatgggtaacttgggggagagaagaatcctccaaacgatggagtagccagtggtaatacaaagcagggagaacagaaaggtagagttactaaggccttcagtgaacagaaaggagcagagagcaagattagatctgagaagatgctctggggactgagcccactgttgttggtgtcagggaggcttactggagccacacctgcaggcgctgtgttcaggcaccaccttcctccttgagctttgcctgtctcttgccttatcagttcttcctccaccaccctacacccccctccccccggccccaagcccctgtgtctccttgttacaattaagtttctggatattgacttaagaactgttaggaagaggactagaaaaggcttcccctgcctatcctctccgatcaccaaggtggaagggagctagtaggactcttccttgacacaccttgtcgtctaaatgttcggtattctattcaggacttacggtaactattatgagggaggcatggctttccaccgtcgggccaggaagagcacctgttgctgc

SEQ ID NO: 88948 - DNA, 1064 bp, Homo sapiens
tgggggcaacataccttggacaaagctgagctgacagctaatgtttattagcctcctacctaagtcagtcactttgctaaattcttcacctgtggtaactcattttgattgttataacatctcagcaccgttattcccattttaatgatgaggaaactgagtcatagaggatacagacttgcccaaaggagagccaggattttcacaccccctcctcaagctgggcctgccctccaagtgcttgttatatacctccacgggtgtcagcccagatgactcctcacccatccaccacctgcagcttgagatgttaactattagagctccattcttttggttcaaaacgttgatacttacttagatgttccctgagaggagtgtttatttctgagtaaggggctttgttgaaagagggggttagagagagcaagacagcacttgagtgcactggcaggaagcagagataagacttgaatttcagtttggtagaccaccttctttagcagcccaacctgtagcaaatctagtttagcctgcatggcagggagagggattctcttcccaccctcaccatttgcaagtggcaggagctgagaatgccagtacgagagtgtagccaaagtgagaggctgagagcaaaggagacatttttttcagttttgagtcgagtatccagacagaggcaaatcattttgtttaactttttattaaagtgtaactatagaaacacatcaatgatttttcacaagtggagcacgtgcatacaatcggcaccccagaagccccccgtcagattcccttccagttaactacctctccaagggaaaccactatcctgagttctaagcgcatagattagttctgtctggtttggggagatatataaatggaattatgcattcttcgtatctggtttcttttcaccaatattatgtttgtgagatttttgttgcatgtatttgtacatggattttcattctcatggttgtataatatttcattgtgtgaataaaccacatactgtttatctgacagctgtttggttcatttaccatttggaaact

SEQ ID NO: 88949 - DNA, 1113 bp, Homo sapiens
tgctggctgcactctgagctatgcatgcttttcagggaagaaaagagtggccagattctttccatcagaagcaatctgttcatttgttctgaaatgtcttctttgctccccttgcctgaacttttgattcatggcttttgttcataattgtctgaataattgtacttctgtcaatcatggtgttgcgcttacccagacataaaaccttatgctagaaaccctgcctcatgtgctgtggaagactctgtgactctttcttactgtcttatttgggctcaatctggggtttccaaaaggatgactgggggcattacaggggctcaaggagttcaaggtgcccagtgctgcaagtagcacacgtccacagccaggcttgctttgagtggctcacaccggatctgtgttggagtctgaactctggcctgtgtacttggaggcatgtcaatctcatttcagcagccaacaaaggtcagggcccaacctatagcccagggagccccatcttctcccaacctagactggagcagagaaacccgagttcaggtgctaattctgcctttcactgctgtgtggcgtgaatcatcttatttcaggttccacatctgtgctgactgtacacgatggccatgagaactgcaaaattgtgtgagcttcttgtaaatttgtaaagcactatagggtttgctttttattttaaagaaatgctcggattagaggtgtgagccagaggttgcagtgagccaagattgcaccattgcactccagcctgggcaaccattcaagactctgtctcaaaaaaaaaaagaaagaaaaagaaaaagaaaaagaaatgactagatggggtaaatactaaggaaggacacgggggccaatggtcagagcagtggcctggacaccaggaggcttgtgtggtccttctctgaagcaaagggctggagtccttgcagctctcacagtccactcttgtaataacttttggtatgattcctattttctgctttgtattggacattcacatctagactgcacccaatgaaaaaaatgtatataaagcagaggaccattgggtcacacaacagtgagctgctagtgcagaagagggacccttcctgt

SEQ ID NO: 88950 - DNA, 2278 bp, Homo sapiens
atttttcctattccttgttttccaaattttgtgtaattgttaattattttatgtaaagataatgtatatttacctttcctcctaatgtttgtttcttgtatttttaaactgagtgcatttcttaaattagttttttccccctccctcaacagttaaccatgtgactgagtgccctgtggaatcgtgtgggatgctacctgataaaccaggcttctttaaccatgcagagcagacaggctgtttctttgacacaaatatcacaggcttcagggttaagattgctgtttttctgtccttgctttggcacaacacactgagggttttttttattgcgggtttgcctacaggtagattagattaattattactatgtaatgcaagtacagttgggggaaagcttaggtagatatattttttttaaaaggtgctgcctttttggatttataagaaaatgcctgtcagtcgtgatagaacagagttttcctcatatgagtaagaggaagggactttcactttcaagtggaacagccatcactatcaagatcagctcatggaaggagtaaagaaaatatctcaaaatgagacaaactgaagttttgttttttttttaatgacttaagtttttgtgctcttgcaagactatacaaaactattttaagaaagcagtgatatcacttgaacttcagtgccctcactgtagaatttaaaagccttactgttgattgcccatgttggacttgatggagaaattaaatatctttcattatgctttacaaaatactgtatatgtttcagcaagtttggggaatgggagaggacaaaaaaaagttacatttaatctatgcatttttgccaagccatattgagttattttactactagagacattaggaaactaactgtacaaaagaaccaagtttaaaagcattttgtggggtacatcatttctataattgtataatgtatttctttgtggttttaaatgataaagacattaagttaacaaacatataagaaatgtatgcactgtttgaaatgtaaattattcttagaacactttcaatgggggttgcattgtccttttagtgccttaatttgagataattattttactgccatgagtaagtatagaaatttcaaaaaatgtattttcaaaaaattatgtgtgtcagtgagtttttcattgataattggtttaatttaaaatatttagaggtttgttggactttcataaattgagtacaatctttgcatcaaactacctgctacaataatgactttataaaactgcaaaaaatgtagaaggttgcaccaacataaaaaggaaatatggcaatacatccatgatgttttccagttaacataggaattaccagataaatactgttaaactcttgtccagtaacaagagttgattcatatggacagtatgatttattgtttatttttttaaccaaatacctcctcagtaatttataatggctttgcagtaatgtgtatcagataagaagcactggaaaaccgatcgtctctaggatgatatgcatgtttcaagtggtattgaaagccgcactgatggatatgtaataataaacatatctgttattaatatactaatgactctgtgctcatttaatgagaaataaaagtaatttatggatgggtatctttaatttttactgcaatgtgttttctcatggctgaaatgaatggaaaacatacttcaaattagtctctgattgtatataaatgtttgtgaaattccatggttagattaaagtgtatttttaaaagataaaacgtggtcttgggctctaaaacaagagtgggaatagttcacatgaaaagctggctaaagtgtgttggaaaacaattctccatgggtctcttgcatttctacacatcagggaagcagaggctctgacaacctttcttttgactatcttttccaaggatatttatgtagtaaacagccttggaagatagagttctcccttgtgaggatgtcgggttcttttactgtccagtataataaagataacgtctcccacctatgatgcaaacccactgtgtgctcagcacccacctgggccactctgcattgcccacatggggcttggagggcaaagggaactgatggaacgtgaaacttatgctgcttttgctgtgctgtgaatgaagtcatctgactctgacccaggggtctcatctcttttgtcaggatccatgaaactgtgactggcagcatgcaaacaggataaaatctcagcacagttcc

SEQ ID NO: 88951 - DNA, 1130 bp, Homo sapiens
tgtctggcattcactgcctggatcagcatgcatgctgtatcacagaatatcttctagttttacagaggtagcttgagggaaagaatacagaccatagctattttcagataagaagcttatgttctttaaatacatttatttgttttacattttgttatatttctgattttactttattagtttgactaatttttttttttaatttcagccttatttaacttaaggagaatgagatattgttcatgcttaattaagcatattaaaacttttaaaaccttaagaacttgaaaaactatgcatttgataggttggattttaaaaaactatatggctttaattatgctttttttttcctccttaacatagtaagttatgatgtaacatcagcaagagatatgctgctgttagcatgttctcaggatgaacaaaaaaaatgggtaactcatttagtaaagaaaatccctaagaatccaccatctggttttgttcgtgcttcccctcgaacgctttctacaagatccactgcaaatcagtctttccggaaagtggtcaaaaatacatctggaaaaactaggtaaggatttgaaatgctaacgtttttaacaatgtgaaaatgattggataacagctattaaaatcagaaatctaattgtgcttttcaccacagagggcatcatttttaggtatttgtatgtgaattgcagtgactttataaattagtttaacttattcttgttagagtttaataataataatacatgcaatattatatttatttagttctgtgtctaattttattgtcataagttgctgtacatggcatagttttagcccttaatgctttaaccaacttaatttttttaatgcagaaattcatataaaacttttcatcatcttttctgttttttaactgtgttggcatagtttttctacaaaaaccaaaattgtttttcccttttttgttaacttcccatactatcccaacatacaaaattatttggtattatcagtgactatgtttttttaattattatactttaagttctgggatatatgtgcagaacatgcaggtttgttacatgggtatacacgtgccatggtggtttgctgcacccatcaacccatcatct

SEQ ID NO: 88952 - DNA, 1981 bp, Homo sapiens
tgcctcctgggctcaagcgatcctcctgccccaacctcctgagtagctgggactacaggtgcacatcaccacacccggctaatttttttaattttttgtagagacgggatttcaccatattgcccaggctggttttgaactcctgagctcaagctatctgcctgccttggccttccaaagtgctgagattacaggcatgagccacccgcctggccgaccttgctctatttagtgtcagttcgaaatcctgaccaattttatttttattccacccatttccctttaactatttataatgccttatatgcaccttagtgttcttagtattgggttaaatatgtcagaaatggacacattattggtgaatgctagttagaagatttgagttgaaaggtgagctggtgggactgctaatgaggaaagtgattaattttacccaccatcgtggctgattcagaaaggctaagctcatagtgccatcagctggcttcattggcagacttaggctgggaatccatttaggtttcagaatcctgacctaataaattgacttattgagcaaagagatttttaaatgtttctactagctccattttcagtatatttcttagaatattagtgtactttcaggaattttgtttttaaggttatcaaagtccaaaccaagtggggcggggagtactggtagccattctcccttgctagaagaggccagttaatacctcttttcctattactgtgttcttaattttgagactttataaaatctcaacagtgctgaaccttgactttcatattggaagtagaaattaatggatagtctttgtcaatattatttacctctctgtgggtcagatattttgctagtaaattgaaaatctgtattaaatccaccatttactagatgctcaaaaatggtccctggcaaataaagttaaggttttgcattcatatctaggaagaattgttaaagaatgttgatattcattcttaatattagatagttacatatcattcaagtgtctaaaaaatttcttgaaggtaatggctaatgattaatttttacttcagtttagaaaataagtaaatgaatatacgtactaaaaaggagagggctttgaatagattaagtttactccaagttaaaatgatggctttttgaaatatgggtcacatttttcagtttttttttaagtagttggatggataaactgacactgcaacttttattatttctcttatatttcatcattcagtataaagattataatttaattatcttgcacatctagaacgcagcctctatgaatccttagtggccattttgttattaactagcttaaatattaaatctcccttctaaaattcccaattctaaaaactttatttaaaaaatgttactccttctctgacttataactctttgaagttcttgaagtcaccttcattctcttaattcttttatgtctttatcttctctttggttctgtagcaggttgtgacctagcacacaatacaaacataaagattacccttacggttatgggtgcctgttgcctagatgacaaaaaactttaatgtgataactgtttcttttcctcattctttctctttccttcttttggaactgttaacctagacatctgaagagaatgtagaaatagatgatggattaggaaaacttggtattgatactccagtaatattcattatctcttatggattatttgtatcatacccttttccatccagcttgaccttaggttatgtaacttaaacctgaaaatggtggatctcttggtgtgtttcccaatatttgaatatatgaatgtttctgaccttgcccaaatctagtgatttgaagttggtgtatctgacttgttgagtattaattaattttcttttttatatcacttttgaatttaattaaagtgttttgaaatggttctttagccctgtttcttaagcagtatgtttgtgg

SEQ ID NO: 88953 - DNA, 3185 bp, Homo sapiens
cttccacatgattgttatgaggattaaataagacagtagacatagaatgattaatataacatataacaagtaatgattatatattactaaaagtaatctataaataaatgtttttattatcgttttcatcatcaatattcagataaagatattgaagtccagaaaaagtatgacttgctcggggtcacatactaggttaatcgcagagctagaactaaatacaaatttcttagtttgcaatctagttatcttgccattacatatgccccccttttgttcatacatatatctatatgcatacaatgaaataatttttggatgctgttaactacttttaaatatttttgatgtaattacatattttaagctggaaaccagacatttgctgtagttcagcagtgtctgacctgtctttatctagcagtatatttaaaggttactgcctgaaatacgagaatagcaaagaggctggagcttaaacttttgtgtgctttgtttagcttgaagaagcaaacagcatgctaaccaaagatattgaaatattaagaagagagaatgaagagctaacagagaaaatgaagaaggcagaggaaggtatgtagaatttttaaaaaatcatcatgttaaatcaaattcagtgatttatctttacctatgttgtgttaggtttctaagatacctgttttcatatattaagtaacttctgtagccttaagaattatcttaatgaagttactgaaagttactatgtaatgtatacttatttgaataattaaagacattgttagtttgaaatgcagaaattaaattaataccatacaataacatttaatataatttgttgacagaatataaactggagaaggaggaggagatcagtaatcttaaggctgcctttgaaaagaatatcaacactgaacgaacccttaaaacacaggtatacatgctttcgatcttttccacatgttcatttttgagttaatcattgctctttatgcactttttcctaaaaccaaggcttataaggttcaagcttttcatcagaacaaataaattctctccccgctaactataaaaaacttatttgtgaaatagaatttcaaggccaggcgcggtggctcatgcctgtaatcccaacactttaggaggctgaggccagcagaacacttaaggccaggagttcgagagcagcctggctgacatcgaaaccccagtctctactaaaaatacaaaaattagccgggcgtggtggtgcgctccagtaataccagctagtcaggtggctgaggcacgagaattgcttgaacccaggaggcagaggttgcagtgagcaaagatcatgccactgcatgccagcctgggcgacagagcaagacccagtctcaaaaaaaaaaaaagaaataggatttcagttaagaaagctaacttgcctagtaatattgtatagttgtagaagataagagtatgtggccaaggcatagaagctttatttgctagtacccaacatcagagtaggattagcatactcttgattcagtactgggttgtaaagttaaccaaagaaaggctcctggttcttacatttaagtagtgtgataagtcagtgttagttacttgtgctaccagttatcatgtctcaaccatcatgaagttgtcctaattttcatacacacagaaagtcctgcttcctgattttgaagaaaaaaatacattttagtattaaattggatgactacactattgatctttattaataatattttaataggctgttaacaaattggcagaaataatgaatcgaaaagattttaaaattgatagaaagaaagctaatacacaagatttgagaaagaaagaaaaggaaaatcgaaagctgcaactggaactcaaccaagaaagagagaaattcaaccagatggtagtgaaacatcagaaggaactgaatgacatgcaagcggtaaggtttctgtgtgtgtatggatatgagtgtgaaggattattttcttaaattatttctgtatatacttgttatctatttatcttgtttagattgggaacaatcaagggttctgcctgtttggtttcagactgaaattgggatatggctgttataatattaactataattggggtagaggttttgaagtattgtagcttatttattttctctagtcaagactcacttttttgaaatcaaaataacaagcttaattttttgataccccttggcttgttaatagaacaaaattgagaacctggtctcgggcacttagatctaagctttttagctccatcagttatggttttctgaagttttctatacctttaaagctacttcatttggagccagaaaagcattttcttttgttgtaacttttttgttttgatggcttatgtttgaaaacaaaaacaaaaactctttttaaggcaaggagaaaaggaatttgtccgagcattgtattactgagaaagaacttgacatttctgtagtgtatcaaaatctgtggtagcaaacattcatgaagtttactgtacatttttagtattagcaatttaaattatcatatttcaattagtaatgttggaaattgttttagcttgattatattatcttgatacttttcaaaattagcaattggtagaagaatgtgcacataggaatgagcttcagatgcagttggccagcaaagagagtgatattgagcaattgcgtgctaaacttttggacctctcggattctacaagtgttgctagttttcctagtgctgatgaaactgatggtaacctcccaggtaagaataattctgtatcattcaaacatgtataaatgtcatggaaattagtgtatatttctttcatttggttttctacctccttgtcattttgtccatggattcctaagaaggaattcttatttctgatagccaaggcctgatgatgattatacacttggtgtattttgtggagtagagcagttgtaagcaatcttaggctatttaaatagacctaagaagctttacctgaataaaaaccataagaggtttatgaacctattttgagcagcctaagtccacagtgagagtcaaagctgctactacacatctcactattttttaaaagttgtacatttttgtgagtaatagctctttaacattttatgtattcttgtgctaaaactaagaact

SEQ ID NO: 88954 - DNA, 1132 bp, Homo sapiens
agtttaaccatctcattttacagatttgatgaaactgaactgcaggaagtgtaagggacttgcccagtgtctctactcaattagttaatgataaaacagagataaagttctgggtctagcctgctgattaacaagtcaatgacttttccactatgccacgctgccttccattccaaatctgcaagaaatttcttttcaaaagcagactatttgctattgctttatgaccttttttagttaagcacaatatgggatagaaaactaaatagttcttttataatttttcaacatgtgagaggttaaattcattacttttatagaaagtttgcaatggatttaaatttattttaagcaataaaataattctttttatcatttaaagttaattgtgtttttaagaatatgattaagttggaaggatgaactgaatttgtttacatcagtttctcttaaaaaattgttgcagagaaactcttgctactcagttggatctagcagaaacaaaagctgagtctgagcagttggcgcgaggccttctggaagaacagtattttgaattgacgcaagaaagcaagaaagctgcttcaagaaatagacaagagattacagataaagatcacactgttagtcgggtaagtgtgatagtcaggtaagttatataaaatttatttaaatcacaataggtcacatcttaaaatattagggtaagtgtgtgtgcaagtgtatttacttctatgttaatacatagtggtcattctgtactcatgtataaaatagtttgtataataccaaacatttgttaattattgaaattcttgttcaagatattgggcttttgtttgtataggcacagaaccaatgcaatattgggctgtttttctggctgtagatcttattagttatatttcatatgaagtaatggcttagcttaaattcatttgttgttctcttaatacattgcaactgattttatgggccagaattctgtgaaatatagagaaaccatttgggaatgaggaattcttgggataatatataaatccattataagaaaaccaatactccaaacaattacctattcctgaggtttatactgtaatctatatagaatcatgcgactaaaaagaggagt

SEQ ID NO: 88955 - DNA, 1008 bp, Homo sapiens
taatatctagtatgcagtactgaattattacttattaaatatagtactatgatatgtagcactgaattattattaaatttttcatgcccccctctttttttatttactgtacaagacattttcttccctatgactgcttttctctgtaaaaatttaccaaaaatatggtatcaattttattttttcattttggatagatccacaattaatattctccaaaaagtgatcatcagtagaaaagggttctcactacttttgcatagcgtcattttataaggagcaagatagaaccggtgtggcctgaccaagttaattagtaaaataatgaataatgaagtatgtttttaaaaaataaagattgttttagtaaacttttttatattagcaactttaacaaactaagaaaaaatgaagtctagtataagtaggagcgtttgttcacttgtttttcttttcatctgaagacagtatagaggaaatgaaggacagatgcgggagctacaagatcagcttgaagctgagcaatatttctcggtaagtgagaatcatttttaacatacacactgtttcaaaacctgacttaaaacaaggtatttagattcttttatgtgaactgtaattctttttcaaatgactcttcatcttctaataaacattgtgacttttctgctttttgtttgtccatttgtttcttggcatattaggctatcattggtatatgtttttaaattgtaaaaacttttcaggccaggtgcggtggctcacacctgtcatcccagcactttgggaggccgaggcgagtggatcacttgaggtcaggagttcaagaccagcctggccaacatggtgaaaccccgtctctactacaaatacaaaaattagccgattgtggtggcaggcacctgtagtcgcagctactcaggaggctgaggcaggagaattgcttgagtccagtagttggacattataataagccaaggtcatctgtgctgcagcctgggtgacagc

SEQ ID NO: 88956 - DNA, 1179 bp, Homo sapiens
cacctgcctcagcctcccaaagtgctgggattacagacataaaccactgtgcctggcccagaagtgagttttataatcaccttgtactacagaattttcatgctgattggggtagaaaggaaccagaatttttttccctccacaagatctcatgtctgaaatttgggaattaatttgacttaatagtaaatctactgtaataaacacgtggaacaatgaagactctttaaaatactaatattttctactagtaccatgaattataatgtacttgatttggttagtagtctttcaaataatgtctaataaattatttaagagatttaagatcccaattatttttctcattcataggttaagaatctaaccctgcaactggagcaggaatcaaataagcggctgttgttacaaaatgaattgaagactcaagcatttgaggcagacaatttaaaaggtttagaaaagcagatgaaacaggaaataaatactttattggaagcaaagagattattagaatttgagttagctcagcttacgaagtaagtctttaaaataacattgtgatttctttcttttttgtgttcatcattgacttgtgtgtttgacattttacatatgtacagattatgtacttagagtttgtgaaagacagaaaaaaagtatttagaagtaaaagaatttacttgcaaaggttttcaggggagttcaggctttggaaagaccacagttttctcatctgattttcatgtccacaaaagtcatcacatttcttcaggttagaattacaaaaatcacggtgccttgtaggagatgttcaaggtttatttcagaggctagaattagacatgacactttgttcgttttgttttgtgtctttggttcatctcaaaatgcaaaaatgtcttttttctttttctgttactcttgggatgtgatatgcctccttatttgaaatggagaacaagcaagatcaggaacgctttcacaatttgtcgaagaatatgcttcacaagtttaatatcaaaagtggatatatcttatgccaagtcttgtgtttttatttcctccacgtttattttatcatatcatcacttgctagcttcatttacaaaagtgattcttggattaaattgtcagttttcataaaattggatttatattggtgaaattcttttcctc

SEQ ID NO: 88957 - DNA, 1050 bp, Homo sapiens
cagtaataattaaaagaggtatactactgtggaatcttattcatctgaattgtataaattggagttcctaccatagccttaagcctcttcaaccttttctggaacaatgcagggtataaattaataaccacagccttatttttctgcttttgcttgatgtatgttcattgttctttgttaattcacttcctttctagctatactcttcaccttcttgtctgaaagtggtaccgattaatctctcatcactgggcaagagctgggtttagaagattttattactgtattatattttataactccttttctttagagatttctgctatataaatagtttacataatgtgagaatttctataattactagctctattcaagtcccagaataaaaacaatagagacatttgaaaccagtttacagcccatataaagtgaaatgtgttaaagtactctttctttaaatgtatgtttgtaactttttgctttcccagagatggaaaaaaagctgaaagaagaaagagaagctcgagagaaggctgaaaatcgggttgttcagattgagaaacagtgttccatgctagacgttgatctgaagcaatctcagcagaaactagaacatttgactggaaataaagaaaggatggaggatgaagtaagaaaaatagtactgactttgttcatctattaaaagagaaacggttatataagttatgactggagttatctataatttaaacaccatgaaggagatttgaatgaaataattgacatgggtctgtgttcactgctgtatggtcaccccagcacctagaattttcctcttcaaatagttattgaacattcactctgtgtgatctatgccatttttcactatgacagtacaactatattgaaatgtcatagttccttccctgaaaaaactgaccatctgctttaaagaaaaaaaaagtctttattataatgcatcttatatccccaaagaaaagagcattgctcttagatttcaataaaagtgtttaactgcagtctttcctggcttagattgatagc

SEQ ID NO: 88958 - DNA, 1046 bp, Homo sapiens
tgcttaaaaattagccaggtgtggtggcatatgcctgtaatactagccactccagaggctaaggctggaggatagcttgagcccaggagttcaaggctgcagtgagctgagaaggtgccactgcactccagcctgggtgacagagtgagacctcatctctttaaaaaaaaaagaaaagaaaaaaaaagatggtatcagaaatttttaaataaactgaaaatttgtcttattcatttccgatcttagcaatgaactgtcctgaacataaccaccagcacagccttgttctgccctccgccatgattaatgattcaaatgggaagggagggggtaaagaaaagattatcttttgcttttaattatatgtgtttattgtgatttttaaaataaggcatcatatctcttccagaatattaaatgtaagatttactaacatgcatgccttctgcacagtttattacatgactcctactcccattttacaggaaaagaataatttagagatagatttaaactacaaacttaaatcattacaacaacggttagaacaagaggtaaatgaacacaaagtaaccaaagctcgtttaactgacaaacatcaatctattgaagaggcaaagtctgtggcaatgtgtggtaagtgtcagttttaatatttttacaaaattgactttaaatagtgactagaaaaaatttggttttggtcaaaattttgtactctttaactcgtagaaagtataatataaattataggcctggcacagtggctcatgcctgtaatcccatcactttgggaggctgaagccaatgggtcacttgaggccgggagtttgagaccagcctggccaatgtggtgaaaccccgtctctactaaaaataaaaaaattagccaggtgtgtgtcgcacgcctgtaatcccagctactggggaggctgaggcaggagaatcgcttgaacccaggaggcagaggttgcagtgagccgagatggtgtcactgttctccagcctgggcaacagagtgagactgtgtctcagagaaagaaatt

SEQ ID NO: 88959 - DNA, 1435 bp, Homo sapiens
caagagtacttgtctatatatgcttaaattaaatatatattagggaggagagccagttaagggagactcagaaggggcaaaaatgactaaatggagaaaggaggacttattctatactatctaccatttggtaccttttaaattttgtatttttattaagatattgaattatcaagcaattgaactcttgaaaaataaataatattaaaactagctttataagtatactatcagtgatcttataaagggaataaaggagtttgagatttacaacagtaagaagaaatctttttgcactctgtattagaagataatgttctactttttaatgaatttaaaatgcaggtacttccaaattggaatttggctttgggagtggacctaatgtagctgactattatggcctaagactaaatgtctttttttaaaaaaggatttatatgtttcccctatgaaaatgttgtaatttctatatattattctttcattttctagtttctacattaaaggatcagttggaagacttaaagaaagtcagtcagaattcacagcttgctaatgagaagctgtcccagttacaaaagcaggtaagtgtttcaaatgaggttcctttttaaaaaaattgtagataattaaattatatcgtactttggtcagaaacctatttttttgctttctttttaaatagctagaagaagccaatgacttacttaggacagaatcggacacagctgtaagattgaggaagagtcacacagagatgagcaagtcaattagtcagttagagtccctgaacagagagttgcaagagagaaatcgaattttagagaattctaagtcacaaacagacaaagattattaccagctgcaagctatattagaagctgaacgaagagacagaggtcatgattctgagatgattggagaccttcaaggtaatattttttcttattgtggtaaaatatacgtaacatgaaatttattataacattttaaccatttttatatatacagttcagtgggattaaatgcagttcacaatgtatgcaaccatcatcatataagtggaatcatacagtgtttgtccttttgcgtctggcttttttcacttagcacaatgtcttcaaggtttatccatgttgtgtgtgtcagattttccttcctttttagggctcagtaatattccatggtatgtgtataccacattttgttcatccactcatctatcaatggaaggaatattttataatttttatttttaattgttaaaaatatataacataaaatttaccatcttgaccatttttaagtctaagttaatatatttatgatcatattaccctcataaagaaaatgactttggtgaaaccagaaatggttgcattcttttttattgtttacgtttttttgagataggaacttgctctgttgcaca

SEQ ID NO: 88960 - DNA, 1127 bp, Homo sapiens
aactgtattcaattaacatacatatacagaagagcttcagggtggtttttgctgaagcattctttttttttttttttttttttttttcgagacagagttttgctcttgttgcccaggctggagtgcaatggcacgatctcggctcactgcaacctccgcttcctgggttcaagcgattctcctgcctcagcctcccgagtagctgggattacaggcatgtgccaccatgcccggctaattttgtatttttagtagagacagggtttctccatgttggtcaggctggtctcgaactcccgacctcaggtgatccgcccaccttggcctcccaaagtgctgggattacaggtgtcacccactgtgcccagcctgctgaagtgttaactttttgtatttttatcaattattctttgacttggtttctgaaacactcaagttgttgatataaacaaccgccaatgtttttgtattttctgtagtagagtccagcagttaataactttatttaggtttctctgtataatggtaaccttcagttaaataaacatttattatactatttgtcctacattatcatgcacttgattatgttctctagcttttcttcgtattcatgttttatggcccaaactaatttttaagtttcttaaaagtagaaattatactgtgttcttaactgtcacagcctattgacaaataaatatagtattttttaagtaatcacttactacctgaacaggcaaaggtacggttgctgttcataaagaaagaaccaacaaaatatatatatatttttgaaacaagagtctcactctgtcgctgaggctggagtgcggtggtgtgatcttggctcactgcaatctctgcctcctgggttcaagtgattcttgtgcctcagcctctgagtagctgggattacaggtgcgtaccaccatgcctggctaatctttgtatttttattagagatggggttttgccatgttggccaggctgttggccaggctggtctcaaacccctggcctcaagtgatccacccaccttggcctcccaaagtaatcccagcggattacaggtgtgagccactgcacctggccctggcaaaatattgattagctttattgtaata

SEQ ID NO: 88961 - DNA, 1179 bp, Homo sapiens
tgtcatatatttcctttttattcctcagctaatacattattgctttcttttgtgtttagttttttcccctagtatgctattttgattccttcttcttttccttttctgtatattttttagtcattttcttattagttaacgtggaattacacttaacattctaaattgaaaacaatctaggttgaattgataccagtttactttgagtagcttaaaaacctgcttctgtttacatttatctaaatagttacctttactgatactcctttttcttcttcatatggctttgagttaagacagtttgattatggcatgtgattatgatgtgtcttcatgtggagcttttggagtttttcatagttggcattcagcttcttggatgtgtagatttatatcttttaccagatttggaaaggtttggccattatttcttcaaatagtctttctgcccctttctctccttctggaactcccataatgtgtatgttggtctggttgatgccacagtttccttagtctctgttcactttttcatcctttttctttctgttcctcacacttgataatttcatttgtcctatcttcaagttcactggttttttttcctctgcctgttcagatctgctgttgaagccttctagtgaaattttaacttcagctattgtacttttcagtgctagaatttctatttggttctattttcgatctctttcatgatattttttctttgttaagtcatcatcttcctggtacttcatccatagtgttcatttgctttttgaacacatttaagagagtttaagattttgttgagtaaatctaatatcttggtttcctcagaggtggtttctatattattttctttttttttttttttttttttgagatggagtctcgctctgttgcccaggctggagtgcagtggcacgatcttagctcactgcaagctccgcctcctgggttcacgccattctcctgcctcagcctcccaagtagctgggactacaggtgcccgccaccacacctggcttattttttgtattttttagtagagacggggtttcaccatgttagccaggatggtctcgatctcctgaccttgtgatccacctgcctcagcctcccaaagtgctgggattacaggcgtgagccaccacgcctggtggtttctaacatttt

SEQ ID NO: 88962 - DNA, 3684 bp, Homo sapiens
tggtcggttggggtatttttatacgaaatgcttgtaggtgagtaaggaagattttatgtctctctattacagttgttcatctcaaaacttgccacttggctctttctaatatatttattatattaagcaatcttgattttatttgtgggtaataaacatgatccaaacctgcttcgtatgtgtttttaaaagcatttagaggcttagagcaactttgtgatgtgttcttttatatattaggtgtatgtttttagtttaatacatacctaataatctttttaaacgggtaactttgactcttcctttgaaactgactttttaaaaatgtatttcattttgcttttgttttctttatcaatttttcaggtgatacacctttttatgcagattctttggttggaacttacagtaaaattatgaaccataaaaattcacttacctttcctgatgataatgacatatcaaaagaagcaaaaaaccttatttgtgccttccttactgacaggtaaataattttaaaactgagcctgtattaattctgaggacttctcatcttctgctccatttttaaggtccatatctgagcttctacatgtaaattgttagaatataaatgacagtgaaacctgatgtaattttatgatattctagatgtcttttgtagatctcaactcacttatcatacctaagaaattgtgataataatacagtcttggctgatggctaaactagatgacttttttcttttattgttcaatttttaacttggttaattataaaaattactgtgtattttactgaatctaaaaaaattttttaacataacatctctgaaattagagtacatctcacagtcaatggtatgagttgggagcatcctttttcatagtggtataaaaacggtgatacaccttatactttaaaccattttagatttgatgatgtatggtatatggttgttgaaagagtcaatagtataaagccatttttaaaagtatactatcttttttcttctagacataatagttggtgttccatcttgtagatccaacaagcattttaataataatgtctgtctgcatttttgaaagaaaaatggcatattatatatacctttgtggtttacttttgaaatttgaaagtgaaccagatgtattagtaagattatatttaatgtttatgattgtatattgttaaatattagggagacctagtacttttaaatatgtttcaagttgagatttgctttaacttgtctcccttcattatgtcctttagagcttgaagtatggtttttcaaatgtttactttttttttttttttttttttttaaatagagacagggttttgctctgttgcccaggctggtttcaaactcctgggatcaagtgatcctcccacttcagcttcccaaagtgctgggattacaggcctgagccacccatgcctggctaatttttacattgattgattgattgattgagacagagtctcactctgttgcccaggctggagtgcagtggcatgatctcggctcactgcaacctccacctcccggattcaagtgattctcctgcctcagcctcccaagtagctgtgactacaggttcctgtcaccatgcctggctaatttttgtatttttgatagagagggtttcactatgttggccaggctggtcttgaactcctgacctcatgatctgcctgcgttggcctcccaaagtgctgggattacaggtgtgagccaccgcacctggccaatttttacattttaatataaagcattgtattatgctgtttattaggtgctagggatatagtagtgaggaagatacagagccacttttctcaaatacctcatagtcctttgggggaattagataagcaaatcagacatttatagtacacacagctaattaccatgagataagtaccatgtgccggagaaccatggagaggttttctaatccagtttgagagttagtgaaagcttcttggaaaaattgtcacatgtctaagccaacttatcttttagcttatgcaaaaacttagaatttagagtattttctttatttataagcactgtactagggaaaaaaggtgctaactttctttttccaattcagctaaaatcacatttttaaaaactttttgctcaccaaaaaagaggctggtatcagtaacttgtccagtgaaagctctgaattctgtggcagtatcaagaattagtagtcattggcttttgaatggtcagaaataattaatagattataaattggaagttcaaaattttaaatgtgtttctggaggtttttggtagcatctggtattgctgcctaagtaaagttttggttggggaaaaaaaagcctaactttaccattgtaagaaaaaaataacacacacacacaaaaaactgtcaagaaaatgcatggtgctttattcattttgctaatgaagtaaggtggtgattaatctggatttttgttgtcagtagaaaagtcatgggtgttttttgtagttattctttagttttcttttttttgagacggagtctcgctgtgtttcatccaggctggagtgcggtggcgcaatctcagctcactgtagcctctgcctcccgggttcaagcgattctcctgtctcagcctcccaagtagctgggactacaggcgtgttccagtacacccgctagttttatatttttagtagagatggggtttcacagtgttggctgggctggtctcgaactcctgacctcaggtgatccaccccacctgagcctcccaaagtgctgggattataggcatgagccaccatgtccagcctttctttagttttcttttaaaaaaattctttaatgttctcaatctttaacatattttctatttgggctgatactatgctgacaatataatttcaccttagaactatatttgtcgtcctacactgatttaatatcctgcccacaaataaacctggacaggttataataagatcttaaatgattgattacttttctccttctgtcattattcagggaagtgaggttagggcgaaatggtgtagaagaaatcaaacgacatctcttcttcaaaaatgaccagtgggcttgggaaacgctccgagacagtaagtttttttttttctttcatattttagtgaatatttgaaagtagttgtggtagtttgttgaaactacattgctaaatatttgtgtgtatctgatgaaaatcagaagccacaaatactatatgggaattgtcctaacctattaatttgataatattgggcagattatattgttactcctcttatgtcccacgcaggatacccagatgaaatataaatgtaatggatttaggctcaccagtcataattttacatttgatctttgttgaattgttcattttaggcgttagttatcttattatggaggtggtcaataagtagtaagtaatgagattaaaatatatgtttttgtgagaagacaagttattctcttgtttttattaaaacccaaaatataagaaggttctattattaattccagaattcaatttaattttatttatgagtttataggatattgtgatatacttgattccatcaggcttttgcagctggcaattcagaaacaaaaatgtattgtataagaaactaattttcagtcagtttagaacact

SEQ ID NO: 88963 - DNA, 1049 bp, Homo sapiens
aacagctgaaactgtaagccaaatttatcaaagacttcttgagcattgtgatattgatataaatttaatagtagaccccactgatgcacaagttaaattagaaatacagtatttctttgcctaggagatttgtatatttactgaaaatattacagtttaaaaaaattctcagtaaaagaaattcaaatagtgtagaaaattatgaagaaaggatatctccatgtaactcttctgaataattatgttatagtcattttgcatatacaagggtctttgtggcatttatgtttgtctttttttaaaactagacttgcaacttctgtaatttgattattttacttaaatcttttattaacatttttgccactttttaagtgaaacaattttgtttaacattaatgaatgtgttttgtttgttttttctatttgtatagcttttttatgcattccaagatgatcgttatctctacatggtgatggaatacatgcctggtggagatcttgtaaacttaatgagcaactatgatgtgcctgaaaaatgggcacgattctatactgcagaagtagttcttgcattggatgcaatccattccatgggttttattcacaggtaaagataaaagtgctttaaattttctcatttgttgagggaaatagctaaaaataactttaacatttcttactctcagttcacccattcttcttccgtatgacataagtgacctttcagaactcaagactctggccaggcgctgcctcacgcctgtaatcccagagctttgggaggccgaggcaggcagatctcttgagctcaggagtttgacaccagcctggacaacatggtgaaacccatctctacaaaaaaaaaaaaaaaaaacacaggtgtggtggcatgcacctgtggtcccagctccttgggaggctaaggtgggaggatcgcttgagcctgggagcagaggtttcagtgagctgagatctagtcactgcacttcagactgggtgacagagtgagattctatgtcaggaaggggggaaaaaaagaactccaa

SEQ ID NO: 88964 - DNA, 1616 bp, Homo sapiens
taccagttggaaaatttactgttttttttttttttagtgtgtttgcctttgatatcttaaattacatctttttttaaaggatcactaaaactgaccttataaaaagaaaaatttattccagtattaatctaaaatatctactcatgtttcctaaattcagatttgatgtgtacttaaaataccaggaactaattagctaattattttcagcttttgtttgtagtgtaatatttgtttttaaaacattctgttaagtcaaattttgattaataaaaacctttagtagttgtaatgaagttattctggaatttactttaaaaaatcttagcaaattgaacatttagctactttatagcttcaagtttcaccatattttcaaataattcttcatgaagtttgttgtttttcattgtgtttcttaagaactcgaatgtaaaataagtagtgctagttgtaatgctttagtgatttaaaatgataaacttttcttttcatacagataaagacacaataaataaaatcagagatttacgaatgaaagctgaagattatgaagtagtgaaggtgattggtagaggtgcatttggagaagttcaattggtaggttattttaatgagaatacaaaaggactttattaaattaaaataatccacttgtgtgtttaacatattatttgggaaaatactgtttttatagaattgttgctttaagttcctttagacattgttgcctgagggtatggaagcctagtgtcaaatctagccatagtgggaagtgttttccccaagtatctgtggcagaaaagaagtgtcaggcatcagaagataaatctttgctcctaatattagactaaaatgctgtagaacagtaagctttataaacaggaagcagcttacatagccgtgtggaggggggaaagtgtcttgtaatataggaaataaaaatttttttaaaacattacttctgataattaaagtcttgacattagctacttggaataatttggcagaagagaagaaataaaaataactgaaacagtaaggctaaattatttagcaagtattaaaagcacttagtaaattgttctgtgaaaccttgagctttaaatgttaacaaaaggttcattattttcccttttcaattttaaaggtaaggcataaatccaccaggaaggtatatgctatgaagcttctcagcaaatttgaaatgataaagagatctgattctgcttttttctgggaagaaagggacatcatggcttttgccaacagtccttgggttgttcaggtatgactttgctactctttcattattgctgcattagtttgtaactaaacatgtctgagaagcttagtttgtgttttagaatagtagtagagaatttactggcagttacaaaattgtctaattaccttttaaatcttaaaatttaattgtattgaatcatttctagcaagaaaggctagaacaaaataaccatgcttctgtagaatttatatataggaaatttaatttaaatgtagaatttgtgctgggcgtgatggctcatgcctgttatctgaatactttgggaggacaaggcgggaggatagcttgagcccaggggtttgagacc

SEQ ID NO: 88965 - DNA, 1248 bp, Homo sapiens
ttttttttgagacagggtctggccctgtcacccaggctgaagtgtggtggcatgatctcagctcactgaagcctccacttcccgagctgaagccattcttctgcctcagcctcttgagtaactgggactacaggcaagcgccaccatgcctggctaatttttgtattttttttggtagagatggggttttgccatgttgcccaggctggtctcaagtgagccattggcctcagcttcccaaagtgtaaggattacaggcgtgagccacagcacccagccctcaaactaattttgaaacagtggactgcaattaactttcctttttctcttttctgttattcattcattcatttgacaaatgtttatttggtgtgtactgtgtgctaggaattctgctatgcaatggaacaccatggtgagtaaaaacaaacatgtcccactttcatggaatttatagtgtcaggaaaaggattaattaaatgtctatcacactaagataggagtggggtatggtgaagggcaggtaagagatatgatcatgactttcctttaaggtttggtttacttgtagtaaagcaattaagtgtatagttttcagatatgaggctgtagattgtatcagattcacttgaggcacttgttaaaaatggaatctgggatcttgcgtagacaaacaaaatcacaattttttgggatgattcttaggatttgcatgagatgtggattcttagacacactcaagtttgaaaactgtagttacagtggaaagaatgtgaattttcattctgtttggtaattttatgataaaaatttcaaatatacgcagaagtagggaaaataggatagtgaactcctgttactcagattttgcagttttcaaaatgtcatcacatttgatttcattaatcaccctttttcttaccaaaatattttaaagtaaattccatatattgtcatttcatccttacatacttcaataagcatctttgaaaaaaaaaaaggacattttcttacataatcataatggccattatcatgcctagcaaaattaaaagtgctttggtatcattaattcccagtttatattcatatttctgattgtctaaaacagtgtctattttacagttgctttattagaatctggatccaaagtccaaatgttgcttttctttggttaggtcctttaagagtcttttaagtctcttaatatagagaaatctcattcccccaacttctccaactcccctt

SEQ ID NO: 88966 - DNA, 1826 bp, Homo sapiens
gggcatctgccgggacagcgatcagaagcagccagagctccgcctccgtccggacctccaaggccgctccagagccctgcatggctcctcagagccggccaaggcgagaaccttgccggcagctgcttacccgcactcggctcctcccagcggtccgccttctccaccgcctgcccgcaaggccccgcccacctcaccgccccgccccaccccaccctgcggaggcgacagagtgcgcgcgcgcgcgcggggtcccggctggttccccttccgagcgtccgcgccccgcatgcgcagtctgccccggcggtctccgtttgtttgaacaggaaggcggacatattagtccctctcagcccccctcgccccaccccccaggcattcgccgccgcgactcgccctttccccggctgggaccgcagcccctcccagaagctcccccatcagcagccgccgggacccaactatcgtcttcctcttcgcccgctctccagcctttcctctgctaagtctccatcgggcatcgacctcgccctgccccaccggacaccgtagcagcagccccagcagcgacgggacaaaatgggagagtgaggctgtcctgcgtggaccagctcgtggccgagactgatcggtgcgtcgggccgggccgagtagagccggggacgcggggctagaccgtctacagcgcctctgagcggagcgggcccggcccgtggcccgagcggcggccgcagctggcacagctcctcacccgccctttgctttcgcctttcctcttctccctcccttgttgcccggagggagtctccaccctgcttctctttctctacccgctcctgcccatctcgggacggggacccctccatggcgacggcggccggggcccgctagactgaagcacctcgccggagcgacgaggctggtggcgacggcgctgtcggctgtcgtgaggggctgccgggtgggatgcgactttgggcgtccgagcggctgtgggtcgctgttgcccccggcccggggtctggagagcggaggtcccctcagtgaggggaagacgggggaaccgggcgcacctggtgaccctgaggttccggctcctccgccccgcggctgcgaacccaccgcggaggaagttggttgaaattgctttccgctgctggtgctggtaagagggcattgtcacagcagcagcaacatgtcgactggggacagttttgagactcgatttgaaaaaatggacaacctgctgcgggatcccaaatcggaagtgaattcggattgtttgctggtgagtagcgctgttctcttttgcttgtctggggttttgcatgtctttccttcctcttgcattagtctggttcgctgcaaaagtctcaggtgtgcataatcgtcttggaaaatgctagatttctgtttcctgaagaatcttggagtaccattaacatctcatggtgtggtcctatttgccatttgactggctctgtactaactactctgaacttttaattctgactcagttcatgagtacccgaaagatacttacaaactgctattgcaggcatcctataaaaagttatcacgtcagagttactgcaatgtatacagtttgttgaatggcgatcgtagtaattaatgttaatctttctgatccgtttgacagttaaattggaaagactactttgcattttttttcctttttgcgatttagctcctaggggtttagtttttagccttgaaaatgataacggagaattgctattgaggaagtgatttttgagccaaaatttcataggtgatttgagtttgaaggaactttttgctaa

SEQ ID NO: 88967 - DNA, 1041 bp, Homo sapiens
ataaaaatgaataaaacacaaactgtgactctaaagatttcaaaatctaaaggaaagatggattttaatacaacttcgtaggccaggtgtttaatagctggtcaaaggtaaattcagggtcatctgggaactcataggcagtcttaaataagactgtaagaaatgaaagaaacttacagtaaaatgctggccagtgttcctactcttgagttggtgatcgctactggagaaaatctctcatcattgcagactgagatcactctaaattcattgtccctatccctaaatgtgacctaattatatctttgactgcctttggctgagttcctttcctttttatctaatcaattattccaaatctattccactctcttcaagcctgtacccacctgcccctttctcagcaggctgctcctctcacttctaggaatccctgaagagtcccattaattgccttgactttagctgaccctaagtactagtgaagccaagttctttatctccaaccctgggttcccttgcacttcagaccctattagattactgctggatatttccatttggttgtttcacagccatttcgaaaaccatatgtctaagaactgaatggatcaccttctgtccagaaatctcaccttctttctcagggttccctgaatcagaaaaggtaccatcatccaccccagtttgcctgaaaaaagaactactctggctggaacatgccatgtccaggtaggaggctgcagtaatccttgtcgtggtctttaacacgttgtgtataattgcatgagaaatagcattgtcaagtgattaaaaacatggctttgaagtatgatggatctgtgtttgattcctggcaccatcacttgtcagtcagctgtgtgaccttgagccaactattaaactttctaagactgggttaccttttctgaaagatggagaccataatagtacttacaggccaggtgcggtggctcacacctgtaatcccagcactttgggaggccgaggtgggtggatcacttgaggtcaggagttcaa

SEQ ID NO: 88968 - DNA, 1092 bp, Homo sapiens
tgccacttcagcctggtccctgtttgttccttcatggtgaccacgcagatactgaaacccaggatgggcttaacatttgggcctggaacatctggaaaatggtcagagagggagcggaggaggcagaagaaagagaactgttgcattttgtttcaccaggtgctaggaggaagcaacattagcctttttgatatgggaggcacattctgtggaccctggagttaggctgcaacaattgaggaggtcaaaggacagctgagtggggtcagtgagacaccatggggtgtattttgttacttagtaaaaggagcagcctcctaaaccttaaaggattctcttgaaaatctgtgttgtgaaaaggttttatgagtcttatggcaaaaactcctgatttatctaaggaatgctcgcttttgtctaatggaaggataatccttaccaaatgttggcaacgtctataagagtcaatataggtctgaaagaacagttggagtttgaagtgtactttgcttttcaaaatgtttatcattttagtgtttctctctcaggaagaattttgcactgttgaaatatcacctttttctttccttggagcagaaagcggtagcgggtggggagtgagggagggtggacggggagaggtaagccgggaacttacattaatttaaaaatcattctacaagcttttggcctaatctgcaaacaaggtattattattaaacctttaaaaacaccaaaacttgttaactctaaaaagtaatatttgaatttattttaacttacgaggaaaatgggtggtacatgaagtgtcatgtttctggaatacagatttttttatttagttgttgatagaaagggctgtcagttgacaaacaaccttaaatcttgtgtttcttcctgaatgtggtcaagaagaaaatcagtgtcagagtcaagaatagagaataagaaaagcaatacagtaaggagttttctctttgaagggaaatggagaagggaaaaatctgcatattgtaaaagctctctttaccacaacccatgacctcaagagaccgcttatatgattgtggatacctttgaaaggtattagcc

SEQ ID NO: 88969 - DNA, 1047 bp, Homo sapiens
tttggagcatccaagtgaattccctgggattgatatgtttgagtgatttgtttggtagctatctcagagggcagggaattttgttaagcagctttgatcgtcgttgagcaagtgtacctggttggaccataaaaagaaatgttgaactgtactgacctgcttctattgggacaggctatggcactttaccctatttctatggaaatgttggtgacattgttgtgagtcctctgctggtgaattgctacaagattccacagttggaaaacaaagatttggaaaaattagggttgaccggcagccaatttctgagcgtggaaaacatgattcttctgacgatacagtatcttgtgcggctgggtaagtcattttccataatcatttgctggtgactacttttgaggattttttgtgatgtactttttctttctttctcacatttatcctcctatctcttattttccctctttcgcttctaatgttctttcccttcaaccccattctctgtaacttttccctttcctctccttcatttcttttctactcctttcctttcctcttctttgggtcctagaggagatgaattgcaccacctagtgtccagtctcatgatgctgcaaaggtctccaaagtagttaaggtaggcagaaccttaaagggttgtgccttgagcaccccttctctggggagcttggccaggccacctttctgaaagtgcacctaccatctggagtgcaaacacagccattgtcttaaacaattattttccagttttccacttagcctttttatcttgtttatccactggccctacacccattttttttcttctccagctacacccctttgatggagtcccatcgtgctttccatcattgaggtcataactgtggacctccctggaaggtctttaagctatagggtaagggggatatgtaggtcatgaacccttcacttcctctatctgatatattctccgaagccccaaagtgggtgtatgcaggtgccctgacaatactagagtggcttagcagcatttacatcgaa

SEQ ID NO: 88970 - DNA, 1023 bp, Homo sapiens
aaggactgcaggaaagcatatgggtgtgtgtgtctctcctccctgtgattctttaaattccagctgtaattctcttctatataggtcctgatcaggtacctctcagggaagaatttgagcaaattatgctgaaagctatgcaagaatttactctgagagaaagagccctgcagataggtgctcagtgtgtccctgtgtcaccaggacaactcccctggcttgctagattaattgccagcgtatctcaagacttggttcatgtggttgtgacccagaactctttggcggagggcatttcagagaccttaaggactctcagtgaaatgagacactatcaaaggctgccagattatgtggtggtaatttgtgcatcgaaaatcagaggaaatgaattttgtgtggtagtgttaggtgagtaatttttttgttttttgtttgtttaatcaattcattcgaccatttttccatttaaaaatgtgtgttatgtgtttcaggcatccacataatcaacctctgattaattgctggagcttgggctcatcctcctaattttaactttccctttccttctcagatcaggttttgtgtagccctcagtttggctggtgcccctgtcagctggttgtgggagcattatttcaaagctctccctagtaacagatacccctgtctcatgtaactgctgtcctttaaagattttggaaatgttactactctagcatgtgataaagccagtgccacaggtggcctaagccagttaatcgaatttgccagaaaattagctcatatattccccttctcactgaacagtctatttaatattgtaacatagtctctaaagaaaagattcagaaagttggtacactacaaaattggggggtgggaggggatttttgtttgtttgttttgcactgtgcagattttctatcaggcaccctcttgggtagccatttggactacattttgcttctctcttctctgtactgaatggctctcacctcttccagcaaagaagctaagaaa

SEQ ID NO: 88971 - DNA, 1054 bp, Homo sapiens
atcccattctgtctgcttttgagtattagggaagtcaagagagatacaacatgtgaaagcatgtaaattataagcactatatcaatgagagtagttcttgatatagagacaccagtatactataaagatggccaagtgtaaatgctgatatgaattgctggctgaccaacaaatctactgagaacagcctaactgcccaacttgggcagttaataaaaatgaaacaaacatatccttccttgtaaccttcttatctctattttgtaataggcgatgacctagacaagctgctggaaaaaatgcaacaaagaagaggagacagtgtggttacccctttcgatggagaccttaatgaatgtgtgtcaccccaggaggctgctgctatgattcccacacaaaacctgggtaatgtcatctcagaccaagaggaggaagtcagtccttgggacagacattgtaaaaactaagtcattctaagggttttgaggattcttcaagtcacagaccacaacagccttttcctgattgtctacatgataaacctggttgaaattaaaaatgctttcccatgtggcctggatcaaaggctttgttcctagtaaaagtcttctggaatgaaaatcaaagtcaaagactttatcttaagcactctctcttttttctctgaaagattccaggacattggctcattttccttagctccaccagctgtgcccagaggacttcaaaaaaccgtctgaaagagtcagactacaggcagtgcagggtccccagctcctgctccttcacttcctgtctgacttgtaaaacacacattatctcagggatagtgaggctttattggcagatagagcagcgctaccaacatgtcatctgccctacaacaagcttcaggggctcaaagtgggagtgtcagggatgaggagtctgatcattaagactggattcatttgggttcagatttcttccccaattcactgattgacaggaatgacataggacaggacagaaaaaagaacaggagaaaggatagttgggagacagacccatataa

SEQ ID NO: 88972 - DNA, 1037 bp, Homo sapiens
cggttccagcactttgggaggctgaggcaggatgattgcttgagcccagcagttcaagaccagcttaggcaatacagtaagaccctgcctctacaaaaacgttagctgggcatggtggcacgtgcctgtagtcccagctactcaggaggctgaggtgggaggatcatttgatcccaggtggttgaggctgcattaatgcttactataatctggggactcagggttaagtacagtgcctgaaggtgtgacgctgtaaggggtagggccaggattcacacccaggtctactggctctcaaccgtgactgcatattggaacactctgaggcgccttaaacaatatgactggatcctgggcagtcagacattctgactgaactattctgggatgtgtggcctgagtgtgggaatttttaccagctcccagctgattgtaacgtgcggaagacattgggaatcttgctcagtgcatcctaaaatctcttgggtgtcagtatattaacaccccacagttaaaatctcaagacagaaataagatcatccaaaattaaacttttaaggaaatttggcctggtggagactaggttatcttacagatgccagagtttgtgaattgggtctgcagagacgaatgctgggggccagtgagggcaaatgttcctctcagcatgggtgtgaacaattctgcctcctctactgggacaggggagctcatttttcagaaatgcctttgtccacccatctgggctctacgtcccataaaagccattctctctgacacatggggaagagggaggccagtcacctgctctgcacacttccttcttgtcctagatcacaatgaaagcagtgaagtgagccagtcagagggagagccctggcctgacatcgagagcttcagtaaaatgccttttgatgtcagtgtgcatgaccccaagtacagtttgatgagcctggtgtatactgagaagctggcaggggtcaaacaaggtcagtgcaatcagccaagttcacctcctctctgggttaaggggacac

SEQ ID NO: 88973 - DNA, 2189 bp, Homo sapiens
agaggagaccctggagagaagaaacacgtgggttcaagaaaactactcaggtcttatctgccctccagtccagctctaggctgggtgttattacttccctttaaaatgggaacaagcagctcctgacttggcactgaggcaccgacagaagcagatgggccaaactgtttagaactgcagcgcaagaagtgtccagaagagcgcagctctaaaacactggattcagttagagatgtcctgcctgagaaaggaaaatgaaggcattctgacatctacagtctccacagctctgtcatacatacaacaagactggccccctttgagaaatcagcgcattgctcttaaactccaggaggaaagcaggacttctttcaggcacattcctgtgtcataggcagtaacgatgcttccagctccctggttgtacaacagccccctataacttgctacgtgccttaaagatgagatgacctaggggcccctcttgatctgggtgaaccactaatgctgcctctcccttagaccatcttttttctcatggttacattccttccccagagtgctcagctcaggaacatttgcagcctacatggggaagaatcccaaaccttcccagggtgctcagtacaccagtgacttcttccttaattaccagtcctcagagttaattctgcaaaagtgcagataaagggaaaaagaaaactcaaattcaagggagagtcaaaaagcttttttttttttttttttccgaagagtggtgaggagggcaggacaatttctagaggcaggggaatctgaaagtttcatgccaggggaatggagctcagtttatcttcgaagcccttctccccatcccaggggggccccttacccacgcctgcattattgaacatgccgggaagcaccagcatgatgtggttgggccagtacttgcggtacagaggcatctcatactctttgaccaccaggaggtgaaggtggctgatgccctccatggcgtggaaaaggtttaggagtccgtgctcatgtcgaccactggaaggagtgaaaatagggctcttgactgcattcaaattctgctgaaagggaaaaaaacagaccataaagggaaattaaagcctctagattgaagacgcttaaagaactaggtctggtgcctgccagtccagatgctctcacccaccttgtctgaaaccaggggcagccgcatgctctccaggtgcttgccctgcttgctgaagacaaaatgactctctttggatttgggaatgatgaaatagagctgaacctcttctcccagcatagaagaagagaatgtgaaggcatgaagggtggagtcagacatctacatttgcaaagaagaaagggagggaacgtaagtaagcccacagtttccaaacttccaggccactccttcaggttgttattaagagatggaaactaacatgaactggtaagtgccaccagagcaggctgtgagcagccacgtctaaaaggttgataaggcaaacacttcatttaggagctgccactgacatgacagcccgccgtcttgcacctgcatagcctcagtggaagaagtacttgttgcctggcactgcattctgtgtgctctcagagccacagctgcttcatcctgtgcagaggtcagatatatctgtgggatgtcctgctctgtatgcattcctaaaggtcccctgttaatcggagggaaacacttctgctctatgcgggtcagatcaaatgaatatcagctttctaaatatcaggtttgacattaaaatgcctctccagccccatctttccaggctacagtggatgctgaagaggttcaatcatttagcccagaactctggtttcagaaaagagaccatttgactcactgaagccaaatataaatctaacctacatttaaagtgctgcagagttcacgttttttcagtaacctatctcagtgaataattatataataggtcttttcacgcttttaatgtggataagatttggcttaataaaaggataccatcaattttcatcagcaactagaatcgaagtaggtttcccaatggttttaaccaaaatactatatttcatagaaaaataacattacacttcttcccttaattctagtttattctgcctcagaaatgtgggaatatactacttagtactgtagtcacacagaaact

SEQ ID NO: 88974 - DNA, 1048 bp, Homo sapiens
cactgatatgtcccctgctttagatacttcaaggaaactgacggcagcttctttgaagaagacaactctggaaactggcaccctttccctagatctgccttttgcaagaggcaatatggtatagagattaagagaagagacaggagccaaactgtctgattttgaatcctaattccaccactttctagccatgtgaccctgaacaaattaaacccattgtgccttggcttccccacctctaagaagacaataataatgccgatctcatagggttgctgtatgatgctcaggatagcgcctagtaccctctaagtactcggtgaatgttagtgattatcaagatgatagtcagtaatcagccaaattttatgagtgggccatcgtaaaatgaaacaaaacgtaggtgataaatgaaagaaaagctattaaatctatggaagaaccagaagcagtgtgaacagatcaagggtaaaactgggatttaggaaaatctaccttccaagaacgtgtgtgtaatagtttgcattctcaacataataaaggccatatatgaaaagcccacagctaacatcatcatagtcaatggtgaaagactgaaagcttttccaaaactgagatcatgaacaagacaaggatgccacttttaccatttctatttaacataatactggaagtcacggccagagaaattaaggaaaaaataaataaataaaaggcaaccaaagaggaaggaagtaaaattatctctgttctcaggcaacatatacatagaaaactaaaaattccaccaaaaatcccctttagaatgaatatgtgaatccagcaaagatgcagatgcaaaatcaacaccaaaatcagttgcatttctatacctcaactgtgaacaatctaaaggaaatcaagagttccatttacaatagcatcaaaaagaaagacttaggaatcaactaaggaggcaaaagacttgtacagtgaaaagtacaaagcattgatgaaggaaattaaggaagacaccaataaatggaaagacatcctgtgtttatggatt

SEQ ID NO: 88975 - DNA, 1044 bp, Homo sapiens
tgtatttatttatttactttttttttgagacggagtcttgctctgttgcccaggctggagtgcagtggcgtgatctcagctcactacaagctccgcctcccaggttcacgccattctcctgcctcagcctccccagtagctgggactacaggtgcacaccaccatgcctggctaatttttgttgtattttttagtagagacggtttcaccatgctagccaggatggtctcgatctcctgacctcgtgatccacccgcctcggcctcccaaagtgctgagattacaggcgttgagccactgcgcctggcctcaagtgctttttaaaaatatctttatcttctgtattttgctcagtgggaaccaatagcaattacaagcaagatactaaatttgacttaccttttagaaatttaaatttcttaagatcagcacctacaaaagagtcacagaggtacaaaaggagtccactgaaaaacaccccttcacagttgacattgctggagtggggtctggagctgatatagcatatggccacctgaaatcatcaagcaaaaatagcatgggcatttcaagagcaagcaaaatatctgcagttcagcagaatgactcagtaccttcctttttctctatttcaggataaggtaaaggagatgagttttttccaatattaacttaaatggcttggttagttaagctttgcagcctcctttatgtagcgtgccaagtgttaacctgtttaaagcttctcttatttatgtttcataataaaggactattaggagacaaattagtagtaagaaacaagcccttccatttaagagtctttatcaaatttaaaaaactaccttccacaaaaaagcatacttaggaaagattaaatgtttggattgccttattggtgagaataaaaaatatttttgatcagctttccatttagatatacttaaattttcaattggatagaagcttaagacagtgcatgggctgggtgcggtggctcacgcctgtaatcccagccctttgagaggccgaggtggatggatc

SEQ ID NO: 88976 - DNA, 1023 bp, Homo sapiens
atattcttaaagactggaaacacatttaaagagtgggtaaagcaaaggaattaggctaggagaagatgcataaatgcacacaatgcctgctctgcatttactgatttgtttgttcagtttaaatagtaaacttctaactcctgtggaaattttgccaaaagtttcaatacatagaagattataaatcttaaactaacactgcacagagaaagacaaagctacttctttttttaaatacaaatatcgtctacattctatcatttcaaacccctgagtaatactgtaccaaagtacagatctgaagagaaactgagggttcaggcctcaaacgttaatcttcaattgattccacaccaatggcatgagtctcatgtaacacattcaggctagttaatcctgacagtcagtttccccctaacatagtaatagaaaaaaataatgcaaactccatattcactctccaaagtatatcctcctcaggatcccatgggcagaccgtatcttaagtaattgcataactgcctaggatagagtttacctgaatttaagggtcctgtaattggaactgaaggaaagtgatgtccccaaagacctggatcagatttggggagttctttggagaatttagacaaatatgttgcactttgctccacagtgattgtactttaaaggaaaaagaaaaatcccaaattgtttctgtcccatcccacctaggcatctttttgctgttttggtctcttcaaaagctcatacatgacgtccagtaagaaagtagagaggcttgtcatcactgctgttagcagtttgaaactcgtcccggaggcggaactgccactcatcttctagctctaagcggacaattgtttggcgcaaggaacttctgtcttggcagatgacacacagtgtagcaccttcaggaaaaaagacagaaatatgtcctaggctcagggattgaatttataaagaactttatctctgattatatttcctaagctaacacatctgagaaccaacagatggata

SEQ ID NO: 88977 - DNA, 1037 bp, Homo sapiens
atggaatctatgtcaaattcttttaatttactacactttattaatagattgaaagccatttttctgggacaacaaagttgttattctcaaaagttggtaaaattttttaagaagatataattcatactacaataacagcatcttcatactacatagttctagcaactttgagacactctcaaaaagtttgagaagttttaactggagattaacaataacaaacaccttgtattagttttagcaacccaaagttgttctgtttccagaaggacatcaaagtgagtgtagttgcaatctgtcaaataaaagattggtatctactatgtatgttttcaacacctctttaatcttggttgtccaacctataatgtgactgacttccagcctttttaggacattgccagagtcagggagcttgttttcttaacaaacatgccagaaaactataaagaaaaaataactttttggagggggtgggagataactttaatacattaagcaaattaaatcaaaggacaaaaatataacagtagacacaagacaattttgaatcattaacaaaatgtgaggtagactagtgaaattcaccaaattttggttaagaacattttacagtaataacacgggtgccccattttctaaaaatcacaaaaagcaattgcataaattacagccaaaaaaaattataacaattgtcttctagtttttcgtttacattcagtattaacctgtgtgaactgtcatacatgctgaggttcagcaggtctacaggtgagttactgtgtgggcctagcgaatccattcatcccacatcagtgtcctaagggattgcaaagcttaaagctgaacacactaggatatatatatatatacacacaaatcatggtgtcctgtgcttgtgcaattttatccttaaagaaggacctaacatactcaagaattatactgatgataagatgattttaaaagatccaaacattagtaagataggctttgaaaagaataggcagatcaatttctccattataggggtgatg

SEQ ID NO: 88978 - DNA, 1138 bp, Homo sapiens
cacttatttatttgaaggttcacaaggtcaccctggggtttgtaaaatgagaaggtagaagagagttgtgaggtacaccatcatttaagagtctcaaagaagactgcctaagaaggcatgagcagcaaggtaggagagccagaagagagtggtagaaaccaagggaaaaatgtcaagaatcaaagaatgatcaaccctgtcataccacagttgaagactgaagagagcccaagtgatgttaggaaaagagcagtctcagtggagtggtggaggcagcagggacacggtgagtgtacactaatggccacagactgtagaagagggtgagtctgtaattgctgactatataaaggtgcttatagattttttgttagcagccctcatgtagttgttggttgtttataaaaatatctagcatagagacatggtaagagccacaaatatagtcaggaactacaagattttatgggcgatgcttttatctgcatggacacacagataaaaagcagtattttactacttcataatatgcaagagtgaacttggtttatctactgaaagcctgactgttgtaaggacagtcagtgagtacaacaaacctgcagtgttattttaattgttcttgtttactttgcacggctgcccagctatagagtcttatccttctggatgggaacacagctgtattcctgcccatccacattgcagctagggttgagattgctgagtgagttgatttctagggtagtgactctagacatacattttctttctcatggctcctgagtctttaggcagaaaaagggatgagttctgtcttttagcaaccccccacccccacccttctggtaaaaataaaatacactggactagtaaaaataaaatatgtggaatgaagtggtcagaaaagaacttactggtgttgccttttttttttttttttaacttaataccatcatctattgtcatagtcactgaagtagatgctttaactcaacaacacttgatagttgagagcacagtgaatttattatgtgaatgactttttctttggccttagcggcaattcctaaagtcatctttagcagtatttttactgttgttgttttgttttcagtgaagccaaggtttcagtgtt

SEQ ID NO: 88979 - DNA, 1282 bp, Homo sapiens
gaaatatttctactcttagttgaatatttttatcatgaaaagatgttgggtaaatgtttttacattgttgcttttattaaaatttaacctcaggttattgatattatagatgaataattattttcaaaaattttgagcacatacagcagtatctaaaaagcttttttagtcaaattgtatttgacaggttattccagttttaatgattagaatttttttttttttaacatttcacacttaacccttccccccccccatttttttttaataggagtaactttatatatggctcatatttgagcaaagaagaaattgctttctcagatcccactcctgatggaaagctgtttgcaacacagtactgtggcactggtcaatttctggtatataattttattaatggacagaatagcacgtaaaacaaattcttgcctacaccactagaagacatctattgaagagaatggattggttgctgactttaaccaggaactagggccatttttattacaatgaactcaggactggcaacaaccatatggttgttccattttcataaaattggaaacaatgcagtaatagcttattgttttgttttttaaagaagatattttattatcttttacagaaatttatgattgatgtattttatctatagttatttagacatgtttacatgcagcagataattgttcatagtggactgaaaactaatgcaaggactatggtctcagtgataagtatattttgaagttcttaatatggaaatataccagtgtagcttggtactgtatttttttatattgatctgctgataccagtgataggcttaaagattgtattttcacagagtggaaaccaatttttttagttattgttcaaggagggtgcaatattaagtgttttggaatttgaagctaatttttaaaaggcctgaactatactttgaagaaacccctatagaaaaggaaagctccagctaaataggaagaattagaatattgagcttttttttcctgatttttctctttcctatctttgatggaaggaggaagtagaaagtggtaaagaattgaggctttccttcttggagagctgtaaatgacaagcattaggaaaggtaccctcctagattcattattctttcattctggtttcacttttaaaataaatggcaacttggcacacctaggctgttaacaaatctcaaagaggtttataaaaacgtatagaatacttggaagcaaagtatggatgactcggtatctgctttgttattcct

SEQ ID NO: 88980 - DNA, 1042 bp, Homo sapiens
aaaaaaaaaataaataaaataataataatttcttgctgttagaaatacaaattaggaatataaagttttctgcttttcatgaagcagaaatggatgaagtaagaaaaaatgggttttggaaaatactacttgttagcagagggttatgtgtaacatactagtcctgaaatatgttggagctaaaggtcagaagtgtaagtgcactgcattggaatttatttctttgcaaaaacgttgtggctatttgattattcttctaaattgcatgcactctttcctgaaccctgcttctcctctgccttaattttaagcattggatggactttatcgcctctaagtttctctgaagtaaggagggtcatgtggttattgtgactagcagttaactgtagttgaggcatagatatgtcttgagtatgttatttgaacaaatattagctaacttgtttctttcatcttttatttgcctatgatttgaatttattgctgtatttacccttgggaacatttattgattgactgttttgttagattagtgcattgatcttagtttgatactagtaagaagggagaatggaagttgctaagagttacttagtggctactctttgagcagtcatcttaaatacagcaccctcgtacctacccaagtgatggaggtgatgatagccattttttagaatgctaagatcaggaaacagaatcagagttccagtgatttgcctaaggccatgcatctagtaactaccaagaacaaggatctaaaccctgaacttttactctagagttacttaaaagttttcactgaaatatgctttcttagcttggcatggtggtgcacgcctgtagtcccagctacttgggaggctgaagcaagaggattgcttgagccccaggagtttgaagctgctgtgagctgtgatcttgccactgcactccagcctgggtgacagagtgagactctgtctcaaataagtaaattacattaataaataaaacttgctgttttcatgaacattagaaatctaagcaatactaagta

SEQ ID NO: 88981 - DNA, 2314 bp, Homo sapiens
gttttttaatttttcagaaacggcagcacaaaaggaaatctatattaatagaatattttgttgaacaaaggaggttagataagaactgcaaaccaacagactcagcaaacaaggaaagaaacgtgttagccataagacatgtttcaagtgaatcgaagtccaataactgtagacttcagaagaaaaaagttttcaaaaattttatcaaaacaggtcactgataaataactcctccagtaatagagctaggcctgaaaccaaaattaattaaaaaattaacaaaacagattgaacctgaattaaatttcttttgataaaaaaacttattaaaaataatcaaaattttcctcaaatttttattaccttgtccaaagtaaagcaagtgtcttttagcattcatgccagcttttctcatgttctaggaatgacagaaaccttacttgaagcaaactagtatttttgttgaaaatgtatatcagcatcagttaaagttgatttttcagacctgctcctcagtaataatactagctagtcagcattcacgcctaccaggacacaaaaatcctcttcaaaactactcagaaaagaaagtcattactcaggaatgatgtccattcaggagaaatcaaaagagaattcctccaaagttactaaaaaaagtgacgataagaattcagaaacagaaattcaggattctcaaaagaatctagcaaaaaaatcaggtccaaaggagactataaaatcacaggctaaatcttccagtgaaagtaaaataaatcagccagaattggaaacacgcatgagtacaaggtcatcaaaggcagcatctaatgataaagctactaaatccattaataaaaatacggtgactgtgaggggatattcacaagaatctacaaaaaagaaattatctcagaaaaaattagtacatgaaaaccctaaagcaaatgaacagcttaaccggagatcacaaaggctacaacaattaacagaggtttcaagaaggtcgttacgcagtagagaaattcagggtcaagttcaagcagttaaacagagtttgccaccaactaaaaaagagcagtgtagcagtactcagagtaaatctaataaaacaagtcaaaaacatgtgaagagaaaagtactggaagtaaagtctgactctaaagaagatgaaaatctagtaattaatgaagtaataaattctcccaaagggaaaaaacgcaaggtagaacatcagacagcttgtgcttgtagttctcaatgcacgcaaggatctgaaaagtgtcctcagaagactactagaagagacgaaacgaaacctgtgcctgtaacttctgaggtgaaaagatcaaaaatggctacttcagtggtcccgaaaaagaatgagatgaagaagtcggttcatacacaagtgaatactaacacaacactcccaaaaagtccacagccatcagtgcctgaacaaagtgataatgagctggagcaagcaggaaagagcaaacgaggtagtattctccagctctgtgaagaaattgctggtgaaattgagtcagataatgtagaggtaaaaaaggaatcttcacaaatggaaagtgtaaaggaagaaaagcccacagaaataaaattggaagagaccagtgttgaaagacaaatacttcatcagaaggaaacaaatcaggatgtgcaatgtaatcgttttttcccaagtagaaaaacaaagcctgtgaaatgtatactaaatggaataaacagctcagccaagaagaactccaactggactaaaattaaactctcaaaatttaactctgtgcagcacaataagttggactctcaagtttcccctaaattaggcttattacgaaccagtttttcaccaccagctttagaaatgcatcatccagtgactcaaagtacgtttttagggacaaagctacatgatagaaatataacttgccagcaggaaaaaatgaaagaaattaattctgaagaagtgaaaattaatgatattacagtagaaattaataaaaccacagaaagggctcctgaaaattgtcatttggccaatgagataaaaccttctgacccaccattggataatcagatgaaacattcttttgattcagcatcaaataaggtaatctgtttttattatgcacaatagaggtgccgaaatattttctgtaagaaatgtctttataacattttagcataagaatgaagtcataaaagattgaagagttgtttaagttctcctgttaagttgttagcgagagttttattaacccagtcttgtgatagaacttcagatgtctca

SEQ ID NO: 88982 - DNA, 1445 bp, Homo sapiens
gacggagtttcgttcttgttgcccaggcaggagtgtagtggtgcgatctccgctcactgcagcctccgcctcccgggttcaagcgattcccctgcctcagccttccgagtagctgggattacatgcgcccgccaccacgcccagctaattttttgtctttttagtagagacgggggtttcaccctgttggccaggctggtcttgaactcctgacctcaggtgatacccccgcttcggcctcccaaaatgcgacagtcctattaattggatttaatctcttcgaatctccctctcttgtaggacatttttctccaagaccagccctcgataccctcagccgtcgcaaggcaacctccagccgccaggggccgcagtcgcgctcctcgcggccggaagagagtgcggcccagcgcagcctcggcgtttccgccatgcgcctgcagtgctccgcgcgctcttgacgtccggagcccctggagtaggcgcttccggccattcatactgcagtcggtcagtgttcggttgaaggattctgtgtgctgtcggacccagagggtgacggcgccgctaggatgaagctcgtgaggtgagggagtgaccaagcagctctgggggctgtgaagggagggcttggcccggagtccggaaggctgggctctcccatttgcaggaggcgggaaagccgcgtgtgcgcggcctgctaacggccggccttactgcgcccgcagctcgtgctcgggcctgggcttccgcctgggtcgctcgcggatcccgcgtgtcttccaagagattggtataaaggccgagccttttcttcctgcctagtgacttagaggctttaaagatgcagcgcctcctgggacacatctccctcttacagttactcattttctttttgagtggaactccccagtcctgcttaacagtacttagaaagctgtatgagcttatctggaaacaaacctgtttgcaaaatattttaaatcagagaaggacttccggcttcacaagtttttgtttttttaaataaagatggtgtctcactttgttgaccaggctggtctcgaactcctgggctcaagctttctgcccgcctcgcccttccaaagggctgagattacaggtttgagccaccgtgcccggccgatttttaagtttacctttttatcctccttagatttgtgattgattattccacctctatttccctttaaggtaggctttttatttaggaaaatctcccaatatagggcagaaattatcacaacgtaattgtggctgattactcagataatatatagttctcctgttttatttcttaagaaataaatagaccctgtcagttaggtgagtcttctgaaaacttgtttgctgatgtgaataattctaaactacctgcaagtagatttggttttggtgtttttccttgagactaagcctggaac

SEQ ID NO: 88983 - DNA, 2057 bp, Homo sapiens
ttctcctgcctcagcctcccgagtagctgggactacaggtgcccgccaccatgcccagctaattttttgtattttttagtagagacggggtttcaccatgttagccaggatgatctcgatctcctgacctcgtgatccgcccgccttggcctcccaaactgctggaattataggcgtgagccaccacgcctggcctatttctttttcatggtttataatgagtctaagatcttgtatgtctggatttcaggtttgagaattagaaacgtccaaatgacagtttatgttagtattgttgtgttccttcataaaggttgaggatataattcaggaaagctgaaattgttatgcagattattgataggaattgatgcagatagcatctagcaaattttcaacatcgagttgtttcaccctttcaccttaataaatgtgattttaaagtgttacaggtaaaaatggttttattcctatttatagatttttgatgaaattgagtcatgaaactgtaaccattgaattgaagaacggaacacaggtccatggaacaatcacaggtacggaggttggactgcttttataacattttttttcttctcttttacctagccagagtttatttttttattgcttaatgaacattattgtagtacaaatccttattttttttgtctgaattatgtaattttttttttttttttttaaacagttttgctctgtcacctgggccggagtgcagtggcacgatctcagctcactgcaacatccgccgcctggggtcaagcaattctcctgtctcagcctcccaagtagctgggactacaggtgcctgccaccatgcccgggtaaattttttttttagacggattctcactctgttacccaggctggagtgcagtggcacaatctcaggtcactacaacctctgcctcccgggtccgggttgaagcaattctcctgcctcagcctcccaagtagctggggttatgggtgcgtgccaccacacccagctaattttttatatttttggtagagacggggtttcatcatgttggccaggttggtctcgaactcctgacctcatgatccatcttaacaaaagcagtaacaattcttatatacagagagaagcagaaacaaaggtgaggatagtttggtggaatggggattatgaggaagttacaaagacagtgggagaaacatgaaagaaatacctgtcacatcagtagtgagcctaaagcccagtcagggttcttccatggcttgctgcattcacttctgtaagcaaaacattagtgtgctaggaaaaatctctaggaaggaaacactgctgacattcccccatttaccagttgcacatgtgctaaattgtgtcatagaaaacttgcactttgtagaagaacagtaatcttttgtagtccagtatttactgtggctcagtagattaattagttgccttaacttgtatcatactaataactgcacaattattttcctctttaggtgtggatgtcagcatgaatacacatcttaaagctgtgaaaatgaccctgaagaacagagaacctgtacagctggaaacgctgagtattcgaggaaataacattcggtattttattctaccagacagtttacctctggatacactacttgtggatgttgaacctaaggtgaaatctaagaaaagggaagctggtaagtttgaaggattataaacatttttgtgaatgctaatcctaatccacactattcataatatagatattatttgcaaacaacacaagtgtctttgttgtttaatatttcctatagtatgtatagtaattcttggtgttgctattaaaaacattgagcaaccggacgcagtggctcacgcctataatcccagcactttgggaggccaaggcgggtggatcacgaggtcaggagttcaagaccagcctggccaacatggtgaagcctcatctctactaaaaatataaaacttagctgggcatggtggcgggtgcctgtaatcccagctactcgggaggctgaggcaggagaatcgcttgaac

SEQ ID NO: 88984 - DNA, 1022 bp, Homo sapiens
attgtgatttgatgtaatacatttaaactttcctggttttgaattaacttgcttggattttattcagttaccaaaactctggcatcaaggtgatcatgttttattctgtgatatatatcttccctttttttgtgaggttcaaatcattttatggtgaatttgagacatgatataaagaaaaagtatttttaaatttgacacatttcttagtaaataaattgaaatgaaacaaataataatctccctaggcctttagttattggttctgcatgataatgtgttggggggtggagggaatctgaagtctaacacatttaacagaagctagttaaactttatttactgtagctactaataaagagctataaacagggaaaggtgtgtgtgtaaatgttgtttgtggtgtctaggtaacattggtgcaggagagaattgaacttggtttgtttttcttttccttcagttgcaggaagaggcagaggaagaggaagaggaagaggacgtggccgtggcagaggaagagggggtcctaggcgataatgtctctcaagatttcaaagtcatatgagatttgggatattttttgtacaggttgtgtttgtttatgtcagtttttaataaacataaatgtgggacagagctgtctatttagtatatcaaagttttagtagtttcctccacattcacgaaattaccacagtgagagctaagcatttctactgggcagtttcatttttagttgatcaggttttaagtttttgaactaaaatttttctttttctttttatgatgaataaggttaaaataaaagccttagacaaattaaatttggcagagtttaattgagcaaaggacaattcacaaatcaggtagcccctgaaccataataggctcagaggcttcagcccagctgcatagttgaagatttatggacagaaggaaagtgatgtatggaaaatggaagtgagatacagcaacagccggattagttacagttcagcgtttgccttatttgaatatgg

SEQ ID NO: 88985 - DNA, 1032 bp, Homo sapiens
tgcactccaggctgggtgacagagcaagactctgtctcaaacacacacacacaaaaaaaaaaaactctaggtgattccagcatgcagtcacatctaaaaaccactcttagggtggatttctcttatgtttgacttcataggatacatatataaggaataactatgatttgtcccatttaccacatagttgactgcaagacaaataaatatatgaatataaggaaagaatgaagatgcttgcatgcttttccaggatagaggacttaaacactagtttatatttttcttctccatagttaacataaagtctgtagttagaaatggatgtcttctgtgatacaacaaattaatcactgagtttcctgtttctccccattttagaatgctgcttctaaattacttgggcaaaattgggtccaaaacgcctttgatggcagctgcaactttttccgttggttggaacaccttcgcttgctcagagtcattggaaaaaccactgaactggctactttttaattactatttgacaacctgccttcagtcttcagttaataagtgagtcatctttaaaatctgttgtctccagggccgggcccggtggctcacgcctgtaatcccagcactttgggaggctgaggcggggggatcacgaggtcaggagatcgagaccatcctggccaacatggtgaaaccccgtctctaccaaaaatacaaaaaaattagctggccgtggtgatgtgtgcctgtagtcccagctacttaggaggctgaggcaggagaattgcttgaacccaggaggcggaggttgcagtaagccgagatcgtgccactgcactccagcccgggtgacagagcaagactccgtctcaaaaaaaaaaaaaaaaaactattgtctccaaatgattacatgccccaacagtaaaaaaatttaaagcgtaatactaccaatatatgtatatgtgtttatacactgaataaatttactactgtaccaaaatattatctttgttgtaaatgcatataaataaaaaa

SEQ ID NO: 88986 - DNA, 1777 bp, Homo sapiens
ccggccccctgcgctcctcgcgctgccggccgggggagagcgtggtttccttgcggccgtcgctgtagcctggccggggagcccggaggaagcgggagagtccccgcccacggccccctcccctctgcccgctctccgccgccgcctccgagcagccgcgggccgccctccactccgagcggggggcgcggcggcgacagctgggcagcggctttgggctccgcggggaccgcgccgccgcccccgtgagttattctcacgtcccccggggctcgctgccgcccccgccgacgcctagagtccggcccgggcccaactccctcacgggccccccggcggcagcggcggcggcggcggcggcagcggcggagcccaccgcccgggccccgatgagtaactcccggaataaccgggtgatggtggaaggggttggcgctcgggtagtgcgcggcccggactggaagtgggggaagcaggacggcggcgagggccatgtgggcaccgtccggagcttcgagagccccgaggaggtggtggtagtgtgggacaacggcacagctgccaactaccgctgctccggggcttacgacctccgcatcctggacagcgcgcccaccggtaagccgcggccacctggccagggcttgcgcgcgcggggggaaggggcgagctgcggtgggcgtcggtgtcgcggggagaggtctgcagtgggacacctggtgggcagcgcccggctggagcgagcggaaaggcaaagcgccaaaggaattctaggttccgaacgggtgaacaaacactttcagaaaagaccctctacccccaagggaaatgatggcagcaccatcaccgggatgctttcaagcctggaagacacaaagcaccgggaagagaacagacacaggtcccccaacccgactcctcctcttgggaaggggtctggagaggcctatctaataagccattgaaattaatcagccaccaagtgataactgtctgaagggaggcttgctttgccatatggtgctcagctgaccgtttataattgccaaggggccttggtacctcggatttgtggagatgccttttttttttttttttttaacctcctgtgacacagaattacttggagttcagtagccaaatgttacttgggactctggaatgatttttcatccaaattgttctattttatatctttatatcaatagagagaaaaacatcctgagctcttgaaccatttctttgtgttaaatactttttccaagtggcagatcggcgtgggggacacctgatgttattttttgttacactaacgtccgtctcagtaaggtgatgtcagaatcttactcattcacccagcagtgagtcagggtccttgattagtgaatcttgattagtgaattttaggggtctgttattgacgctagagtttctaaatgattaaaccaaaggcttgctttcacaaaataaataacaaattcattttcatatagattcatctttggtattatttatccttgatatttatccttgattctgtagaaaatagttcacatttaaaattgggtacttttcagaattcctaaatgagctacttctaagacattgagtttggcaaagccttacaaatcttggaatgggctcacagttattatcagtagcaataaagaaattaacacaagccaactcagtttttgaacagataattcgtaaaattgtgttccttagctggctttttaaaaacatttattaaaaaaaatttttgttttagagacag

SEQ ID NO: 88987 - DNA, 1058 bp, Homo sapiens
aaaattaacactaatacggtaatactgtattaactaatctatacaccttattcaaattttatttattcaaattatatgcagtggttattattagtgtcctactagtattctttttctcatccaagatcacacgttgcatttagtggtctcttccaatctgggtgagttcctcagtctttagtcagtgtcaaagtaatgaaaaacaatcttgttatctctcaaattgggtgtttctgctgctttttcatgattaaattcagattatgtattttcggcaagaatatcatagaaatgatgttttgcccttgttagtgcatcgtaccaggaggtacatggtgttcgtatgtctcattaattatagcgttaactcggctaggtcaccaggaattttaccaactgttgcttttgtaccagcaatgtgatgccagtatgaaaaagataacttgtatcttacatattattgtgaaaatacttttgacttcatgaagtccctcaaagggtcttgaggatttccctagaggttgaagaataacactttaaaagtcactgccctggagagaatctctatttgagcacatagaagcttgtataagaatgttcacagcagttactatggttttgagataaataaaatttaaaaaagaatgttcacagcagtgttgcatgtaaaaacagaaaattggaaaaaacttaaatgtaccttagcaggagactggataagttgtatgaatttgtatagtgcagtactgtatagaagagaatgttaagcaaataaagtaagttgcaaaagaaaacctacggtctgttaaagtgcggaacaaaactattttagggtagggttttgcagccttggcactattgacattttgaattggataggataattttttgttataggaatgtcctgtgcattgtaggcaggcatccctggcctctacccattagcagcagtagcaccccacctccttgtggcaacccacaatatctccagacattgccagatgtcccctagtgggggcaaaattgctcccaattgagactcattggtttagggatat

SEQ ID NO: 88988 - DNA, 1092 bp, Homo sapiens
ctgggagacggaggttgcagtgagccgagatcatgccaccgctctccagcctgggctacagagtgagactctgtctcaaaaaaaaaaaaaaaaaaaaaaaaaaaaagacagtctttttttttttttttgggacagggtcttactctgtctcccaggctggagtgcagttgtgcgatctcggctcactgcaacctccgcctccctggttcaagcaattctcctgcctcagcctccaaagttgctggaattacaggctcatgccaccacgcccggctgcttttttgtgtttttagtagagacagggtttcaccatgttgaccaggctagtctcaaactcctgacctcaagcgatccacccacctgggcctcccaaagtgctgggattacagatgtgagccaccacacccggccagtcttttaacattttaaaatatgtctgagatttatttgaatattgaaataggatttaataacttatactctaaatccagtagagtgcatgggggaacatgatgccctagatacgtaattattctttaaataagatccatgctaggtgcggaagaaaaaccacaaaaaaccgtggtagagtgaatgaagtgctttaagaggccatgttttgtgatcagacccagttgggtttgaatttgaacctgccacttactaatgttgtgtgacttcaggcaggttacttgtctgagactcagtttcttcatccataaaatggggataacaattgcttactttttagaattgttgggaaggttaaataaaatgtgtgtaaagaaccaagcttggtactaatagatagtggctggtattattaataacaacaatcctattttcattaatttagtatttctctagagaaaggaatgtggactttaccaaccagctggcaggtcacaaaggccttgccctcactgggaattttaattagagttgaggcaatttctaaaccagttaaatattttgatggttcagggaaaataagatggatattcttgttggttaaccctccttagtctctgtaatactttttgttacatttgatttgcggttaaagttgaatgaatccataaattagaattt

SEQ ID NO: 88989 - DNA, 1022 bp, Homo sapiens
ataccctgaaatgcttagactaggatcatatgtggagtccattacattttaacttttgtggccttgggcacattacttctttgagactcagtttcctcatttataaagtggataatatagcggtaactttctcttaaggagtgtaacacactttactcctatgcaagtgcttttacatattatataataaaagcttagtaaaagttagctgtgattattattacagctactactgccatcatcatcatcacctgtggaatataaaaggtattcctgtatcatgctattatggtagtaaccagaacaatgaagaatctttttactttcaaaataacatttttataattttgttttaaaaagtaaattattgttacctatttttatataaacttgaaaataaataattttatttttagggttctgttagagtctcgtaggaaatctaagaagattacagccagaggaatctttgcaggtgccagagtggtgcgaggagtggactggcagtgggaagatcaagatggaggaaatggacgtaggggaaaggtacagtgtttctctgaattcattatgtattctagagtattatatgttcagaacctttttattactactataaatgaatttcttggtccattgttttccatgccagtaacagtttttaaaatcttgatttcttttttctctggaagtaaaaagattgttcttgctttttgtaagcattgatgttccttagagggtcattaggtaggttttaccttcccaccttcaggtttcatattgtcattttgttacctagcatgcttttctgaacgcatttgggccagtccctccctaagcagtatctcatgtcctcaactttcctgctatttaaatttcatttgaattgacttgttttatattctcttccctcaaagacctgtttctgaggcacagtgggcaattatgctgttatcgagcccacctacctctgttatcctttgcagatagcatagcgggctcagagttttaggagtaggtca

SEQ ID NO: 88990 - DNA, 1052 bp, Homo sapiens
tgtgtattttctattgtatcatataaaggggcacataaagtctgattattctgctattagtgatgttaagattgatgaacaggtgcaaattttgtcagatgtatcctttacagagtttcttggcaacattatacctaatggttttaacagctgttccttacatgtgaaattactgtagttattttcttatgccctccactttgtttcctcctcaataataaatcaagtcatattaacaaatgaaggaatttcatttaatgatttggagcttgactaatgaacttacttctatttcaagtaatttgaaatttaaagtaaatttgatttaaaatttgtctttgttttttagctagccaaatgcttttttactcatcctataaaatacagacttaatatagcatcacattttttaaaacaaatgaagttgaatctgaatatattagaatcagaaggaactttttgctacagattgcatgttttaccttcgagtgctagaaactgttactttagaaggttatgtagtggttagttgagcaggaatcataaagcaaattaaggtaaatggtggactcttaacttcaggatggtagttacctctaatggaaggcaggaggatgggattgatgagatggacataggggacttgaaaagtactggttctattttttttcttaggttgggtaataattacatgggtgttcagtttatttttttattccttaaagtttacatatgctttgggaggctgaggtaggcagatcacaagatcaggagtttgagaccagcctggccaacatggcgaaaccccatctctacttaaaaaaaaaaacgaaaattagccgggcatggtggtgggcacctgtaatcccagctacttgggaggctgaggcaggagaaccacttgaaccggggaggcggaggttgcagtgagccgagatcgtgccattgcactccagcctgggtgacaagagcaaaaaaaaaaatttacatatgctgtattttataatgtgtaatgtatttcaaaatttaaaagagtaaatggactaaattac

SEQ ID NO: 88991 - DNA, 1027 bp, Homo sapiens
atgtgtttttcaaactattataattatttattaattataagcattttagtctaatgtaataagattcagacattttattttatttatttattttttgagacagagtctccttgctctgttgcccgggctggagtgcagtggcgtgacctcagctcactgcaacctctgcctcccgggttcaagcgattctcctgcctccacctcctgagcatctgggattacaggtgtccagcagcacacatggctaattttttttgtatttttagtggagacggggtttcaccatgttggccaggctggttttgaactcctgacctcaagtgatccgcccatcttggcctcccaaagtcctaggattacaggcgtgagccaacgtgtacagccagattcagacattctaattttgagctttaaaagaatgctgaaagtaaataaaatatgacctatctgaagatcaggtttctagtttttacaagtacttttgaaagcagtgtttagtgtgattgttgacctagactgttcttgatttctgttttgggtatgttctgaatgaatattcttgcctgtttcagatactgagccatatttgaagtttcatgggtgatttttctggtttcttttcttcttagtctgatctgaaatgtgtccaggatgccaagggaggttctttctacagagatcactgccctgtgctaggtgagtgagaagattagagagtattactaaataatgggtcagagttcgtggaatcagtaaaatgcttaaattggatgttagaaaagttaattaccactaaagttacttagagaaaaaattttttggctttcctttggtcttaaagtattttttcttttattatgctttatttggactcagagttgtcatgtcttgagaattcattggccatttatgtcataatatacatttgaaacttttatgttttaactgcaaattatattgttgaaaaattttgcattagattacaacaattgtatgttatacactattgagaataggatttgacact

SEQ ID NO: 88992 - DNA, 1024 bp, Homo sapiens
ttgacatattttaaaaagctctttagggcaagaatcacaggaaccatttgttaaaataagatagtactaagcacttaatggaaaaaataattccagggctttcattcatattctctagttagttattgtggttctaatgcagtgatagtaagttatccaggcataaaagtgagtattttcaacacctggaactttgtgttctgatacaaggttgaatagtcttttatagactctacttttactcagtctttgttataactcatattatttcaatttttgagtctgtttggcttttttctttttttaaaaaaagctttctagttctaaaattttatacttatagggaattctcaagaccttttaaaactagatggtacctgaaactaaaatatctacatgttatttaaagataatgcagctgcctgttgttgtgaggtttttttctccctttattcaattgcctctgaaattacaggtgagcagaatggcaacaggaatcctggtggattgcagattggtgacctggtaaatatagatctcgacctcgaaattgtacagtctttgcagcatggtcatggaggatggactgatggaatgtttgagactttaactacaactggaactgtttgtggcattgatgaagatcatgacattgtagtacagtatccaagtggcaataggtgggtgatatctctcaatttttgacaatgacaaataaaactaatatagagaaaagtcttagagaaagcaaataaagtgatacaaccaaatactcattaaagctagcttttagatggtaagtaaaaatccagaatatatattggtaaggtggagagaaacaaatgataagaattacgtgtgtgtgtgtgtgtgtgtgtgtgtgtgtcttgtgtgtgtatgtgaatttatatgaggatgtttatgatacagtgttctgtacactatttttccttcaagaggagaatacattatatcactattaggtctgaatacagcttaaaagttctgtgttcgtattggacta

SEQ ID NO: 88993 - DNA, 1025 bp, Homo sapiens
caggagttcgagaacaggctggccaacgtagcgaaaccctgcctctactaaaaatacaaaaattagctgagcgttgtggtgcatgcctgtaatcccagctacttgggagactgaggcaggagaattgcttgaacctgggtaacagagtgagactctgtatcaaaaaaagaaaaaataaagcaaacaaagaacagtttacttgtgtggttacagaaagttagtaaacaggcttttatatgctaataaccatttggactaaggagaagaggatataatatgccaatattgtagaaacttacttgacaagggaacctttactcttggagttcagtgtggaattagggtaggtgttctgttatcaattgtggtacatctatttgatggaatattaagtagtcattaaaacgattattttgaagatgatagcagcgtggaaaatgcctgtataaagacatcagcattcaaattagtttgctacaatgattacaattatggtaaatatccatgcatggaaaattaaaactagataatatttttatccattaaattggcaatggtgtggggaaatggtacactcattgtacagcagtttggctctattggaattgtaaacaaatgtatgctttgatcagatagttcttttaagaatctctactgaaataccgacctcatgtgcacaaagatgtatacgcaggaatggtctttacagtactgtacatattggtgacaatttggaagcactttaaatgctagtcaataggagaatagttaagtacattagtgtatatccaagtgatggaatactctgtagcagttaaattgaattaaggtctattcaatttaggtctgtattcttagacctatttaagataggtctgtatctgtgacactaaaaaataaatcttccaagatgcattctttgaaaaaaaagtcacaaaatatatgtatgtgtccctatgtctgcgtatacatatatatgtatataatattcccatttatggaaaacaactagattatgaatgtca

SEQ ID NO: 88994 - DNA, 1002 bp, Homo sapiens
gacaaaggaaggagaaggtccagataaaatttagaagggatcatggttaaattcccatacacagttattattgaaaaaagggaataaggaatagaacttctctacagatagtgaaagtatatcaggccagacgtggtggctcatgtctgtaatcccagtgctttgggaggccaagatgggtggattgcttgagccaaggagttgagaccagcctgaacaacgtggtgaaactctgtttctactaaaaatacaaaaattagccaggtgtggtggtgtgtgcctgtaatcccaggtacttgggagactgaagtgagaggatctcttgagcccaggaggttgaggctacagtgagcagagatcacacttattgcactccagcctgggcaacagagtgagaccctgtctcaaaaaaaaaaaaaaaaaaaaaaaaaaaaaaaggcatatcagaaagatacgtgcagaaaaatgatgaaaactgtacttttataatttaaaatgagctaaaaggctgggcacagtagtgtgtacctgtagtcccagctactcaggaggctgaggcaggaggatcacttgacttcaagagctctgggtgtagtgtggatgtctgcactaagttcggcaaggatgtgacctcctgggtgaaccccaggttgcctgtggcgtggggaactggcccaaaatcaaaaacagagcaggtcaaaactctcgtgctgatcagtaatgggatcatgcctgtgaatagccactgcactttagcctgggctaatgtagtgagactgactcttaaaaaaaattgcaaaaaaacgaaaaatgagctaaaagaaattaagaaaatgaaaaaagtgtaagagaatgaaatcagaaattaggtgatataacttaggacataattaaaaagaagtgaaaaagtcattttataagtgaagactaagctggaaggaacacagagcagagcaaataaatgcaagagataatggctaagagaaatagaaggtgaaaaag

SEQ ID NO: 88995 - DNA, 1040 bp, Homo sapiens
atcatccttagcaaacaaacacagaacagaaaaccaaacaccacatgttctcactcataagtgggagttgagcaatgagaacatgtggacacagggaggggaacatcacatactggggcctgtcagggtggggggcaaggggagggagagcattaggacaaatatctaatataatgcatgcggggcctaaaacctagatgatgggttgataggtgcagcagaccaccatggcacatgtatagctatgtaacaaacctgcactttctgcacatgtatcccagaacttaaagtaaaattaaaacaaaacaaaaaaatgtcccaaacaaaagctcctatttcctagctgtattcatgaaaatgcctccactgtgaccattttagtaataaccaaacttagtgcccaggttatggttttcaagcagcctttctcaataaagagccaaggctttttggagaaatggctaattctgactctttgacaagaggtgaacaaaatgagcctcgtaccaggtaacaaggaagctgtcactggtttctaggaccatgttaaaaggacctaggagccaacttgaaggggttcttgctgactatatacagagggctgacgagttattaaaactacaccaattagtaaaattcaaatggtaagaaactttgtaagataaagaactgttttttcaacaaataatttgcaaagaaaaacatgtacttgtggactttatgtggatcttgatttaaacaaacaaaaaattgattatgtggatcttgatttaaacaaacaaaaaattgataatttatgaggtaattggaagtttgaacactggaattttgtgatatgtaactattgtaactttgggtgagttgataataaatagcattgtagaatatgttatcaaaaaaagagttcttattgtttggaggtacatactgaaataatactggaggagagaatgggtaggggaataaaggaaacaagattagccatgagctgataattgttacaaatggttgatgggtacatgaggattcagtatgctgtt

SEQ ID NO: 88996 - DNA, 1051 bp, Homo sapiens
aaatcagatgattccaaaaagggtttaaacatagatgtaagcttgagcccttcttggccaaattagtttatttttttattttttgttttttttagaaatccaattttctttttcaggctatattgatgatagattttagactacttgagttgcaagttctcaaaatgtaccttacagatttcagaagtaaggattgaacatcaaaatagatgtttatgaactcgtatgaataggatagactttatcatgatttgtctcatattcttgtggaagtagttttattattattttaaaagatattttttaacatttgtacttattcaaataacccatttcagtatggttatcctttgaaagttttttcattagtaataagtaaaatcattactttaagcatataaaaactagtgattgactttatggtatatactttagacttggaaacatgaatctatttttttccccaagactttaggtaaagttggccgagtacaacagatttattcagacagtgatttaaaggtggaagtttgtggaacatcttggacatacaatccagcagcagtttccaaggtggcatctgcaggatcagccattagcaatgcatctggtggtatgttttatattgtgtttctttaagagtaatgtggtttacattaaaacctttgctaattccccagttctcatatacagataatgttgtacatgtgcttggctttgtcccagattacacagccttacttgaatgttgaccaccttttaaactttcactaaaaatttttgttttttataatgtgttgaacaacctttattctggctgaagtactccctggagaagttccataaaatgtgtgctttttcttgggcatatcaggggattttccacatcaaatttgagattcctaaaattcagaattctactctttagtcagaacttttgttttctgccaaagaaccatcactttcttagacttctttattttttctgtatttccaacattattgctagcagatggctttccttcctgtatatttttacatatcagttatt

SEQ ID NO: 88997 - DNA, 1047 bp, Homo sapiens
agagattgttgcttttgatcataaccattaatctgttgaattattttaaagtctgtagtattgagctctgagagtcactgtagtgtccttaaaacctgaaaggaagtttgtatcattgtggtactcccatggtagtgtgtttattcataaacttcttatgatgacttttaaatcttgaattattattagtatataatgcactactttttctaaaattataatttgatatacatgaattggagaaaacttggaatacttaagggcttgcatttaatacagctttttatagtagtgattataacttgcatgggtagaaaaataacattaatgatggaaagaataaaataggaaaagattatagaaatattgggtaatacttgtttcttagtagttaaggtttgagatcctcctatattagcagctttatttgatgctttacagaaagactctcacaactcctgaagaaattatttgaaacccaagaatctggtgacctcaatgaagaattagttaaggctgctgccaatggagatgttgctaaagtggaagatttgcttaaaagaccagatgtggatgtgagcattttaaaaattattttgaagcatacaaaaagtagaatagtataatgaaccttatcctcaacaattactaagattttgccagatgtgcttcatttatttcttctttcttgtttttgtgaagtattttaaagcagacatcagacattcttcagtgtgcatttctaaaaaaaccagacatttttgtatttaacattatgaccttttttatgatttacacacttacattttggtttttaaagactagtatccttttgggaaattcagcgattttttttttcctcatgtaaacatcattttatgacatcttctaagtatattttagtgaattttataagcaattttctttttatttttaatttttgtgagtacatagcagatgtgtatataagcaattttcaatccttcttttcaaaatatttaatgtaactcctctccaccccagtgatagttgactatttcacaattt

SEQ ID NO: 88998 - DNA, 1097 bp, Homo sapiens
tatataactaccttgctaacttatttatatatccttatttattgtccttgcagtttgcctgcaagttgatgtttggtatttttgttgaattgaatttatttatccctagcagctaatatcttttctaaaagttttcttttcacttcagtgctttttttcattgaaccatggactcagagattaatctaaaaagaaatatatatacaaaaccaacttaacttacttcctttctttctcccttctttcaactttgcagattgcctaacagttatttcgtaactctttggacaatgaaacttttgttttttaaaacaatgcttgcttcccttctcaaaattaagaagtctgtagttatctgaactatgatatatggaacaccaacctaaattattctcgtggaatcatacagtatactagacttaaacctacaccgtatgtatatattgcctgtttctgattattcattcattctttcattcttttttttaaaaaatgtaggtaaatgggcaatgtgctggccacacagctatgcaagctgctagtcagaatggacatgttgacattttgaagttacttttgaagcaaaacgtggatgtcgaagcagaggtaagtaaacttgaaaaatattttaagtaaacatttatttcctagaaataatacttctatatcatgagatggattgtttttatttttgaaatttagtatccaactaaggcttttctgattgaaaataaaaatctgacagaggcaacttgaaacagttcttgtctttctgtgatcctttatattttagccatagtcctaggtaaagataggagttgagtttcatattactgtggtgtaaccatcatgttttaggagctaaaggtgggcttgtccaagaatcaagaatcatactagggaaattgaaggacgaggaatataaatccactgggtcagaatctttcctgatctctgtgacagttggaaactttttttgttgttgttttgtcataactgaattagcattttttaagttttattgtttcttgaccttaatgtgaatatttgaagagttcataatgcatgtttatcaccatatgtgtgtatatatgctt

SEQ ID NO: 88999 - DNA, 1575 bp, Homo sapiens
aatcttatagaggttagctgtaaccttgttccttgaaattctcttttggcactaggaacaggacaggcacatgagctgtgttttaggtttatttggagtatttaagatggattcagaagaaagcaacaaaacttacaagttaagattttattataactgcagttttctaatttagaagagaaacctggaagtaaatttaattatatttaattgtaattttctagtgtgcgtgtgtattttccataatttaaaaattattcttatttatttccttttgacaaacatatcagtttttaattctttggtgtttatttttatgtaaattattgacagcctgcattaagtgtttcagtagtgattttctaacaaccatacagtgttagtggcctgatgttcccttttttaatggaaggtgaatcacaaaatagggttaaaaactgtaacagaaaaaaaaaaaaagactggaagttaggaagattttaactctaagattctgaattatatctgttactagagagattaacttagagagattaacttatgtatacatgcatatatatcttatttttgttttgttttttaaaacacttgtttttctgggatgtttgaatataatgctactcagaggcacaagagttgagagaggtgccaaatcctaaccacaagacccccagggaaaaggcacaagagttgaatcttaaatcttagatgtggttgtttgccagttcctttctcaaaattgatacgtaacaaaaactgattcagctggaaatatcagtaaggtagaaatatccctgagttgtaggtccctactgttgtggattcctacatgagtgcttttacctttaatacctgtttgagaaaatacgcaaagaccaaaaactactttgagttctgtaactgttttgaatgaactatttaagtgcatttaatcataacagtgtttatctgtgctttctttgaaagtagttcagataatcctgggtgccatatggattgtcagaccccttgcaaaactagggagtccaccaggggctggcacagtggtattgggaatcggaaaccactgctttggatggaggaagtcttagagtaccaggatcagggacagacacatggtcttggtgggtgttaaaatttgcaatgcagtattggaataaatgcaatacgcttatacctactacccttttccatctgcttctggcaaggcagtgagacttcttttcatactttttggtataagctatgtatactaccttcatggcgcagtgcaggcagtttttcccctttataaagtaccttcttttagttttaaaaaatttaagcaatttggtctttcctgccttctcatttcttcagaaatatgcctgttacaggaggtgaggcaaatctatttgattcttctgaaatagttttggaatttttgatatatggaattttggtagtttatgcttcgtttttatcttttaatggtgtatttaattttttttctgttctcgaatatacagaaaaatgtatgctcatcacttaaccagttttaatgtgttgataaattgctccccattaaagccagtt

SEQ ID NO: 89000 - DNA, 1072 bp, Homo sapiens
ggtattgctaggatcctattaaagggaaacattaagttctatggtaagcattcctttgttaccgttctcatatgtcatagtaaatgataccaaaggcgtaagatgttacaaaattggcagctatttcttttttaaaaagttgtttttttttagggaaaatgccaatagattgggttttgattgggcagggagaatgaggacttctttgtaaaaatatcagcttatgaatggatttaactttattgatcatgacagtgagctcaacagcttaaagaagtgtaataggctatatttcataatagttacttcataactatttaaattattttaattgtagcttttattgtagcttagggactttgaatagtcgttagtgtaatcttcggagatttctgttttggaaaatgtataggattttagagttgatttacagtaggatctaatttttgaagcaatgattgcctaagaaatgattatccccagctacagttttataaccagataaattaaaccacaaatatatagaaaatgtagtctgtgtccattttctgcttagtttggttactaagcaacttgtcttttgtgcacctgtttgattaaagtttctatacttagtaattttgtagctcctgaatctaatttgccaacttttaggttccttaaccgaataggcttgaaacaacatattatttttaaataaaagtgttccctgaaatactatttgaatatgtaaaacataatttgtttccattggaaactcaataatgattttttaaaaagtagggcagtggttagaatcataagctgcttgtagtttagataatttacagcatccaggaattggttgctggattggatagatctcagagaagaaataaagaacagtagtagtgggaatgagggcttgagaagaactgaaagaatagattttgttcagctagataattattagaaattaaggtttttgaagtgcagctgttttggaactgttgggatctagagtatgtccttgtaagtgggaggcaggattggaggatgagggaagaattgggggggtgttaatctgtaagga

SEQ ID NO: 89001 - DNA, 1049 bp, Homo sapiens
cactttacatcaccttttctgtattatggtctgtctgtgaagcaagaccaaaacacatgggcagtgaatgtgtcaatacctcattcctcttgctgcttcattgcttagagttatctttgctctctcaccaattcttagcttccaactagttttaaaattttactcattctaccaatccttccaacccattccattctgttcccactgttgctgacccaattaagtactcaccacatttacctagactattatactattcttctaatttttttctttgatttcagtctttttcttgatttaaattttatacatttacaaattatccattctgaaagcataggtctaaatggctctcttcccctgtttcccaacttcagtttttgtctgttaacatagaatacaatctacacactttggcttggcattcagacccatattctgtgtgtcctgagtctgtttaactttatctcctgctaatccaatccctcagcccgctttgcccatcgtctattctcctttcctaaaatatgctgtctgctttcttcttctattttttggagcattttctttctttgggatgccccatcccgcttctttatcttaaccgtctttcttccagagctacctcctgtgtcatcactggaattattttgtttgctctatacttccttgttctgtgtgtgttttttttgttttttttgtttttttttttttgaggcagagtcttgctctgtcacccaggctggagtgcagtggcacaatctcggctcactgcaagctctgcctcctgggttcacgccattctcctgcctcagcctcccgagtagctgggactacaggctcccaccaccatgcccggctaattttttttgtattttttagtagagacggggtttcacgacgttagccaggatggtctcgatctcctgacctcgtgatccgcctgtctcggcctcccaaagtgctgggattacaggcgtgagccaccgcgcccttcctctgtgttcttatttattatacttactatatactctgcttagtgctgttta

SEQ ID NO: 89002 - DNA, 1035 bp, Homo sapiens
gttgtgatgctttttttactttttaaattctgaaatatggtctgtaaacaagactatgttggctatttgaagatttgataagctgtactgtattttggtgtttaatgctttccttacaactgtaaacatgctgagtgctatctacaaaatatagctgagtctattcggtaataggatacttagagtgtgttttctctaatgtatgctcatgcatctactctcaaacaccatattccttgtaatacacaaatgtactttctgtgactgaggtgtaattaataggaggaagaagatcttgaatgaagtgataagatatatatttatatatgtctccttttgcccacagtcttttagagaatgatgttcattttgaaatggaggagtggtcaggagttgagaatgtgtgaacatctgggtctttaaactactcttgtcttcagtaatcttcattaattgctgaaatgtttgtctctattaaataatattaaattatctatagttttattgcaatcattaagaaaattatacggatgttagagtaattgtcactttttttctttacttcagtttatccccactgaaggagaatattgtgtgtatattttttataagggacaaagaagacagtgaggagagtcatagtatttattgttagcagagttcttcattttacagctgtgaaaacaaatatggagaggtgaaatatttcatgagtaaaagtagtgatgcttagcattttctttcttttttgaagactaaaaacctttgattcagggtcagaagaactagataactgttttaagcctctccacaagatattctacagttatcatctttttcaccttacctgctaacattcaggtaaatagcggtaaaattaaaggccaatactatggaagatagtgactaaacatttctagagtgttatataatgttacagttttctttaatttaaatatgcacacatccatgtaaaccacactgtacaatcccattatgtgttcaggtgggttttaggtgacctttccagatatt

SEQ ID NO: 89003 - DNA, 1602 bp, Homo sapiens
agtttggaatccaaaacagttaaatgcttttcattggtaaaattacagtcatggaccttctacaagtgttagaaattatcataccaatgcttcagtcactgaatgtcaaattttccattttgaagtcactttcctactgttttcctgcgcttaatggtttaaaaatcttttccttttaacacattactgcattaaggaatgatcaatgtacgtctttgttttcaacatctttgcttctttttctttttctaatcttgtccacagccgaagtctttgcttaattcttacatgtagacaataagctatttcaaaaccaatagtatttaaaggaacaaatagaccttgatgtattttagagtaatgttttccatttatctctaggcagcaaaccagataaatagttaagctaaaaggttggggaagagttcagttagtcacccccttctactgccactgcttcttttagcattatagttgagggctaatagcaaattgttgatgggtgtaggaatatcagtggccttaagaaagtacctctgccctttgatttataaatagatcacatgtgtattcagtgtattgcttggacttgtgtcgaaaggaactaccatgcatgccagtttttctttgtttttgcttacgtggtgttactaatcatagcttagtaatttaacccttttaaaggtctatttccttgactaagttctttgtcattttgggtacagattgccaagttacttctcattatcgccttagtaatacatggtggttagttacaatccatggatacaagtattaaaatctattgtgtggataatacttgaaaaatcagagtaaatttttgttataatgtggttttactgttgatttcaatgtcttgagaggggtgtcttcttgcataaaataaaagtttgataaattataatttgcctataaagttaagtgctctcagagaaatatagagtagagaaatattctttacagttactattttaaactgagaggtcaacgctaattcaggcagtatgcaaatgactcttacactaagtatattctgcgtctgttggttggtaagtatcatactgctggtgaaattaactacaattctttttcatcattttttctagtagaagtgaaacaggtgttaaactgcctaaacttaagtgctgaagatagcaataatactggcttctatttttactagttatatgggagctgtttagcagatccagttgctcaagtgtgtttttggatggcagttcagtttcatatactggccatatcggggcaaggagaggccatgggaaaaaaatagtacagcatttgataatgtcagcatctgttatccctgtcagggagacagttgaaatgtttgagttataccagtgtcagcagatgcccagagtttaatatgtactcagttaaaaatgaacagctgatctaagtgatagatgtgacattttagagtgattgaaaatactcttagataagttaaactcgcaagcaccagaatcagcatataattttacttttaaaaatgaatagcctgtcattttattttctaaggattatttatatagtcttaatattatagcaaagaga

SEQ ID NO: 89004 - DNA, 1035 bp, Homo sapiens
ctaactttgtcattagtagcttaaaacaggtactgcttataaattttgctaagagcattatttggaattttttataaataatatacaaactgtgtgaaataaaagtattttgatatttctaaacaatggattgatcaagtttagagaaattgaattgtaattgcatagtacaataaaaacagttcttcgatctgtataaattggttcttgactatagtgctttcattttacatgccctctttggagaaagcaaattcgaagataatacagataaattaatttcttttaaatatttggtagtctgttaccaatataccctgctgacttacagctgtggaccagaattttgtcatttttcatgcttaaatcttacattttaattaattttaagttttaacttcacatttaaagtagagatttgggttaagaccctgataaacttgagaaggaaggacaagggccactatgtttgtagctgtcaaaaaagaaagcctttttaaaacaacaaaacttttggtcagaaattcctctaatattaattatacatttatcaaaatgagaagaaatagcttattatgtgaatgaagccagctcttagtatcttatttttctgtacaaatcagtgagccctactaatgagatatacttaagattaaattgtggagacagaaaataggtcatgtgtattcctcattcttttgtgctagtaatactattttcccttttgcagtcaaattttaataatgagagtgcctaatttaaaaatgtaagatgtctgttttaaacttagatgatttaaaaggagtttcatgataattgaaatctacttcactggatcttcttttccttcatgaaataaaaaccttagggatagtttctatctatcagtagtagataaccttttttttttggtgttagtattgccaaaggtcatctgttcatgactaggttaatttaccatatgacggtcattcacgtagaaagaagcaagagcttcttttagctcagtttaattctcccttggtggtttattgc

SEQ ID NO: 89005 - DNA, 1027 bp, Homo sapiens
tgaaaggttttagtctgtgagcacctgggttttatttaccttgatagtttagaatgaaaagaaattatagttggtaagtagccttcagttattgtggtattagaaggttaatttaaaacctcaagaaattttcagatttgtcaaaggaggaaaaaaaagggcagggatagtagaatttctgcagcttgtgataaaaagctagtgcagcttatagagagcaaatcagaatgtagcagtagatagcccagcactacagcagtttcagcaatgcagcattagaattacaccatgcacgttctgatttatttttgtggccaattattagtaagcattaaaaagtattttatgatctgccaagtttcttggttgactaaaccttgaaatagaagctaatagttttagaaaataagtatactttggaagcaggatgtgacttactagagatgcaaaatcatcacttaatctgaaacaataatgactaaatctttaataatgtaaatgacaataatgtatttgtacatttttaagataaaaagttactgccatagtatctgaacaatattcctttttacactacattagctcttaacttgaattgtgaaattaggctatggttagatagaatttaatttaacaatgagaacatatattgagtcaataataggtaagcatgcagaaagtcataagcatccttaaaagtacaggccttatggtgctctgttacctgtaagcttagtgtcatgcagcatttgcagcaggaagaaaggtagtaacctagagaatcacatcaacagcagccatctcatcttgattgttcgttcactctatttgctgattcagcatttcttttcatgagcccggtgaaggaaggggatgtatcagtgaacacagaacctcaccttttaagataaatttgaaaaacaaacgagcaaacaaaaaacaagcttacttttccctctcctcccctcttccctttaccaaaaacaaaaacaaaaacaaaaaccaccaacaaaaacaactctaaaat

SEQ ID NO: 89006 - DNA, 4210 bp, Homo sapiens
ggttgctacaaaggccaagaaaatgaacctagcttgtcagatgaaatgcttcagaagaggggaaaaagttgcagaagttaattttatagtctaaaaaagacaaaaaaaaaaaaaaacaaaaacagaacccaaaacacaccttactccccccaaataactgtaaacattcaccctgtttttctttgccctccagaatacattgggttcttctgacttcttaggaaatagtctgcatctttcttgcttttagattttttttttttttttttttggtttttagtttccaggattaaatagtagagctgtagtgaagctaccttgtcacatccagaggtcaagtctgcaagcgaggtcaggacttccacatggtcactacgaggctaacttatattcttcctcagtgaccactggctaaactgttacagctttataggcagctaagcatttgaaacatgcactcccaggcaaacaggctctcttgtgcctctctcttccctgaccatatttagtcaaccatagcaaaaaatagcctctcagctgtcgattgtcgatccaaaagctgaggaagcctcaatcttgctttctgcctattgattgttcatcctgcggtccaaacactgcttagccatttgtcctgccccccacttttttttttttgagggggggtaagcactgccaaataaagcggtctctcatgtttccacttacatttcccagattttcactgagcttgcgctgagactaggaaagcctgatgcactgtcactatacttagaagcactgcagagaaaaaaggaaagaggaaaaaaattaccatggctagtagcaagacaatctttagacagttatggaacaagtgaagtccctctgctgccaaaatacattttataacctgattttttgattgataaaaaatgttatggatggtgatatgttacatatctaaaggcctgaaaggattttgtagggttatctttagagctagttgttgccatatacatgcttttaaagtttattgaatggaaaatgtatagaaatggtaggtaagacctgtatattggtggtggagagacatcatcaagggagaagaaagtagtatgtaaatgaaatcttagaagtgctacttaaaacaattcactgtcaatttcagttaattttttttataatgctttggtaaaaaacagggtccagtatgcttttgagtaattatacaagtattcagatgcattttattatgaattctactttatattcaaatgtgtagtgtttttgctgtcccttctacattgtcatgtttctctaattttctgaagtgacttttaggcatgatcattgcacactttacacagattgaaatagtcattaacctgtctataactctattacatagtatgtgactcagaggtaaaaatacttttgttttaaattttaatagcatattcacaatagattttgatactgaaatttttttaatcaaagagaaaaaatattaaaacatgaagtccagtaaacctgtggagatatagtttaagatctcacataaaaatgcagaagagaaaccagctataccttgttttttaatccaaatatgtcctcttaagaaacaagaaaaactattacgagttttctgagcttactcacctacggaagtttgtccttcacattcttgttgtctttagcatttaatatcatagcagtttaattattttgaatgtctgttttaaaacagtggcataaggaatacttctttagatattgggcaattttaaacagctttcctagatattgaaataattttactcatattatgagaagatgacatgtctcagagtataaagtaggttaattttcagttttctcaagtaccccattttgttaatgattttgtagcagtgaaagtacttattttttaagcaaacacttacataatgtgttatgtgccaggttctctttctaagccctttataaatattaactcatttaattttcataacaaccctataaagtaggatttgtgattcttctcacattttacagatgaggaaactgaggcacagaagttaagtaatctgctgaagtcactagccattgtggctagagccagaatttgaactcagataatttggtttcagactgggagctcttcaccactatgccacattgctcctcagatttgtgataatgaaatgagttaggaaattattcctcttgggaacaaaaccatgcatcaaatatatattgccaatatctttgcctcagtatattcagaaagatgattatttgattatttgtttattcatttcttccattcaacaaaactttgagttccctatactaggtatacaaagtatacctttttgatcaaaatgtgttcagttttatagtaacctgcttttagcatgcccaaaagaactactggcagttgatcagttttcttaataaattcctttttgaattcttgactaatctacattaccgatttgagggattgtttattaatttaccaagcatttattgaacacctaatatgtgctacagtgctattctaatgttgttttgccttaagtagtactaacatgtaaggcctccacagtttagctagtagggtttgggaaaatgttgcctgcctctgaagaaagattgcaaagcatggcaggccctaaaaattgacccagtgccacttgaatactgcataccagtgtagacagctgcttgtcccctctgcttctttataactcatttgttcatcattcagcaaacgtttgaatactatcatgtgccagggattatggtaggcactgctattagttgttctggaacttaatgcttctttggcactattcacaaatgcctgcttaactggtagtaagatcttatctttaaaacatccatgtccttaacctcttggaaaacaaccaaattgagcattagggaaaatatctctaaatctcatatactatgctccacaggtgagacagtctattggcttaacaaaattactgaattctcgagctggtaacacctttttcccagtaactctacggacctcagtgcttgcagcttaacagtctcctcttaattaactaaagtgctgcagggaacagcctgctgctgtccttgtggttatagtgtgtcttcctaagattgcctgcctcatggaaagaaaggagacaggctgctctgaactactgctgttgacgtgagagtgatgggaccagaaactgttttgcttaactttcccttagcttaccttgcaggctgggcccaaagatgacctcttttcttgaggccctgtattattatttttttttgagggggttggcaatttttgattaagatgagagggctgtaggtctctgttcaaataatttatgtagcaccctcaaggaggtgaactataacttcccgctccttaagtgtgggctgtacatagtcacttccttcctaagagcatagtttagagatacggaaatgtttacattggagaaacatgaagaacactacttcagccagatgatcaaggttaacttctagagtcatatggcatgttgatagtatgtacccttggtgtgatgtgattaaatgacactttatctctgtggccttcttactaagaaccaatagcacagcgtaatcatgagaaaagcatcagacaaattccaactgaggaatagtctacacaatatcccattagtactcttcaaaactgtcagactcatcaaaaacaaggaaagtctgggaaactgtcacaaccaaagggagctaaggagaaaagacaactaaatgtaaaggggtattctggaacagagaaagaacattgaataaaactaaggaaatctcaggtgtggactttggttaataacagcgcttcaacattggtttattgaaacaaatgtaccatactatgtaaaatgttagtaacaaggatggaggagtatatgggaactctgtactagctttgcaatgttctataaatctaacattgctttaaaatagatatttaaaaacaaaaccaaaaagttcaccactcctggctagttgacccttgcattagttttgatttggggctatctgcagtgtttctccacagcttagtaaatcaagttgattttgctataattgatttcaagaaaatattatgtttagtctcatgttcttttaaaagtgtattaaaggcagggaagtatattttagaattttttttttatca

SEQ ID NO: 89007 - DNA, 1102 bp, Homo sapiens
aattattatctggctgttcttcattaactctttcattaataaatactgttgatactgaacctgagaggttccccaaagccaaagtggtgccctcattagggtatatttcttttctctttggttttttcctcttaggtttcctccttgtagcacttccattctgttttgattctatttcccagatagtaatagtgtgtctacctctcaaaatatcaaaaagctagctgggcatggtggcatgtacctgtagtctctgtcaaggccagcctgggcaacatagcaagacctcatctcttaaaaaaaaaattaaattaaagctgcacatttgagattagaaaagtagaatttctatttgtctctaagagcatttttttctttaaagaggagtatcttcatttgattgcaaacttttcttttgagtatatcaaattatgcaaatatagaaataatgtgaatttaactttcagtgcaatgcgtgttttactatctaaattaccaagaccatggattgtggatgagaagaaagatgatggttatactgccttacatctggctgcccttaataatcacgtagaagtggctgaactgttggtacatcaggtaagaaaagagttaaataattccctcttttttatttttttttaaacaatttgggaccattgccattcatttatttattgctttataaattgcctattagtaggttccagtaaaacctcatgatgatgaaaattcagatataatgcatattctgtcttctgcctaatacttcttaaatgcaggatggtgatgtgtgtttgagagtgagtccctcaattcccaggatttcctctgcacagtcttcctggattggtcctgtgaaatgggcatcaactaacagagatttcccagaatggctgccactgttacggaagtatcatcaaccagagcaccaagaaccatctgtgttgatacttaaacagtatggccagttgtcatcagactgcagtttgcagctaagatcaggggatttatttcgtaactactgctgacccctggaatttatggctcgatagcagtacagactcaccttggtcatttcattcatctcagaataggatga

SEQ ID NO: 89008 - DNA, 1963 bp, Homo sapiens
cgattctcctgcctcagcctcccaagtagctggcattgcaggtgcacaccaccacacctggctaattttttgtatttttagtagagacaaggtttcactatgttggccagactggtcccgaactcctgacctcatgatccgtctgcttcagcctcccaaagtcctgggattacaggcatgagccaccacactcggctgaaaagactttctttttctactgaattgccagtatacttttatccaaaatcagttaattgtttatgtgaaggtctctttctggatcatgtattctgttctgttggtctatgtttttagctatttgataccagcccccagtcttaattactgtctacataatacgtgttgaagtcaggtagtgtcagtcctccagttttcttgttttttcgaagttatttgactattctaagtccttcacatttccataagaattttaaaatcattttttagagggtaaaaaggttctgagaccaaagtgtttgagacctctgccttatttatgaccatgggtaagttctcttagctcggtgtgcctctttttttctcattttaaaatgggaagaggagagcacttacctcgataaggttgttgtaaagatcatggaaagtgtgtaaaataatacttgatccattttagacactcaataaatgttaacagttattgtgactattttcacataagatgatgagaagaatctcagataatattatcagaacctaatttgtctcattctccgtatcttggctcaattcctagtcattggttcttttctcagttgtctctcctgtcattgtttcaagttggttgctagctgctccagagccaaattaattaggaaagagagtactgtttctttagtatctcaatcagaagttccacttttgagttctgttgggcttaattgacttgatttgtgttatgtgtccatcccggttctagccatataggtaaggtagaggtatctgactggtttgggccatgtttggtccacctctgcagctggagaatgtaggtccacctctacaactggagaaagcatacttgtgtgtatgcttgagaaaaccaggggtagagtggtggggagggaacattaggactagaactcataagtgtccaccacacacacatacatatatatgatgacaagaattgatggcagattcctagagggaaaatcatgactctttattttattgcagttaataatgggacttggtacccagggggcagagaagaagagtgcagcatctattgcctgtttcttggcagccaatggtgctgacctgagcattcgaaataagaagggtcaatcgccacttgatctctgtcctgatccgaatctctgcaaagcactggcaaagtgtcataaggaaaaagtcaggtttgtattatttattatcataaaacttaatattctgtacagaaaatatcatgtggtttcgtaatggaggacgtggctacttgaaaatgtcttcatctttgctcttcctgtatatttgtgttgaccctttctttcctgaaatttttcttccttgaaaatttttctgcaggcagcatgtctcttattttatgccatattccccacattattgagtgcaatgctctatacttaataagttctgagaaacttttctaaactagtctgatcttctagtactcccatgtgttagagggatttatgagaaaaagtcttctagtaaaattgctgttgttaatgttacatgtattttaaattgtatttattttttattgtattattattattttttaaaaatacgtcttgctgtgttgcccaggttgggcttaaactcctgggctcaagcaatcctcttgcttcatcctcagtagctgggactgtatgcatgtgccactgtgcctggctctatatttaaaatttaaatagaatcttcctaagacaggcaacttatactccatgaacagggt

SEQ ID NO: 89009 - DNA, 1100 bp, Homo sapiens
ttttctgtagctgtaggtggtcatatgtatttctgttccttgtatctgtgtttacggatgcagtctatctttctgtaatataattttatgttccttaaggatacacttaaaaatgtcaaaacagcagctgaagtgttaaattttccaaagtgccctatctgttgtggactctgatgatgctttgttccgtctttagtaaggcaactaacatgggggctagtgaggatttttgttttattcctatgccttcctctgctggttctatatagatacaacaggttctgagcaaaattttgtttatgctaagttttttttttaattgctgttttttatttcattgttagaagattcacccttttccattgggtgagtgagtgttcagtttgaagtttgaattgtgttagaagtatctaaagatgcagagacgcatataaacacaaaaatttaatgtttcacatacagatgttaaagcttaattttttaatatgactagtttttatgtatactaatgatgctccaggtatattttaaaacattttaattagtgaatttgtaataagataggcttgatttgaaatactttcttttattagtggtcaagtgggttctcggagtccttctatgattagtaatgattctgaaaccttagaagagtgtatggtgtgctcagatatgaagagagatactctttttggtccatgtggacatattgctacctgttctttatgttctccacgtgtcaagaaatgcctcatctgtaaagaacaggttcaatccaggacaaaggtaagatatatttaatatagtattttgtcattttatgaagttgagactagaattaatgataaataagatttaatgacatcatgcgtctgtgtaattttgctcttccaaacaatgatttaaatataggaatatataatttctgcatttatcagatcagaatttcttattttattgcttgtttacagtcttgcttattaatgtactgatttgctaagttaattattgtttgagtttattgatacaccatttttactgtcaaatttttttagctcttaatgtgtttccttcattatatctaaagtatggtaaagtta

SEQ ID NO: 89010 - DNA, 1007 bp, Homo sapiens
agtcctggaaaagggcactttaaggtagagtttcttaaatgtgggtaaacagaaaaatccctcgtggattttagcaatttggctaatctagctagatttttattaatattagaaatctgtctttcagtcatttcttattttactactttatttgttcgttgtcttttttagtttcccctcaaaagtagtttttgggggaaaaaaatattgaagcctccagaggcttcctcagaggaaatggagttttttctattctatattttaggacagatagggagatgaaggtagaatagaaataagtgcctgttaagctagggtatataaagatgtgaaaatgaataaccaggaaagtagaggatgggaggaaagtgtgtgttaaatttctctgtgcctaggtgttttcttacagaggaaatacatttggatataattgaacttgttaagagttactagatttatctgtaaatggtcactgtgctgtaacctctttttctatagattgaagaatgtgtggtatgctctgacaagaaagcagctgttctttttcaaccctgtggccacatgtgtgcttgtgagagtaagtagcctatgcagagttcctcaatattattataaaaatagaaagtgaaacaaaaattatgtttttgagggtttttttgcttttgattttggataactcataaaaaagttgatgggcctcgagtaccttctatttctttctctgtactagaacgtcagctgtttccctccatgcgtctgagcattagggaagactgaatatgctgtgttctgccaccttggattttgatttcagttgtattagcacaaaagggtctctttccacacataatagaaatttattttgaaaaataaatgttgaaacatttagtctcgcctttgttcacatatgaaattagcacgtcttcatttggcttcaccttaatattgcctctcctgtgtactttcctcactgcagaagaaccaacagcaaccatttctggggctgt

SEQ ID NO: 89011 - DNA, 2231 bp, Homo sapiens
gcctagaatttctctgcctcctgcctctatcacagcggcgcgatcttggcttactgcaatctctgctgcccgcgttcaagtgattctcgcgcctcagcctcttgagtagctgggattacaggtgtgagccagggtgtctggctgtgttttatatattaatagtttttaatcttatgtagtacctttcatactatcctgatagtacaaccagtgtttctattttattttatagggatgacattttaactatttaaaaatgttaaaaaattgtttttaaaaaccaccaaaatattatttgactaaaacaactaaagaaaattaatgatatataacagtctgtcactttccaaatataaagtgtctaatttattactttgttatctcacattacagacaatgtgccctgtgtgtctagatcgtctgaagaatatgattttcctttgtggtcacggaacctgtcaactctgtggagaccgcatgagtgaatgtcctatctgtcgcaaggctattgaacgaaggattcttttgtattaactaagacacatggtgtattttgttagctaatgtatctagtcatgagatcttaataggcttttgatctagttggaagttctgatgagttaatttctaatatcatagtttctttactagagtataattgggctgtaaatgtaccagaacaaaaaaccctacaaaatggtgttggaaattgtgttttttgtttttgttttaaatttgaaacatcaaattcatgtaactcataggataatttacctttggcttctaagaggaaagtcctttaaggatatccttttttaaaaaattgcatttttctcttataatttgtaaatttgttggatctcaaaagacataattctttgtgatcagttatccttcatttcatcgtggttttacacagtgagttgataacaggttctctgagaagtcatgcatcaaataaaagaggcaggtcaaacaattatgtcacatggtaaattataaaatgacagtacaagttccagatagttaagggaataccgaagggatgattctttttttaagataacaggaagttacccacatgtttgtttctgaattcttagagtaaatggaagcatagaatgagggaataatgactttgcatttctcttgttttctagattcaaaaggaacattgtttaacttgaatcagattaccagtttcaaggtgactgatagacaagaaaaggaaaaataagcaataatagtgggcaactgaagagaaaaaaaaaacgagtatctattaactggccactaacagttgcctttcttacattaatttatacactattttgttcagccagtgtttttaaaaaaaatctatgaaaagtgtacttccggttttctgtgattacttatctgggcttgatctgaccagtgaaatgacattgccctatttggacctctgaggttctatttagctttgcagatgtacatagtatcccagtgatctgcaaaattaatgccttttccaagaaaaaatcttttcttctctgtatcagttaattctgacagtgttagtgattctgtcttcattataggccttatttccattatctctttctttatagtattttttgttataaagaaaacagtctttctgtgtatacctacggatgagggtattatttaaactgccaacaatatccaagacatggtcaataacctaattataaatactttagaaagagtgaccaggacatgtatagaaatgtctgcttacctgtagactttaaaaacaaacaaaatttttggagcatttaatcattttttttctccttttatctcctttgtaatcttattgtctcctgagtaaatatacacataaatgtttggggattcattgctgctagattatatcaggtgtttacatagtgtctactatatgctgttgataagctttttcctaaaaatagttatcctcttttgtagtttttttccctcctttaaatctggctagcttttcttacttcagtttttatagaacaccaactaaatttgaaagtatgaagtctctagccctcttacactgtttctggctgtttaatccttgctgcctttgcaagtcctggtgaaagcaatggggagctttgctggctggttttgtagtctcaacaattccatgtctgtgtttagctgagtaactgctatcatttagaacagtaaaatttttatagatttcaaatttgaaa

SEQ ID NO: 89012 - DNA, 4534 bp, Homo sapiens
tataaaaaggtagaacatctgactgatgatgttcacataaagagacagacagactatcatgttgcagacatgaaaacagcatgtcaggtttttcctttccttccatgccatgggctacccatctcttcccactagatcacctggtgaggagggagcacctggctgactcatgcagagtttggccaatcagagaattgtgtggtctccagctctactttccttaaacaaatcctttctgttttctgagctgcagtgctaaaacagatccctaaaaggtaatagcatcttccagactagtttaattatttcctttataagaatatgacataaatttttattatagaaataatgtcattataattttagtgctagtacttgtgggttttctgtatttgtatcaccttgaaatttgttccatgaatagaaaatacttctttattcatgttttcaatcacttagaattattttaaatttattttgggtttgtgagagataataagattaagaacttcatcatttcagtgactttcctccaactctctgaatctgctacctcttattatatgtcccttagcagtacttttccagttaggttcgttaccctgctcattagctaaacctctttatcttgtgcctcaaaagagcttttacttttcttagaaacatttataaaaaagaaaaaaactgacacgcattcattcaaaaaagtatttattgggctttagggattagatacacaacagtggaaaaatggcatcttagcacactcagaatttattgtgcagcagttgtgtattttaaggaatctgtagttaaaaggaagagatccaaaggtcctgataacatttcctaacgtttcagaagagttgtcattgagtagtgtttggatttcctctctgtatccctcaccctaccattttctcctttattcttctaagattgttagcgttgttactcaaaacatacacatacaacataccagatggtgctgttctaatggtatttgttcacgtaatttaacgttcttactgcttatactatatacatatttaattttgttgggagcaagaaggttttcaagaaaagataattttgtattagtgtaggaatatattagacaaatgtttagttggtcaaattatgcataagatatttgtaactttaaacattgcaaattgaccagctagctatggaagcataaaattaattgataattaatgttggaaatacatttctaaaatttatatttttatggtgttagcctgtaagagcattttagcatattgaaatgcatgctgcttaagatgtgtctggttcaaatatcaaaacttgctgggtcatttttacatagtagaaacatactgtctatgtgttgcccaattgctgtttgtccactctgaattctggaccctttttggactaagaattagttaaattcatgaactaagagaattagagatggggtagagtaggatcaggacagtggggttacaacagataggaaaggaaagtcagcatttgagtgtagagaaaaaaagaggatcatacagatgtcatcaaattataggctttaatacaggttgctttttttaatccaaaaggaaaagcacttatcctatcagaatgtctaccatgttttatagtaataatttgtgtaaaaaattgaatttttgaatagttttttgtattttttgtgatgaaaaactcataacataaaatttaccatattaactgtttctaaagaatacagttcagccatgtgaagtacatttacactgttgtgaagcagatctccagaactttttcatcttgcaaaactgaaactccatacccattaaacaactcccctttttgttttctcctcagtggaatagaattttgactccatataaatcaagaaacacctaaattctttagttgtttgtgtttgcaagatctaaggtcatggtaaacattaagttcttaaaatttttgggagggacagtgcacctctcctctgaattgttagcaattaaattgagtaggttttaaatgtctattcattggaagggtttgttatttcattttgagccagaggggagaggcacattttaaatatcagaattagattagctttgagtttgtacaattgggaacataatagattttcataaattatgtgtgccttgttggaagtgtcaactgtctttatgtctgcttgtaaaagtttcaaaatatgttttccctcaaaaaggcaacgttacttcatttgcttgaatattatgataggaatgcttactgatattacttgatagtcatatatagcctaggaaatttaacatatatataactatagcagtattaataatgatagttgtacttctttaaaacattaaatttgaggaaactttaatgctgtctcgtgtacattgctttactacagtgagggggaatatcctttagattgagcctcaatttactggttagtagtatgtgaaactctggtataaaaacgtaaactagacagtagagccgatgaattaaaattgtaaattgctacattggcattttctacctccttttctgtcagagtattactttttccagcatttattcttatttgtgagtaaagaggaaatgggaacctgaggttaaaattgacatttttgtttcattgagaatttaagcagtaggtacaggagaagtgacttgtcacattaatttggtgcctaaatctgtaactacaagttgtgatcgacatgtacaaaatgtctaagaaaggtcatatgctgaatattttacttttcctgtatagtctgcatgatttgtttcataaacccagcttatttcctccaaaaagcaaaatggtcctgtaatttttaaagtaaaataaacgtgccattttgtctgcaatctataatttcaggaagttattgaaagttctgactcagggctttttaacagttcaagcaattgtcagttatattttggaaactccatctgtgtaattctccagtgccttgaaagaattattaacttggcaacactattaaaactttataaaagatggtctttagtgcacgtgtatcattatatacacgttttaaagtcatattgcttagcttgttaataatgattctgcatgtgtgctgggtttgggtaattctttaaaggaagttttctagatttgcacttgatgtttgttttttaaaaactgattatttatggccgtgacactgttaccagaaaagtaattctaattaagttattatgcaaagtcatctataagtagcatctgggaagaggagatcgaggccacagtttgctattttagtatgaaaggaggatctgtttgggaaacatagattgtcttcccctcaaatgaggggaaaaaaaaaagaccctttgttcaaatggattctgttgtaaaaaattatttttaaaggaaatcacaaattgtatgtcattcttaatgctagtcttatagaataaatccataaaattgtttttatgttcagtatgtttatgtcattctaaatgcagcaaattcaatgatagcagttcaattgactcatagcagtgttttgtattttttctaattctttagctttcaatattggattaaagtcttgtttgtgaatatagtttccgtatggcaaatgatttcttgcttattagcttttgttaaagaatgcttagtaagagctaagcttttaaaagtaatgcaaacatttatcgttaataaaacctatggtgtaatatcatataatgcttttctttgatctttggagaattattcttttatagtagtatacatgaattttgatttttaaagcatttaaaaacaaatctcaatacattaaaaaacctgttattgttaaaaaggaaattaccatgcctttaagaaacaaggatgtacatcttcaattcagcataagtgtccacatctagaaggctctcattgcagttgtttacagttaaggtacctctatctaaagggccaaagaagcatttcatattttaacacctcacattctttcaggattaagacatatgaaaatagtctgaataggataaatttgataggaagtaacttaaccagtctggaagattcagctttttctataaaaagcttattcctcttcacaactcagatgtagatttcattttcaagaggtagatattttaaagcaatgatctatttgggttttagttttatgagtaaatcattaattgtatggtttgggggttattttattttccatgttaatataagcacttatttctgaagttattgagaggtcatctagctccagttcaaaagattatgtatatctgatgtttaagaggaaaaacatctgaaaaaatatcttttgtttatttgaaaaaagcatatatattccaactttaaaattgtgaatttattttgagtaacctctaattaactgtatttttttgtttctgttgctgtatagttagaaatttcatggcaatattttttactaaattgaaactataggttttaaaaataaagacattttagaaaatttgcttt

SEQ ID NO: 89013 - DNA, 1070 bp, Homo sapiens
tcatgcctgtaatcccagcactttgggaggctgaagtgggtggaatacctgagctcaggagttcgagaccagcctgggcaacatggcaaaactctgtctctacaaaaaatacaaaagttagccaggcatggtggcacacacctgtagtcccagctacttggggggctgaagtgggaggatcgcttgagcccgggaagtcaaggctgcagtgagccgagattacaccactgcacttaagcctgagtgacagagtgagaccctgtctcttaaaaacaacaacaaaaaacccaaaacatttaaagggtgcataggcatttataagataataatgagtatacagattaaaatagaacaccaagaataatttctcagataaattatttattgaagaataatcatttggcaaatagtttttcccttataataaaactcgataaattcatttttatcttattaaggacaaaaaaatgatagaccttatttgaaaatggaagaccagacctgtaacagatcatcggtgaggagatgacatgggaaggaggccatcaggcagtgctgcctttgcccataactcagatgcgatgcattcaggctgcaggtaccacttcatgctagggctctgcatttacagttagaggagctttctgaaaggcagatttccaagataatatattcattatttttcatatatttgaaagtattgtcttccttcccatctgtgttctttctttccacaaaacattaatattaagagtatgacactgacaggcagggaaatactgttataggtgaggttaccccaatagggaaaccagaaccagcaagcatgacaagagattttggaattatcaaaggaatttaaaacagcaacaattaatatgctatgagctctgatgaaaaaagtggacaattcagataattccagcactttaggaggcccaagtagggggattgcttgaggccaggagttcaagaccagcttaaacaacacagaaagaccctgtctctatgaaaaaaaaaagccatgaattgtggcatgtgcctctagtcctaactactcaggggctgag

SEQ ID NO: 89014 - DNA, 1062 bp, Homo sapiens
ttttttgcccaggagggcatgcagtggcatgattatggctcactgcagcctcaaactcctgggctcaagcgattctcctgccaccacctcctttcaaagtgctgggattacaggtgtgaaccaccgtgcccagccctaattcattctttacttttagtttagagtagtgtttcatttaaaaattgctgtacataaaatataatcacaaatgatttctcaaaattctgtatcttgcaattattgtaactggataagggtttagaacaagagaagacatgtctaagtctaataataatatagtgaatatttacgaagtgttatgaagcggcactttctaagtgtcttataaatgatagaaactgtgggtcatgctttacgtggcatttgaactctggcattctggtcccagagttcctggcccctaagcatcataacatactgcctgtctaccagagaaacaaaaatcagtgttttccatggtcctggcaaggatgattatcagttctataagctaatatggacattcaggaggtggatcaaggttttgtgaggcccagagcgtatataatttgggtgtcatctttaggaagataacagaaaatgacaaatacaaatgtatatgtgaaaataaatttttatttagaatgagaaaataaatcacaactgatcacaattagaaaaaagactacaaatgtctccaaatccagaaaaaatgcacatttttattactgagccccctaacgtatctaatgcttctttcccccatatctttagctttatactctttgattgtctttcaatgtgtctgcaattttctacaatcatttttagtagagaaaatagaaatgtaattcagctgttcctattagcgtggttgcttggtaattattattgatggttgggatgcataacacataggatttcacacatgactataacttgctgtttgtagtgcttctgcagttttatcccatacctatagagaaattctgaaaattgtattttgtgtgatcccctccaaaaagaaaaaaagcaaagtttgttcataattgtatgtgctgt

SEQ ID NO: 89015 - DNA, 1035 bp, Homo sapiens
agactgcattgtaactttaacatacactgtgactgacgtttctcaaagttcatattgtgtggctgatctgaagtcagtcggaatttgtaaacagggtagcaaacaagatatttttcttccatgtatacaataatttttttaaaaagtgcaatttgcgttgcagcaatcagtgttaaatcatttgcataagatttaacagcattttttataatgaatgtaaacattttaacttaatggtacttaaaataatttaaaagaaaaatgttaacttagacattcttatgcttcttttacaactacatcccattttatatttccaattgttaaagaaaaatatttcaagaacaaatcttctctcaggaaaattgcctttctctatttgttaagaatttttatacaagaacaccaatataccccctttattttactgtggaatatgtgctggaaaaattgcaacaacactttactacctaacggatagcatttgtaaatactctaggtatctgtaaacactctgatgaagtctgtatagtgtgactaacccacaggcaggttggtttacattaatttttttttttgaatgggatgtcctatggaaacctatttcaccagagttttaaaaataaaaagggtattgttttgtcttctgtacagtgagttccttcccttttcaaagctttctttttatgctgtatgtgactatagatattcatataaaacaagtgcacgtgaagtttgcaaaatgctttaaggccttcctttcaaagcatagtccttttggagccgttttgtaccttttataccttggcttatttgaagttgacacatggggttagttactactctccatgtgcattggggacagtttttataagtgggaaggactcagtattattatatttgagatgataagcattttgtttgggaacaatgcttaaaaatattccagaaagttcagattttttttctttgtgaatgaaatatattctggcccacgaacagggcgatttcctttcagttttttccttttgcaac

SEQ ID NO: 89016 - DNA, 1050 bp, Homo sapiens
attagtctatagtggtaaattaatactgaccatgaatgataaaaacccctcaatatctgaatcctttctgtttaatataattgagataatttcttcctctaagagaaataagaaaatttgcctgaaaatttacctcatatagccaaataactgaaatcagaacttttctcaccattatcatctttccttattctttccttcccctcccaaattctaaaaatgattgattataggtaaataaggaaatggtaaatgaggatatctgggcttgtgtttcatcctgatttcaaagtacataaagataaatgcaaagttcatttatgttgcaatctgtcatttcaggtatttgacctgtccaaagacgacttgatacctctataatgtaacagaaaaggtcagaaaatattaagcaagtagaagtgtggagcatattaagcaagatgaacatctcgggaagcagctgtggaagccctaactctgcagatacatctagtgactttaaggacctttggacaaaactaaaagaatgtcatgatagagaagtacaaggtaaaatcttttcttaaatacttacagcagtattttgttgagactgtagtggctttgtatacctttgtatgacagtcctgtttattatttctatttcagcttttaggttccgggggtacatgtgcagatttggtacatggatagattgcatgttgctggggtttggtgtgcaaatgatttcatcacccaggtagtgagcatggtaccccataggtagtttttcaatccccaccctcttcccacccccctgaccctccaccctcatgtaggtcccagtacctgttgttcccctctttgtgtccatgtgtactaaatgtgtagctcccacttataaatgagaacatgcagtatttctgttgtctgctcagggtaatggcttcatctgcatccatgttgctgcaaagaaaataattttgttcttttttatggcttcattgtattccatgatgtatatatacttttttttaattcagtccactgttgaattttgtacatttaatg

SEQ ID NO: 89017 - DNA, 1101 bp, Homo sapiens
caaaaacttcagtaaaactatgtagatgtaacattattttggcttagaatagttatttttgtatgaacacatctcacaagtagaattatcattcttactggtatacttttaggataatggatatccaatagaattctgatattcctcccatgtgattggtctactgaatactgatagccaaagggaattttgaggagaaataatagtcagatgaggaaaggaacctatgagatcagactgatgttataaaatgtttgtaagaaaatgtcaacactttctaattttaataatgctgtataatgaagagagaacacaggacacagatccacaatctgttacatagaattccaaaacccaaaaggttatttttgaaatgttgttcacaacctaacctcactgcaatggcagaatgctgtttatagtctttatcccacttcatgtgagtattcatatgttttgctgtgaaaatatcaatgtgtttgattacaggatgatgcttcagactccactggagctgttatgtaattatgtatatatgttctgtattactgtattactttcattttttttaaaaaatatgaatttggaatcccgtctggttccaaggattttagataagtgattgttgacctacattaatttatgtgaagtgattatgtatgtacgtagcttatggtattttgaacacatcagccttgatctttatgagtaccaaagggatgagataccaagtgtgtagaagttaacacagaattagatagacgattgcctcaaaaaccaatgtgtataagttaggttgaaactatatcgtgtcatttgcttggtagaaatatgaattctaattagtttagaatttatttttagtgttctcaagcacatgcatttttcctgttgaaattcaaattttagaaaagaagtgaaggctaaagtttgaaattacaggaaagagtaatcatatagatgagcttaaggcatgtatgtttatttaggacatgcttagtcaaaagagtataggagatgatctgattgtgtcttttattctcttctgaaatataagatagttgtgattctcatgaaccaacttcttctgtagcttggtcg

SEQ ID NO: 89018 - DNA, 1049 bp, Homo sapiens
gcttgcctggactattatagccactaattgatttccttgcctcctgtccttctgtcccaatcttgcacaatactgttagattgtcacattatatccaagctctaaaaccttaatttctttcctcttgctttctacattatgtgcacattgagctcatggctctcgttcatgtaattccagctttcccttctccaacataagtacacagtactgcatgcctttcctcagactgtgggttctctcctgatcttgtctgcaatttgaaatacttttaatttcacctgaagtgctattgactatactttctacttcacttctcacatagtatttcccactgggtactgtaatcattcgtgtacttatctacttaggtttggaacattagatgcaagggattacatcccttagagcttcatgtttgtgttctactgtaactccatgccatgtagtaaatgttttaatactcattgaattgattttctttccattgtcattcttctctaggaatgatcaacagcatcaagcagctgagcttgaatgtgaggaagacgttattccagattcaccgataacagccttctcattttctggcgttaaccggctacgaagaaaggagaacccccatgtccgatacatagaacaaacacatactaaattggagcactctgtgtgtgcaaatggtaagagttggagttgtattttagttctctggttttgtaaaccagtgttcatctactagtttttatgttattcaatctagtgataagaagatagtcactattctggtatcccatggtacaactatgagtttaacttctatttgtaaagtgactgagaaggcgttttctgcccgtgttatgtatagatacgtgtcatctatatgacatgtaaatataccatattttataaatgtagtaaatagtttcttttttctttttattttaaaaatattcctatgtgtatatatccaagtgggatagaaggaaaaaggaaaggaacttaatgttaatttctacctcctgtgtaccaggtattatgctgagtgattt

SEQ ID NO: 89019 - DNA, 1487 bp, Homo sapiens
ggcgtgtgccaccacacccggctaatttttgtatttttagtagagatggggtttcaccatgttagccaggctggcctcgaacttctggcctcaagtgatctgcccaccttggcctcccaaagtgctgggattacaggcatgagccactgcgcctggcaaaagatgattttttgtataataaagttatttaaagtacttaggaaaaatttttaaaatatgaatattatggtgttgagaaatacttcctatgtcattttcctctgcttttccccttctcttttgtcatctaaatgaagagaagccaaaagctgtaccttgtcttaaattttggttaatcatttgcttctaagaggtagataagaccttactattaattctgtattaaagaattgttatcactctttatttagattttcagattctacttcaaagactcctcctcaagaagaattacctactcgagtgtcatctcctgtatttggagctacctctagtatcaaaagtggtttagatttgaatacaagtttgtccccttctcttttacagcctgggaaaaaaaaacatctgaaaacactcccttttagcaacacttgtatatctagattagaaaaaactagatcaaaatctgaagatagtgcccttttcacacatcacagtcttgggtctgaagtgaacaagatcattatccagtcatctaataaacagatacttataaataaaaatataagtgaatccctaggtgaacagaataggactgagtacggtaaagattctaacactgataaacatttggagcccctgaaatcattgggaggccgaacatccaaaaggaagaaaactgaggaagaaagtgaacatgaagtaagctgcccccaagcttcttttgataaagaaaatgctttcccttttccaatggataatcagttttccatgaatggagactgtgtgatggataaacctctggatctgtctgatcgattttcagctattcagcgtcaagagaaaagccaaggaagtgagacttctaaaaacaaatttaggcaagtgactctttatgaggctttgaagaccattccaaagggcttttcctcaagccgtaaggcctcagatggcaactgcacgttgcccaaagattccccaggggagccctgttcacaggaatgcatcatccttcagcccttgaataaatgctctccagacaataaaccatcattacaaataaaagaagaaaatgctgtctttaaaattcctctacgtccacgtgaaagtttggagactgagaatgttttagatgacataaaggtttgtgttaaatgttcaaggattttgattaaaatgattgcttgtgatttcatttagagctaacaattatttctgttttagagtgctggttctcatgagccaataaaaatacaaaccaggtcagaccatggaggatgtgaacttgcatcagttcttcagttaaatccatgtagaactggtaaaat

SEQ ID NO: 89020 - DNA, 1101 bp, Homo sapiens
tagctactgtaaaaagtatttttgataagtacctgaaatttataatagtagagttcatgtttagcactttgtccccctttgcaactacctatgggaggcagaataggaaagtgtttaagagttctggttctggaataagaaagagcttgggccaggtcccagctcctctactttttagctttgtgaacttgaacaagtaatttaacttccttgggtctctattacctcatctgtcaaacaggtatagtagaaactacttcaaaggaatgtgagttatatgagatgatatatgtaaccatttggtaaatatttgctgtcattattataaatgaggaaactgatgctaaatagtgagatcaatcatcagcatcacacagctaataatcagaagaatcatgtaaacttacaaagcatcaaataagagaaatgtttactagatataagctgaaagaaatgcatgttgcacatacagtcttctaagtttatgatttgtttttaaggttatattaaggaagatcttgatccttgtcctcgtccaaaaagacgtcagccttacaacgcaatattttctccaaaaggcaaggagcagaagacatagacgttgaaacagaaacagaaggatgaaggacagttttttccttcttagttatttatagttaaagttggtactaaacattgatttttttgatcttctgtaaatggatttataaatcagttttctattgaaaatgtttgtgatattttgcttttgcacctttaaaacaataaggcgctttcattttgcactctaacttaagagtttttactttatgtagtgatacctaatacaattttgaaaatacaatagttgtagtctgtgatttgttgcctttcagttcttttctttttacttcatcttcccttggtatttacattgagcagtgacttcatgttaatcattacagatttttcttcatcaattgctcttctctaggtcatatcagtgtctagtatttaagtctttttttaaaaaaacaaaaaagaaagactgtattttcatagtttttttaaactctccagcttttgttgaattggaatcaggtactacattgtcataaattc

SEQ ID NO: 89021 - DNA, 1053 bp, Homo sapiens
gcgaggagggcggcgcggccaagccgggcgccggcggcgcctgcggcgcgaggactcggttcagcttgctcgccgctgccgagcggggcggctgcatcgcgctcgccgcgccgggcacgccggctgcggggttagccgctgggtccggcccctgcctcccacagccctcgtcgctgccgcccttgattcctggcggccatgcgaccgtgtccggccccggggtggcgcgggggttcgcgagtcccctgggcgccggccgggcgtcgggggagcagtggcagccgccccggccggcgcctctcgccgcctgtgcccaactgcagctgctcgacgggtccggggccgccgggcaggaggagttggaggaggacgatgcctttatcagcgtgcaggtgccggcggccgcctttttgggctccgggacccccgggagtgggagcggcagtcggggacgcctcaactcgttcactcagggaatcctgcccatcgccttctccaggccgacttcgcagaactactgctccctggagcagccaggccagggcggcagcaccagcgccttcgagcagctgcagaggtcccggtgagtatccgggatgcgacgcgcacccaaccctgcgtcccgcccggcgctcccagcctccccgcggtctctgggctacgggacacgggttgctcccattttcccgcgccctgccggatcctgtgctccgggcccgaatcccaaaccacgagggcacccaaaagagggggcgtccccagggagtgcggggttacacgtgtttgcacgagcccagcattcgcagaggagcaccgcgcttgtgcagtgggtcgggaattgggagttgcaggagcccagtagaaagcggcgtccgagcctccccacacgagatcacaaacttcctgaaacccggtccagacccggaggcgcactcttccccgcgtggggcgagactcggccgggcgcagagtggagcagtgcaggccggcagctgagcggcgcgtgtgagcctgaacttgtagcagacacgcgtgaccctccggagaagttct

SEQ ID NO: 89022 - DNA, 1079 bp, Homo sapiens
tttatatattgggtttgttttgggtatataaaaattagaatgtcgggccgggtgtggtggtggctcacggctataatcccagcactttgggaggccgaggcaggtggatcacctgaggtcaggagttcaagaccagcctggccaacatggtgaaaccccatctctactaaaaatacaaaaaattagctgggtgtattgttgtgcccctgtaatcccagctactcgggaggctgaggcaggagaattgcttgaacccaggaggcggaggttgcagtgagccaagattgtgctattgcactccagcctgggcaacaagagtgaaactccatctcaaaaaaaaaaaaaaaaaaaaattagaatgtctcccaatctgcaatcttgaaaccctttcttcttggttactttcattggaacacttgtaaaaccaatcacaaataattgcttggacttccaaacttcacaacacacagggaggaaaattctgtgcacaagccttggcacaaggtgcacagtaaatgcctgtggaggcaatgattacaccacctctgttcactggactggattcttgacatctattgtatttagccctcacagccaccctgagtatagattctttcacaggtgaggagaacataggctcagagaggttgagtaatttctcccagctactgagaggcacatatgataatctaacttagttgggccaggataggaacctggatcattgatgtccaagctctgccactctaccatgtcactatgccttgcacacaataggcccatagataatttttgagctgttggctgtaaatgtttgtgtattatacaactgtcccgtcgtactggtataattcaacaccccatttgttatcctcccaaatttagcctcttcgtttgcatcccctagctttgctatttcaccatctctattctgttggggtgtccagggaacccaggatggtgggcctgggttcctccccgcctcacagacgggactccagcactgggaagccaacaggctgggtttgctgtcaggtgcagtgtcagaggtgggaaaccaagaagatgcctcttagctt

SEQ ID NO: 89023 - DNA, 1048 bp, Homo sapiens
ttccctggaatgcagagtggccaccctttgaggagggaggctttacccactatgatgatttgttcctgttgtcaggccaaggaacccagggctcaggagatgttaagtggcctgcccaaggccagttggcaattaatagcagagctcaggctcactattgctcagctgacttagagcttctgcctgcccctcccgctgcattgcccctctttggaggaaatccaggcttgtgctgtaattgtaatctatgtcttgactgaaaagaaaaatgtgagcccaccacagatcaagaatcagggtaagaaaggggagatggatgctgtttcctagctttttcaccacccgctttgtgacatcaggcaagtcgccagtctgtgtgtgtgtgccccagctgtgagccacctgacccctcaggatttcagaagtctgtaaagaactttgatctcagcagtaagcaaacacaagttattgctgagccatttttccagcaaccatgggttttggaggtcggagttgtagccccaggccaggcgggggcctgtggatggtgggcgcagtctgaggcttccctgctgcccttgttgcagtcacaaagcctgcaatgtgggcgagctcaggagaaatacataggaagcctgctcactgctggcaagtgcctggggaggccagtgagctcaagggtgagcttttgctctctgaatgggtggggaagccatcacatggctctgcgccacgtgctcagtagctttcccaggaagcgccgatgcctggactttttttctctcttcagaaagatagcggtgaggtggcagagagccaagggcaggttttctggagggtagaataggaggcagtgcagttgagcctgtgctgtgacctgatgtggcataagagaggtcaaagcaggactttgagactcctgggttctgggtcttagtttccttatggaactcagcggttgggacagatgagcctgccaccccttctgggtccaccattccacgtgtctcggtcctgtggcctgctgcagggtctgggggcatgttta

SEQ ID NO: 89024 - DNA, 1218 bp, Homo sapiens
gggtcaccattatccattttttccactttagaaaaatatctgtccccctcaagtttcagcctgtgtaccatttaaacaccaaacttttcacagattctggggctcagaccacttagtattacatacgggaatcatgaaatcattagctattaccctgttttaccaactgtgtaatgttgtatttttatgtttgtttgattttgaaaagcctctaagaacgtataattaattggagtttgctagtttgtcttttcctctttgttttagtagtttggatggctacgcactagatcatatttaatgaggttatcattcattgtggtttggggcttattactgcacatttggtcacagacaagagcttgtaaagcagaacgtgcaaataccaggggcttatgactttagaatattgtaatgatatgtgtgtgcaagagggacccaatcttgtccctggtttaaagcacagggtatatgtaaatctaagttaggttttacgataaacagaagaaaaaccattcaaccagatactagtaaaatattcaaaaatgccaaaaatgtttatgtgcctagcacgttgatttttattttaaagcactttactcattgaccaaattatttataaagcaaaatgtctacttcgatagttttaagaagggctgggtggcggggtagaggaacaaatgtaaggagctggaagatattcaaagtctaaagttttttgcttaaggacaaaaactggcatgttagggggacaaacggttgatgtgatgttgaatggtagttcttttttttttcttttggagatggagtcttgctctgtcgcccaggctggagtgcaatgccatgatcttggctcactgcaacctctgcctcccgggttcaagcgattggccaggcttgtctcgaactcctgacttcaagtgatcagcctgcctcagcctcccaaagtgctaggattacaggcgtgagctaccctgcccagcctgaatggtagttcttgatgaattattttatttattgagttgaataaagtttgtttttggagggtgagtagtgaagaaggaagatgagattacaaatgtctcaattgtaggattccatttatccatcacaaaacgattgatagtattataagttctgtttatttgtttgatgcttaacagcttaagaagtacttttttaaaaatcaagtaatttcagaaaggcaatgtggtagct

SEQ ID NO: 89025 - DNA, 1036 bp, Homo sapiens
tttcaccatgatagccagggtggtctcgatctcctgatctcatgatccacccgcctcagcctcccaaagtgctgggattacaggtgtgagccaccacgtctggcccgcttggcccccatttctaagcaggataccctctcccgtgtgagggctcctcagggtctgtgtggccatgatgtggagttgagttgggtgctacgtgggtgccttggcctcacctttcagccccgtttcccctctgcacatggcttctacctcctctccttgaccccatggttaaacagagttgggtctttgtccagggatcccatttggcattgggtcagcagggacttctatgtcgattctgcacacacatctgcatgccaggcaagtgtggccttgttcagagataaatggggcccagtgcccattccagaagaggacagcccagcacaaggcagctggactctggggcagccggacaggttaggggccaccattcctgcagtaggagcagtgattgtcctggagatgcccttgaaactgggccttcaggtcagctgtgacctcacggtgggtgcactgtggcaaagcacattggatgcttggtttaagacggtgagtttaatccagaggaaaacgggaagactttgaataggcacaggtgtgagcagagctggatttttcaaaagtggtgacaggttgaatggaggaaggaaactatagcagtgctctttttttgagatggagtcttgctctctctgcccaggctggagtgcagtggcgtgatctcagtttactgcaacctctgcctcccaggttcaagcaatcctcctgccttagcttcctgagtagctgggacttcaggtgtgtgccaccatgcccagataaattttttttgtatttttagtagagattgggttttgccatgttgtccaggctggtccccaactcctgatctcaggtgatccacctgcctcagcctcccaaagtgctgggattgcagaggtgagccactgcgcctggcctcatgctttttgtttttaaccccttt

SEQ ID NO: 89026 - DNA, 1046 bp, Homo sapiens
ttcctgaacaaaacaggttgttttaggatgggccagtgtttctggacacctgtactgttcaacacttgcactgtctaagaacatacgctgatattcatgtcatttacccatccagcccctgttggtgggaagctgctatgtgtgtacagaatgactaaaccagacttttttatttgaccctgtttgctacaaacgtaattgaataattggggcctggcagatcggaagcaataggaacaatatatttcaatccagtactctgtgagcagcagcatttcacagagccagaaataatttagcctgtagagcttattaagaagtgcaatgttcgttatgcgtaacttcagttctgttagagccaagaaaataaaagtcaaggctgaaatataaggaaatgaataagatacatggaggctggtgagatctggaataaaaaaaatatttacataggagttcagctttgattttatattgtcacaaattggtaccagatgcctgcatttcagacagactcctgagctgatcccagagtgtgagttgggaaacaaatcactttgccatttggaaggctgattgatattttaggagtttctttttgttttcaaagggaaaataatgcatattatagacctagcaaacagaacttttgtaaatggcaattaacagaagatgcccaagtgaggaagtctccagtttctttttataaccctggcaaaagtaatggaggtgacattttattagcattggcatctcccgcttacaatgggagctagttcagccttgttgagccgtgtccagagctggtagcttcatttccattttccttcaacctcagggagaaacacaagggtatttctgtctggggcggcaggacctcatgtggtctccacgtggcaggatcctagaatcacggggtggcagtacatattttcccctatggctttaagaaaatggcttttcattttgagtcttaggtttggtctcaacagtgcttgcttagcctccaggccatttttcttcctggtgtttgaatgactcataaaatg

SEQ ID NO: 89027 - DNA, 1030 bp, Homo sapiens
tctagtagagaaagggtttcgccatgttggccaggctgctctcgaactcctggcctcaagtaatccacccgccttggcctcccaaagttttgggattacaggcgtgagccactgcacccggcctggtcagggtcttagaatcttctaggctgggagtgggaggtggagcggttgttctgttactttcttacaaaaaaattgcagcccagagttcctatgagtatttgccctgttgtcttcatattaagctttgcttcgcctaagctgcttgcactgataatgtaagcttgctgaagtgctgttgttagaaaactcctgttttcttgagagagaaaggcacctttcctataaacaagtgttttgtgacatgttttaagtggaccttttaccctagatggtgttttctaccatataaactttttgtcagtgaacaagtgattctttcttctgtgtctgtgttgattctgcccgaggcgacgggacgagatacactgctaaatagattccagtcagatgatcccaaccgtgtgagcttataaaagacagctgttaaagtttaaaattaataattaacacacacgcacagacaaaagttgttgctcctagcaagattaaaattagtctgctgttgcagaagctctttatatcttcctcaaaagaattttattgttgtgtattttttcccatttcatctaaagataaaaatttaggtagagaaaatgataaattgattttctttctttttttttttttaaacttgttggcaagttacaccgttaaggtggtagggctcttgtctctccgaagaatcataagtaacacttgtctatggctactttgaaattacctaaataagataaaattatccaaataagataaaattatcccaagcaagaacttttttttttttttttgagatggagtttcactctgtcacccaggttggagtgcagtggcgcgatctccactcactgcaacctccgcctcccaggttcaagcgattctcctgcctcagcctcccgagtagctg

SEQ ID NO: 89028 - DNA, 1088 bp, Homo sapiens
aaaccttggctctccctggctcccccatgtactccacacctggtttggcctccaggtgtggacacactccacagtatccttaaaccatgggaccaggtgctgcattcccagccaccctccttgcccggctcagggaagccctttgcagagaacgcctggatttgattccttggagcctgacgcccattcagaacataggtaagttggccgcaaactccttggacttagatgcatagggcgcatttctgtctagggtgaagctggcccttttatttctagtggttttccctttccaatattcccttcccacccatatcctgtcctggctgggcccccacttttcttccccaccccctccatgagtatccaatgtgttctgtagcaagatcaaagcggtttatctcatcagccacacaaaaccttttcggatcctgatttttttttttcaaccagtacccagtacctgcttctcctggttctacccttctgcgtattccattgtgtgcccctacagcagcagggcagggcccctccctctgggacgaggccaagtatgaattagaatgcagcactgccactgagccagcgaccctgggctggccgcctgatgtcctgataccctaaggctgtccagggaccctgggctggccgcctgatgtcctgataccctaaggctgtccagggaccctgggcatgtaccttcatggcggccaggtgtgctgtgtctgctgctgtgttctgaccttccctctagaccctttgtcaaaagagtttgaacttgttcccagggggtatcactggatcttcaagtagggactgacatgagggaaagagtgtttttcaagattagcaggacagcagtgggcagggtagactgggagatctttggggatgaatttctggccagctattaaatcctagcagcagttcctgtcagctctaaatagccccatataccaagataacctcacaccttgatttttcaggatttggcaagtctgatgagagcccttgaaacaaaagtaaactcaggcaagccaagagccttttgtattctctgtaaacatttagagagtcgctttcttgac

SEQ ID NO: 89029 - DNA, 1028 bp, Homo sapiens
cagtaattatagctcccaggaaatataggattataacccccaggaaatgatggccatgaatagtttgatgactacacttcctagtaaattgctattctgctcctggtgtgacactacactgacttctgaaagccagacttttgcttttaccaaagaccaagtctctgacttatatgcattgtgttcattaagctcccattgtattctctgccttcttttggtcttgagaacctcatcagcacatgtagtccctaggttgtgtgggttccaattcccttccaggcgccttctgggagggttcagccttctgtactcagccagggcaccagataagtcaggttgcgggagtatgtggggctctacattctgcccagtggttttgatcagtggaagagggtcttcccaagaagagagtaggaaatcaattgattggaaagatagacccatttttcctcccttccctgtgcccatgccatttgcaatgtgatgaagccattcccccactgcttggacttgggctagcctcctgacttgctttggccaataaacacagtagaagtggtactgcccgttttggagtctagaccttaagaagtgttgtatattccacatgttctattggacttctgctttgatgaggactccatctttgatccaactttagacagactcctctgagccctcctcctcggagccccaaggccttgtccttggcctgctcaacctagtttagcaagaattctgccaggccagtttagcaaaaatcacccccagtcttgatgcctaacaagttcctcttgataaattgactccttcaccctgcctgttggctagaaatccctagttacctctgtggtatccagagttgagtttaatctctctctcctattgcagtagtcttgaataaagtttcccttgcctgtttaactctgtctggtgcagtttttctttggcagcttccaccatgagaacaagcccagactagcctgctgaagcttgagagaccatgtggagcagagctaagtcct

SEQ ID NO: 89030 - DNA, 1014 bp, Homo sapiens
cctgggcaacagagccaaactctgtctctaaaaataacaataaaagaaaaataaattgtttattttctttcctttgcccttctttctgttctcttcaataccggcaggggagtgttacagaaaatattggtgttaaccctggggagggagttcttgtagctttaacccagatccagactcctctttctgcccacatccagaccactgagcttgaaatagagaagggcccacccagtgcctctagccctgtgctgtccagtgtggatgcccctggccatctatggctttggagcactggagtgtggttgggccaaattcagatgggctgtaagtgtaagaacacactggtttcaaagacttaatattttttaaaaagaatgtaaaatatcacatcatttttctattgattacatgttgaaataatattttttatatattgggctaaataaaatgtactatcaacattactttctcctgtttccctttaccttttgtaacgtggctgctagaaaattttagtttatagatgtggctcccatgatatgtctgttggtcatggctgatttatattcattcattcattcatttatttttgagatggagtttcgctcttgtcacccaggctggagtgcaatggcgcgatctcggctcactgcaacctctacctcccaggttcaagcgattctcctgcctctgcctcccaagtagctgggattacaggcatgcaccaccaagcctggctacttttgtattttctttttagtagagatggggtttcacaacattggtcaggctggtcccgaactcctgacttcaagtgatccgcccacctcggcctcccaaagtgctgggattataggcgtgagccaccacgcctggccttattgctgatttagagcagttcatctacactgggcccagggaagtggcaaaagaagggggtgttggtggtggttgctggggttactgacccaataataatatttaagattatagttactggtgcctatttca

SEQ ID NO: 89031 - DNA, 1013 bp, Homo sapiens
tttatacctgtctttccaagtgccatttaagcaaatggaggttctgatgactgcaaagagccatgcagtttaaacccagtcctctttccagcagaactggccccaaaagctttggctgagaagttttagatcctttttcaaatagttctctagcaagcctgtatttgttttcgtttggttgtttgaaacacctttcagagtcctctttgttttttggtttgtttgttgttttgtttcgtttgcttgagataggggttcactgtgttacccaggctcgagtgcagtggtgcagtcacagctcactgcagcttcaacctcccaggctcaagcagtcctcccaccccagcctcccaagtgcctgggactacaggcacgtaccactccacccagctaattttttattctttgtagagatggggtctcactatgttgccccctgcctgttgttcttaaaatctcagatcttttcttacattgacaccagcaagaggcagaggataaggtgttttgtcagtatgctatcagtttccgtcagtttctattggttcttgggcctttttattcaagctttaaccaccatcttctatgcccaaattcacgtgctcagcgctgaatgaaggatgagcccacagacctgaacagtggagtggccccctcactgtagccccaagctctcattttctgcttagggagtctccaggtaagcccacactctccctttatttacccttggatcctgtttggtacctgatgaccttaatccttgctggacctcagtcagagccttgggatttgggtttttttcttttatttctataaagaaagaacgtgctttctattaggagaggcaaggttgtgtacaatggtgtattattactaatatgctgtggatataaagaaaaataagggccagtcacggtggctcaagcctgtaatcccagcactttaggaggctgaggtgggaggattgattgaacccaggagtttgagaccagtctgggcaacacagtgaa

SEQ ID NO: 89032 - DNA, 1005 bp, Homo sapiens
tacagaagttgggcacagagtcaaggacccggggggacatattgcaaaattagaaaatgctagaacctgtgatcctaagtgtttcaaagcagaatatatgagataatatatgtgaaaatggctggggggtggaaaagtgctctgcagacacagagcattatgtagagtcatacagacctagaccaagacttaatttgaacccagcttttgagtcttgtctgccactttctaggtgtatgaatcattttttctcatctgtaaacaatgcaataataatgtctatgttattgagaggattaaataatatgtagagagccctagattaatgagagccagcagttggcaggtcttccttgactccatcaatctgctgttttaattctctcatgaaattaaccagtgatttcctgggtctgaatttactgtttgtattcactagttctaggtagtgaatttagttgtggactgtctattctagacactactcagaattcagcatgcatgaggacaaggtctctcactgcatatttaatcagttattgtctcacagaagaagcaattgatgcatcattcacaatgtttttaaacctatataaagagtcattgattcagaacatttgctctgcatgtgaaaatatatgtttggtggtttccatggagaccaccctgctggctgttctgtgatcactcactagccttaattatacactggaattgccagggatccttcaaagctgtctccataacaacgcctccttgtgggtaacatgaccgccatccctgaccatgtctcccatataggagtttcccttaagagttgaaaagagtcagctggttaatttcagcctctttttgatgtatccttatgaagatctcttagctgcctaggaatttttctgagtttcaacttcctatctctcctgctatttttccaggtttcaggagcttgggtgaaagtaatagcaaggcctaatgtctttctttcttcagtgacatgttgacatt

SEQ ID NO: 89033 - DNA, 1044 bp, Homo sapiens
catgacctttttttagatataaggcagaaaagaagaaaagagtcttgaaaaagattcttttatcctgcatgctcccttgtgcagggttggctgcctggtagagaggagacagcctaaggtttggattgactggagttaacattctggctccattgtttaagagttgtgcaatcttagccatgtttcttaacttctctgagccttagtttaaatgggcacaatagaacctcacagagttgttactaagattgaaagagataaatacataaagattttagtattgggccctgcacaaggcatgctctcactaaatgggcattattattatcatactgttattaccatgataagacaatgtcagtaacagaatccctgggaatgctggagtgaattcaatgccaggggactgaaagcacaggactgctaaagacgccttccttgcatttcctggggcaatggggcagagggtcatgtgaggcctcatgggtcactgtttcaccattgctgttcccctcaggtgatctcttcagcgtcctggacttcccattcctgtacttctacagattccatggtagctgctgtgccaggtaatcgtaagctcactcatttgtatgctttctgtgctgtccgctgtgtcttcctctctgtgaagttcagggtcactgctagtgacctgagtgagtggcaggagagagtggtggtggatgcaggcaaggaagcagtcattatgtcaccagcaggctgtcacttagcacccttagatgctcagggccagcttgggccctgccaggacccctggcccatggaagtccctccgccaagacagtgattttcgcgcttgctctagagctaggattctcccacttttttcctcctccacaagcaaatctcacatagaactccaatatataaaactgatgaaatggatccagttcaagggaagatttgggttcagaatcccacccgctcagctttccccttggcctccttcttgctccttaaggcaacctccaaaataacctccaccaaacctgaggactctgg

SEQ ID NO: 89034 - DNA, 1047 bp, Homo sapiens
gagtttcgcttttgttgcccaggctggagtgcaatggcgtgatctcggctcaccacaacctctgcctcccaggttcaagtgattctcctgcctcagcctcccgactagctggggttacaggcatgcaccaccacgcctggctacttttgtatttttagtataaaaaatactagagatgaaatttctccatgttggtcaggctggtctcaaactcccgacctcagatgatccacccgcctcagcctcccaaagtgctgggattacaggcatgagccactgcgcacggccataaaatggcttattattaacattgaactcctgggggaaaagcttcatgatgttggatttggcaaggatttcttggatatgacaccaaaggcacaggcagcagaagaaaaatagagtaattggacttcatcaaaatgaaaaattttggtgctttaaaggatactatcaacaaagtaaaaaggcaacccccagaaagggaggaaatatttcctattcactcttcaattgcgggattcacttataggctatatagagaactcataaaacttaatagaacaaaagcaaacaacctgattgaaaaatgggcaaaggacttgaataggtatttctccacagatgatatttaaagactgataaatccatgaaaagaggctcaacatcattaatcattagaaaaatgcaaatcagaactataggagataccacttcacacctatgagaatggctgttaccaaaaaaccagagaataacaagtgttggtaaagatgtggagaagttggaacccttgagcaccacgggtgggaatgcacagtggtgcagctgctatggaaaacagtatggtgcttcttcaaaacatcaaaagtaggattattatatgattcagcagttccacttttggatgtatacccaaaagaactgaaagaagggagaggaagagatacttgtgcatccatattcatttggctattattcacaatagacaaaaggtagaagcaatctcagtgcccattgatggatgaatagataaaatgtgataaa

SEQ ID NO: 89035 - DNA, 2631 bp, Homo sapiens
aaattgaggaccccaaatgtcttttgtttacattgattatatcaattgatatttatcaatctgaagttaaaactgagaaatagaaaaattttaagtcatttaaaagtcatgctagtctgatggtagtgggttatcagaacttattaacattagtgtcactaaagttgatatacaacctccccgctgctaaatttggctggctttaaaaaaaaaagtcatatgttaacataaataacatttttatatctaaagaaaacttaaaaaaatagattagaacatgtgagaaaagtggaaaaagaaaacaaacaaaaaaatagagttgagatcttactgtgttgctcagctggtctggaacgtgtggcctcaagcagtcttcccaccatggcctcccaaagtgctagaattacaggtgtgaaccaccacacctggccaaaagaaaactatatttgaaaacaaaaattagtgaacagtattttatatttttgcaaatctctaacatctgacttattagaagatatctggattcttctatcttctttttttcattcaacctgttgtaaggttgaagtatttgaagaaaatccatcctcacagctaagtagattgtagcagatataagtgaaggtgggtaataagagcgtagtagaaatactgagaacaaactgggttaaatatctaaaaatgcatttatatcttaaatctactctttagaaaattttagaaaacacgagaataccaagcacacattccattggccatcagtgatgatgtcatcacatctgatgtagactctggaaaactccacactcttgggagaatgagagttaaaaagacaaataatgtaatattactattatgaaaattttgacttcatagaccctctgaatgggtgttggggatccttctcctagagtaccagggtgcaagttacaaaatgctgaactactattatggacaaagaattttaggggatattccaagaagagaggattggcaaactgtaagcaaaagtgaggaagtgtgtagctctgttgatagagagttgtaaaaaaaataaataaatagcggtactcctcaaaactgtcaaagttatcaaaaacaaggaaagtctgagaaactcaacagcctaagaggagcttaaggagacgtggcaactaaatgtaacgtggtattttgaatgggatcctggaacagaaaaaggatgttagagaaaaactaaggaaatcagagtagagtatggactttagttaataataattatgtatcaatattggttcgtgaattgtgacaaacgtataatactaatgcaaggtattaataggataaactaccgagtgtagtatttgggaactgtactgtcttggcagtttttttctagttttttaaaagtaagactattctaaaaccaaaaaaattttaaaaaatggattagtgttgttatgtagtcccagattatttttttcagagccacttgtcttgagttgaaaaattacttacttaaatattctgcttagattatgtcttctagctgtatggttagaaaggggaccttcctgtaggttatgtttctcttgactcgcttccagtagaggactgaatttttgttgctgtgtgcctctttcatgtttgctggttttcttttttttttttggagacagagtctcactctatcgcccaggctggagtgcagtggtgcaatcttggctcactgcaacctccacccctgggctcaagcaattcttgtgcttcagtctccagagtggctgagactacaagtgtgcatcaccacgcctggctagttgttttttttttttttgtattttagtggaaatggggtttcactgtgttgcccaggctggtgtcgaactcctgagctcaagcaatccgcctgcctcagcctcccaaagtgctagtattacaggcgagagccactgcccccggctgctgtttttaattttacttgattctttacccataattgtctgcaggaaacctttaaaaaaaatgatacaagcagcgaaggtcatatctttaggaagtggaaggaaagggagatgattccccactaatgtgcagccaggcaggtgggggagaatgcggtagtagtgaagaaccccaaggaacagagttcagtggtggcagttttgcaaaggagaggaaaacagggtgggtcttagggttatttagcaacaggaaagaaagaaccaggaggctggttaaaagcttgatggatgtcctttgaagtagaatcgctgactggaaaggattgtatggggtgtcccatcagattgtgacactatagggagtttgtgttgatgaatggaatagtaggaaatgactttggatagctaggacagagcaagattatggagggcgtttcccccatcttgttagattttttacaaaaagcggtttactgaagagtcacagatgacagaggattcccttatatacaacctatggtacctgttcataggaggagcctgcagtaaattttctgagcacttgggatagcaaaccactgtgcctatagggaaaacgcagcgggtcttcccccgaccccagaagctgtccgtctcacagcctggaaaaagtgtatggagggcttttaattgttggcttgaagagttt

SEQ ID NO: 89036 - DNA, 1053 bp, Homo sapiens
tgtgtgatttaagtaatctatgtaagttatgtatatttaaccaagtgacttaaatatagtgaatattcagatattgtctgttatgtaactgttagtcattgccaaatgtgagtgagaattctgagttagacagtcacctgccttttggaacctggactttgaaactgatcagatgaaacatttctaggctaaacagcattgtatcttctacctagaggatacagaaggaagtcaggagagtcatgaggccaaaaaattagctatgttctccagatgatagaaagcttcaagagtctagaccttaaaatccttaccaggagagttctccactcaattacagataagctctgagtgaatgaaagacacaccagactttcaggaagcctcttcttctctcccaagtctggccttacagaaggctggaagagttctgtgatagtgtattgtaggtatgtgctaggtaccaggtgtatttcctcaatctcagggtgagactagataaaacttgattctcattcactcaggcataaatatagttatcatttgtcgcctttaggtgctccacccaaacagcctgagctaagtaaattcctgaatgtcagtactgtggaacctgaacaaaggtcacttgcccagttgtctctgagtgtcatgcagcaggcctttagaccaactagagggcctatactggctgaacttgatcaaataattttgtggctaaaacagataacattttatgctatattctaaattagacactcagtagtagttaaggaatgagttttggactttatcctaaaagcaatgggaaacaataaaaaagattttgagtaaggagatggaacccatcacatctgcattttagaacaattactgtgttacagtgtgaagaatggaaactaccaagattgagagcagaaagattcgttaggatgctctgaaagtaacccagcgaatgggataccttggagtagaattatggaagagggatggaaagagttgggcaagttcaggagatgcttaggcatcttactaaatagtaaaggtcttaat

SEQ ID NO: 89037 - DNA, 1401 bp, Homo sapiens
tgcacctggcctcatactttcattcagaacaaatgaattctaggcctcagtttagctttctctcccagttctcttaatcctagttggtactcccacaggtgcatgccattggtcttaaggctagctgtgcaggagaaggtaaatggtttgatagagttctttcccattgttcaattttaacatggaaaaggcacctcctactctcataattggcaacctctgtttacttaagcacattacattagtttatattgccttattttgaatagtgttgctgaaggaccatttattactggagaaaacattgatacttccagtgaccttatgctggctcagatgctacagatggaatatgacagagaatatgatgcacagcttaggcgtgaagaaaaaaaattcaatggagatagcaaaggtattataaccttattgtgacaacttcattgagtggtagaaaacactcataatgtgctcctaagtaaatcttcaactatttttgcttcttaagtttccatttcctttgaaaattatcgaaaagtgcatccttatgaagacagcgatagctctgaagatgaggttgactggcaggatactcgtgatgatccctacagaccaggtaccaaagtttttactttctgggggcagcagaatagaggtataggaagactaatcttttcaatgaactcttttagttttatatttttctttgaatctcatttggtaatttactcttagattcaaatgtcttttcagacaacgttgaatgcagcaatgtagtctttgctatttttatatacctggcttatttcaattgcctttagcaaaaccggttcccactcctaaaaagggctttattggaaaaggaaaagatatcaccaccaaacatgatgaagtagtatgtgggagaaagaacacagcaagaatggaaaatgtaagttacagaaagtatctatctctgaatttagagttttgtttgaatacctttcaaaaacaggattctaaatataataccttagatttctaaaaatgtctttctttctaaagatgtttttagataacaatatggcaatatcatggaaactgagacattaatgaaaatataaagtacctcagaataaaattccataacagtgttgaaaaactattttgactcacattgattctaaaattaataaatagttattatgaaattaacatttattcttcatcatatctctataaaatagcatccctacccaaaaaacagataacggtggcgattggggaatacaaatgggagggagaaatacttttcaccatatactcttttgtgcattttgaatttattatcttgtgcctgaactacctgtgtaaaatcagaagtaaagtgtaactttaaaaaatagcattctaggccgggca

SEQ ID NO: 89038 - DNA, 1050 bp, Homo sapiens
aagctgtagtgagccataatcatgtcactgcattccatcctggacaacagagtgagaccctgtctctctctctgtctctaaaaaaaaaaaagatattaggccaggcgtggtggctcacacctataatcccagcactttgggaggccaaggcgggcggatcatgaggtcaggagttcgagaccagcctggccaacatagtgaaaccccatctctagtaaaaatacaaaaattagccaggtgtggtggcgggcgcctgtaatcccagctactcgggaggctgaggcaggagaatcacttgaacctgggaggtggaggttgcagtgatcagagatggtgccattgtactctagcctgggtgacaagagcaagactccgtctcaaaaaaaaaaagttattagaagtggctcagaaaatattttgtgattagcagtcattttcacttacagtgctttatctcttgcaggaaaaagcagttgatcctaagacacgtttacttatgtataaaatggtcaactctggaatgttggagacaatcactggctgtattagtacaggaaaggagtctgttgtctttcatgcatatggagggaggtaaatgagcaaaatatgataccatgatatgaaaacttagtctcttctccccaagattaatgaatttacacagaatcaaagataatgctgcatggcaagcagagtaatttttaaagtgttattgtagaaagtctaggcagtataggaatgtataaaaaacacagtcatcctaataccaccacccagagataatcattaataattttgggtagacttctccagtttttttcaatgcgtatattattattattattattattattttttgagatggagtttcactcttgttccccaggctggagtgcagtggcgtgatcttggctcactgcaatctctgcctcccgggttcaagcaaggtctcctatcccagcctccagagtagctgggattacaggcacatgccaccacgcctggctaatttttgtatttttagtagagacagggtttcgccatgttggc

SEQ ID NO: 89039 - DNA, 1552 bp, Homo sapiens
gaaacaggatctttttgtagtaggacaatgacaaggcaaatcttataaattggactctatcctagagaccttccaagtaagggatctcttgtatggcatttttgctagggcctcacctactatgtggttaaactagtccaatgaaaggagcttatctcaaaatctagcctattctgtcataatgtcttttaagttattagagatttcttccctgaaaattgtgtcatctgttaaccaaatagttgagcagctgtcaagtaccaggtactcttccaggtactagggatacagcaatgaatggtacaaggaaggtctctggtctaatggaatatgcttcccccatcctcaacccctctccatgacaataataaacaaaaaatatcagatatatgctatgcagatagttaaaataggatgatgtcatagtgacaggctgactagctttattagtaggacagggaacgcttctccaatgaagtgacatgtgagtgacacatctaagatacatcaaagatcaggtggatgggcattctggactagagaacagctagtgctaatgccttaggacaggtacaaagttagtatctttgagggaagcgtaagaaacccagtctccctggagcataggatgtgaatgggagagagggggctggaggagtaagcaggggctggaccaggtaggattttgtaggccagggtaaggagtctgctctttgactgccctggaaccaaagctatgagttgattcttattttcaaaagattgctgtgtggaaaatgaattataggaggagaagagaagaagcagtaagatcagttaaaacgttgtagtagttgaagtgagaaatggtgaagggttggactagggagggcggtagtggaagtgaagagtaggagagcgttggtgtgtgttttgaaggtagagagaacagcacacgctgttggattggaagtgggtgtaggaggatagattctgggctagagcagctgatggtggtaccgtttgacgaggtgagagcctggggaagggtagggtgaggactcagcatgagttttgttttgggcatattaaatttgagatgcctgttagacttctaagtgatgtcatgtagttgttggataaatgggcctgaagttctagggaaagtcaggactgggatagaaatgtgggagttatcggccaggcgcggtggctcacgcctgtaatcccagcacttttggaggccaagatgggtggatcacctgaggtcaggagttcgagaccagcctggccaacatggtgaaaccccgtctctactaaaaatacaaaaattagccgggcgtggtggcatgcacgtgtaatcccagctactcaagaggctgaggcaggagaatagcttgaacccgggaggtggaggttgcagtgagccaggattgcaccactgtactccagcctgggtgacaaagtgagactctgtctcaaaaaaaaaaagaaatgtgggagttgtctatatagagatgatatttagagccatggggctaagtgaaattgcccaggaagagaaggaaggttt

SEQ ID NO: 89040 - DNA, 1378 bp, Homo sapiens
ctgtccctgtgcccttccattctgacagtatcgttcactcgatcttcatgaagcacgcatttgagagtgccatacacagaaaccctcgcgattccccaccacctctaggaatttgtccaggctcttcacagatgtgcctctgtcctgtcctttagctccaattttttttcattatctctctccagccaagtcttaactatagtgtttgttgttcctcagacatgtcctgtggtttcctgcctctgcttttgttcatgctgttcaaatcctacccattgtcctgtttctgtttcagatggcacttgtgccatgaagtcttgcctgacctttccaatgaagagggacctttcctattcatgtacttcttttattctccgttgccacttcttgcagacttgtggggcaggaaccatttgattcacctttatgtctgctaggagtgaaagagttattttttaaaaagctgttttatttgttgctttttattgaattttgctcctgaaccatattgggaagactgtagcctattttcaagtgcatatgtcttcattgtatttcaagcttgattccgtagtcattaagtgaagaacattatgtgatagatggttgaaaatcggttgacaatttatttgaaagtatattttatttaaaaaatcaaaccaaaacctaaggctttattaagatccaaaacctaaaggcttaaaaaaacaagacttgacactgagagaaggtagatctaatttagtgttacagaatctttattttgaaattgttgtacttgtgagctggcaacttgtactgacttgattttttttcttccacttagcatggaggatgaaaaggaagatagtaaagttatacctacagaatgtgccatcaaggtatttaaaacaacccttaatgaatttaagaatcgtgacaaatatattaaagatgatttcaggtttaaagatcgcttcagtaaactaaatccacgtaagatcatccgcatgtgggcagaaaaagaaatgcacaatctcgcaaggtaaagaaaatattgtgctagacgtaatcttgggtaaatacctttttgcattaggataaaaaaatccatgctttcttttacattcatttatagaaataatgaaaggccaggtgtataacctcgattcatacttttaggatgaaaaagccattttcttttttctttcctcaatgaagcttgagggaaatctgggcattttctgccttagacactttatcatatatctaaatgccatttttaaattgcttttatcacgaagtaaaacttccagcatccaattaggcttagcataaaaaaatggtttcttttttgtttcagaaaatgtttgttgcatttaatttgttaattttgtgg

SEQ ID NO: 89041 - DNA, 1049 bp, Homo sapiens
ctggaaacgttagactcccaagaccttgtctcaaaaagaaaaaaaaatgttttttcaataaattaattaattccaggtagaatcattttctagaaggtcttgctgtcctccagtctcttttctgtactcctgaaattcctgcctttcttaaaattcttcaacagttttccatagtggagcttgcctgtctttgtagcctcagcccacattgcccttcctcctactcacagatccagctatgttgattgatatacattccccaaatggactgtgctcttgaacacctccctgcattcccttgcactgtctttatctggctaattcctgttccctacctcttcttctaataagccatccttggtgctgtgtgctcctgtagctcctacccatacctctgccagtgcgtaattgtaattgtctcttgtctgtcatttccatcagtccctgagctctctatgggcagaggctgtgttttactgtctttgtattcccacatcaccagggtagaacatagtgccagctcattgcaggccctgattagatatttattgaataaatgacatattttctctccttctgatctgtatattctgaatcatttctttatgtatagaatgcagagagctggaattccttgtccaacagttgtactactgaagaaacacattttagttatgtcttttattggccatgatcaagttccagcccctaaattaaaagaagtaaagctcaatagtgaagaaatgaaagaagcctactatcaaactcttcatgtaagttgtgcttttaaaagaattcacacactacctttaaaaaatatttcctctaaactttaaaaaaatttccttaaagaagccaggcatgttggctcacacttgtaatctagaactttgggaggctcaggcagtaggatcacttgagcccaggagtttgagaccagcctgggcaacatggtgaaaccctgtctctactaaaaatacaaaaaaattagctgggcgtgtgcctgtaatcccagctactcgggatgctgaggcaggggaattgcttga

SEQ ID NO: 89042 - DNA, 1084 bp, Homo sapiens
tatgtcttaaaaaacaaacaaaaaaacccaagttccttagatagtgctatttcaaggtgctataacaaagacaagttgaagtttgtgaaagaatgttaacactgaagagttgtttttctatcaatatgtgtgtgtcttaaatagttttagaaaacttacagacttaaccagggaagtcgtcattgttaggattagtgacacagtgcatgaagctatttttcaccaaacttcattaaataaaatttgctgttagtacatttagcaaagtgcctcattagtttgtgagctttcatgaatgttatagttttttggggcttttttttttttttttttttttcaaataagagacagggtctcactatgttgcccaggctggtctcgaactcctgggctcaagtgatcctcttgcctcagcatcccaaagtgctgggattactggtgtgagccaccacacccagccattgaatgttacagctttaacagtgaaggaaaggaagcaggtctggtctcatcataagagagtgatgatgaaaattgaaaacagtagggagtgcaggtgttaagttggaaggcatgttgggaatctcaaggaaactacatgctttgaaatagcaactgaattcaatctgagggccttccaggttgagacaatgctcctaatactgccattatccctctgtgttttaattgaacactggagaaacttaatgtgctactttatgcaatctccacatgaagctgtcatgtaatgcagccattgatctagatatggaaattttaatccaaattaatttttaaagatatagctagaaaggtgatccacctttctctgcctccaaaggtaaacattgaaaggaaaatcaagtatgtttttctggcctctttgggaggtggggtggctggggaagagattaaatagtgatgaaacttttctatttaattctattaaggctggaaaacaaatgcattaatgttgatttctactgtaagactttgaggggggctgggcgcagtgctcacgcctgtaatcccagcactctgggaggccgaggtgggcaggtcacgaggtcaggagattgagacc

SEQ ID NO: 89043 - DNA, 1065 bp, Homo sapiens
tagtgaaagtatttcctttacatattcaaagcaatgccaagtggttttatttatagcactcatttttatagctatagaaggtgcagtggtatgagctaaatccagaaggcaggatggatgtgtgagaggatgaaaagcaactagaacctgagtatagtccagcttggaagcaggaaaatcgatggttgagaaatgaggcaaggaatgtagtggctcaagagatcctccctccttggcctcccaaagtgttgggataacaaggataacaggagtgagccgccatgcctggctgagccagtaatttttactctcttaaaaactaggttattcctaatgattctgcctttgagttgaaattactgtgtgtgtgtgtgtgtgcgtgtgcacacgtgcatgcatccaagtctttttataaatgtgctgctccctgtttttagtttataagagaacattgctaatacttcttactgactttcttgtatttccttactagtttttccagaaaggaggagtcaaggaagcccttagtgaacgagaactcttcaatgctgtttcaggcttaaacatcacagcagataatgaagctgattttttagctgaggtatgtgataaacagctgtttttcaccttgctggtcatgcagaactgcatagaggagataactgaaacccagagctagttttatcctccctttcccccaaaacaaaattaatttgagatttttcttttcttaagatgtttttggttttttctttttttctttttttttttgagatggagtcttggtttgtcactcaggctggaatgcagtggcgtgatcttggctcactgcaacctctgcctcttgggttcaagcgattctcctgcctcagcctcctgagtagctgggattacaggtgtgtgccaccatgcttggctaatttttgtatttttggtagagacagggtttcgccatgttggccaggccggtcttgaactcctggcctcaagggatccacccaccttggcctcccaaagtgctgagattacaggcatgagccactgtgcccggcctgtttttttcta

SEQ ID NO: 89044 - DNA, 2577 bp, Homo sapiens
tgagccgagattgcaccactgcactccagcctggacgacagagtgagactccatctcaaaaaaagaaaaaaattactagcacaatctaaaatatggtttctgtgaaaagtaggattttgacaaatggattcaatgtattatttttgtagatagaagctttggagaaaatgaatgaagatcacgttcagaagaatggaaggaaagctgcttcatttttgaaagatgatggagacccaccactactatatgatgaatagcactaatacccactgcttcagtgttaacacagcagtgattgtcagctgccaatagcaaatgaagttatgggtgacttgaaataccaaaacctgaggagtgggcaatggtgcttctgtgcttttcccccttgtaacccatgtgccagatgtgtggaatttttagctcagcattgagagaataaaatgtcactacctctcatcttatgaacaggataatataattctttaacagctataggttatctggctgaagtagacctaattttatgtgacttgtggtgtaaaatgtcttgatgataatttttaaaacttgggtaacacttccaaatatgggaggaaaggacagatgtgtttacaagggaggattttacaacatacttgctttattcacctccctgttttgtgttgcgtctttccttgaatattttattggcccagagttagcctttctcaattatgtttccagactgtggccgtgattctaaaggaaaatgtgtgctctttagtgggtagaacaaatggaaatttggtttcagaatggctgacagaaatcgacataagtcatgtaatttttgttgatatatcatgaaaatgaacagaattctttttccatacttatatctaagaaaaggcatcataggtttctgaaagagataactatataacagctttttaactatccagtcaactttcagcttttctacatttaggtaaaatggttaggatataactcatggtgtggctaatctacatttatcaataaaatgtaaattatctgaaaggacagaatataagatttaaccatgtttgacgtattttaatttagttaatgaagcaaaattcagtttatatttcactagaactgtgtacttgattgattttcagagaaatatcacaaattagaaatattaaatctaaggatgaaaggtatatataaaacaatttgggggccaggcacgatggctcaaacctgtaatcccagcactttgggagaccaaggcgggtggatcacttgaggtcaggagttcaagaccagcctgggcaacatggcgaaaccctgtctctactaaaaatacaaaaattagccgggtgtggtggcacttctctgtaatctcagcttctcaggaggctgagacaggagaatcgcttgaacccgggaggcagaggttgcagtgagctgagatcatgccactgcactccggcctaggtgacagagggaaactccatctccaggaaaaaaaaaaaaaaacccaatttggataccaaattaatcaactaatttgagctatctggccttactcttagtagtttttagtacgtgctggacaccacttttaaaaagcaatcactgtgctagaaaagtatattggctttgttaggattaaagttcattaacttcaatgtaatcatgcctcctattactgaagtcagattggaaccactaaagatccaaactttctgtctggtaatagaaagtaaaaatctagacatcatttacatttgagaaagctgtttttaacattattttaaaatgccaaatatgttctttctagaaaaatatttatttttgtttttgttggatagcttttaattacatttcagagaggtgtaattttgggtagatgctcattacatttttgaaaggtttatgattccaaaataaagatttatatgactggtgatactggctttacagaaatttcagagaactaatttttaaaatctttagcatttaaaactttttttgttttgttttctgacatattctgacaaagagcagcaaaccactgctgtgtggcattcttggagtgtgctgtgaatgtgctttttaagaaattaaaaagagatcattttaaaattggttctttgtgtggtatcttcctgttccttatattaacttatgtcctggtaccaagttgctgtttctgtataaagttaagcaatgctattttaagtagattattccccctcaacttctcattgttagatttcaatcgcaaatggcctacttcacattacaaataggttccccccctcacaccttgtagattagagagtagatttttttcccatagtagaaaaagaaagtgaaaaatactggtttgctaagtaaataaaaaatcaaatactggctgggcgtggtggctcacacctgtaatcccaatacgttgggatgctgaggcaggatgatcacttgagcctaggagtttgagatctgcctgagcagcatagcagacctcatctctacaaaacattaggtgagtgtggtggcatgcatctctggtcccagctacttgggaggctgaggcaggaggattct

SEQ ID NO: 89045 - DNA, 1026 bp, Homo sapiens
ttgtaaagggggaaaagactgtacttcaggcgtatcagcggcgccgatgcgcgaaccggtgttagaacttggagcctcgggaacccgacccggtgtcacggtggcatccttttcgctctctgctcttggtttttaaaattcacctgagcagccaaacatctgtaccttgatatgtgccgtgttactttagttgaacccagggtggtgtataacagaaataatcgcttgcgggttggcttctgagtttagatcctttcagagttcaggctgttaaccttgctgcttttccctctcaggtttttgctgttcgatctggtggagctactggcgtggtagttaaaggcccagatgataggaatcccatctcatttaggtaatggtatagacactttcagatcattttgtcatgtaaacagaatgatgtttttctaattcaaatggttttttataattttgtcatttggtctgccctaagaggcctgaagtctgtgtgcgcacatggaattcctgtctgtagggagggtcttcgtggcacttactagcacctcttgtcagagtggaatatctggagcagttgatttgggagccaaatacttcaaaagtggggcagccacttcctagcactggaaattaacaagtcagcgtgatgatgtgcccatttctggtttgttcacagaggagggcgttcatttctttagcccaggtctttccagagtggcaggtggaggagattcattgtttctcatgtaataatacaagaaaatcatggcttccactatacttaaggtgactgcatagtcccagttcgcactgttgaacaggtttaatgatcaacagcagggcctttcactttcagaagtgtctcgatttggatgataagctatctggccactgtaacactggtgcttacagaaggtgaaagtataatgtaggccctcaattcagtagtgacttaaaaaattttactgttggtctgtgttaatgagaaactgtccttttttgagagggagcctccctctgttcccc

SEQ ID NO: 89046 - DNA, 1008 bp, Homo sapiens
acaagtgagaatgttcatttcacttagtgggtttcttctgctttttattctcagagcgcactgtaaggatcttctgacagtttgctgttattgatttatttattaattgagactgaatctcgctctgtcactcacgctggagtgtgatggtgcaatcttgactcactgcaacctctgcctcctgggttcattcaagcaattcttgtgcctcagccttctgagtagctggaattacaggcatgtgccaccacgcctggctaatttttgtatttttagtagagatggggttttaccattttgtccaggctggtctcgaactcctgacctcaggtgatccgcccaccttagcctcccaaagtgctgggattagtttgccgttttttaaatgaagatcctgtttcttaaactctgcttcaggtattaccagagaaacggagtctgaaactcttgaagagccacaatctcaatgtgaattggtacatgtactgccccgagagcgccgtgatcttgctgtctaccacggtcctggagaatgtcctgcagccttttcactttagggtaagaggaagcctcccctgaaaaaaacacctttccccagttgtcccctgttcctgtagcatcctaatgtgtcaggcacgttagggacaggttcctctagccgtaacgtcaccgctctgaccactagagggcactctgtatacccgtcagctcctggagccattcattctatgctgggcagacaggctgtgagaggacatgggggacggtggaaaggatccaaagacgaagtctgtgtttatccttgttggttttacacagggaatgatgaaacattgaaggggtttaataagcttttcctaaaacattttccccctaaacaggctggcactatgtcgaagctgcccaaatttgagattgaattaccagctgcgcctaagtcaactaaacccagcctttccgaaagagacatcgcaatggctaccatgtatgtccgtgtcagagagaatt

SEQ ID NO: 89047 - DNA, 1050 bp, Homo sapiens
agatcgccaaagcctaggaggtggaggttgcagtgagctgtggttgcaccactgcattccagcctgggtgacagagggagaccctgtctctgaaaaatgaaaaaaaaaaatagtgattatattttcctgttattaaggaatatacattcattatacaaaacttggaaaacagagaagaaaatgaacttagcatatcactcaagtataactattacatgtgtttctttccaatcattttagactctatgcttaggtttggggttttcttttaaaatattatgatcaagctgtgtttagtgtgtgttctcttttccacttaactttataataggctttgagtaactgcatgtttctttgtaaacacttgttggcagcaaaatactccattaagtgaatatcttataatttacttaaccgtgatgccatttagaacaaaggaattttgaatggccagatgtgatttatgtctgtttgttccctaattagatacgggcagctgtatgttctcttcttgaggcatcattctcggacctccaacagcacaggagcggaggtggtcctctatcatctaccacggtagatttcatgctttgttttccctctctctctgattttaaaatgtgaactgcagcttgttgatctgttttttgctttctatcctacagagaaggtgcctgtaaaaagatgcacatattgaagttaaataggacgggaaagtttgccctgaacgtggtggacaacctggtagtcgtgcatcatcaggatacagaggtacaagctgtctgcgtttctaccaaagttaaggttgcttaaaagccttgtgaaaattggtggctgggcacggtggatcacgcctgtaatcccagcactttgggaggccaaggcggacagattgcttgagcccaggagttcgagaccagcctgagcagcatggcaaaaccccacctatataaaaaatacaaaaattagccgggcgtggtagtgcacgcctatagtcccagctacttgtggggctaaggctggaggatggcttgagcccaggaggtcggg

SEQ ID NO: 89048 - DNA, 1025 bp, Homo sapiens
aatggttttgaggccgtgtggaccaggacaactagaatgggtcctgtgggctgggcctctgatataaagaagctgcttacctcctctaccctcccagagggtggtgacgctaactctgtgacacgtgaggatgtttccagttgaaatgacagagatctgcttaggtcactttgagtgagctcatcaaaggaagcatgtcataaatgcaggaaatacttgtgagaggagataaaaatattaaaagagagttgtgatgttaatgacaaattccttctcaagtaagagctagcctgtagggaggaaatgcaaacacaggcttttaaactgatttaaacagcaagatgggatggaatgaaagcaactgggcaaaccatgattgattttggcctcagtcttgtctttttcccccccagacatcggtaatattcgatatcaagttacggggagagtttgacggctccgttaccttccaccaccccgtgcttcccgctcgatcgatccagccctatcagatccccatcacaggtaacacgggttctgtagaggagtctgtgctgccctttcaccatgtggctgtgttctcaccatgatctttgggagtcacgttaaaagtggagtgaggaataaacagagattcccagatctgtctgattttgccaggggccatttgttccagttttgttgttgttttgagacagtctcactgagtcacccaggctggtaggtagtgtcgtgatcttggctcactacagtctccacctcctgggttcaagtgattatcctgcctcagcctcccaagtagtggggattacaggtgtgtgccaccgtgcccagctaatttttatatttttttaaatttatttttttgacagagcctcactttgttgcccaggctggagtgcagtggcatgatctcggctcactgcaacctccacctgtctgtcacaaggttcaagcttgtgaggtattcaagcaattgaaccaagtattcaatcgcttaaatacttgtgagaggagataaggtt

SEQ ID NO: 89049 - DNA, 1028 bp, Homo sapiens
gcaggaggaccacttgagccaaggagttcgtggttatagtgggctatgatcaactactgcactcaagcctggacagcagagcaacaccctctcttaaagaaaaaaaaagataattaagctacaagccacatttatttgaaacattctccgtggatgatctgggtatttgattttgaatccttcaagtaaatttctcagttccttaacgtgcatatgtaaacgatcatgagtcatctttggttattaaaaataacccaaaccacagtgattgaagccttgacatgctttctttttcttggtgagattttcctggattgttagctccttcccccttcctccccgtacgtgctttcagtgagacggaacagttcatttcttccttgactacaattgaataaacatttcgtaatgacattaaaaagtattgacttttgtgtcataagtaccagcatttgcagcattttctgactgcatcgttgcacttatgttttctcaatttgtaggtcctgctgccgtgaccagccagtctcctgttccatgtaaactctgtatcctttactaaggtgtggcaccgtgcacaacagggcaagtggtcaccctcagagagtggtcctgaagtcctcctccgggcagctgtgaataacactccgagagccaccccgcaggcagcttccctgactgtccaggggcctcgcgtttagcgtggactcagtacatggtgggcaggggcgagtgctagcggaaactgggtttgctttttgttttcatcttttcctggtttagaatttcctataacatgtggattcttcatcttggattgtctttcaacctgacatcattatcagcgcaagccaaggtaggtcagcggggacagttgtcgtgttacaacatggtgcttgttgactttggatcccagttgtagccagggacgttttcaaggtgaatctcttagaaatgacccctcctttcaagcgtgggaatgggatttttttttttcactttatacgttttttactatatgtgcattt

SEQ ID NO: 89050 - DNA, 1854 bp, Homo sapiens
cactgaagagcgatacaaaggaacagagcgcgaacggcttctaaatttctagccctctcgcagggcatcctgactgaactgtgtctaagggtcggtcggtttaccactggacgggtgctgcatcggcaaggccaagttgaacaccggatggtgccaaccatcggttgtttggcagcagctttgaacgtagcgcctgtgaactcaggaatgcacagttgacttgggaagcagtattactagatctggaggcaaccacaggacactaaacttctcccagcctcttcaggaaagaaacctcattctttggcaagcaggaggtgacactagatggctgtgaatgtgatccgctcactgacactctgtaaaggccaatcaatgcactgtctgtctctccttttaggagtaagccatcccacaagttctataccatatttttagtgacagttgaggttgtagatacactttataacattttatagtttaaagagctttattaatgcaataaattaactttgtacacatttttatataaaaaaacagcaagtgatttcagaatgttgtaggcctcattagagcttggtctccaaaaatctgtttgaaaaaagcaacatgttcttcacagtgttcccctagaaaggaagagatttaattgccagttagatgtggcatgaaatgagggacaaagaaagcatctcgtaggtgtgtctactgggttttaacttatttttctttaataaaatacattgttttcctaagttttggggttaccctatctgctttgagagacaaatacaaaagctaaatggaagagattctatctaacctgtccttatggtaactaaatgccgtcttacattgagctagaaatagacctagaagtttcattagacagccctgatccttccctatcctaaagatgatgtcttaggttgtataactatttggagatgagaatgatcaaccagggccaggtgcggtggctcaaacctgtaatcccagcactttgggaggctgaggcaggcggatcatgaggtcaggagtttgagaccagcctggacaatatagtaaaaccccatctctactaaaaatacaaaaatcagccgggtgtggtggcacgcacctgtagtcccaactactcaggaggctgaggcagaagaatcgcttgaacccagcggaggttgcagtgaaccgagatcacaccactgcactccagcctgggcaacggagcgagactctgtctcaaaaaaaaaatgagaatgatcaaccaatgtatacttcataaaactgaaaccttaataagccccagaccctttaaaacccttagccaccatttgccgtcttattcctggctttaagagatattccaagatctgctataagagatgggctgtgcctgatctgggtcctaaatgtgtcttgactcaaaacacacctcctcggtgagttccagagcataattcagattctgtcagtatactgaattcactctactacaaataatgggccaagggctaggtgggctgttatcaaattgtgttgtttacaaaaatgctaacccagggtcctcgcccaccagctgccagtgccctctgctactctttgaggctatggttaccccaagtcttttcattgcattctcacctggtgtgaaattggggctccctcgcaaacgctggtttcgctgttcaaaaaagcggaatattgtatagaaaagcatgttgtcttcagtctgctttgcagcatctaaaaattttcgtgcagaaatgttgtcatggccaccaatgccccggataaaccttaaggcagctaacacttggtgtttggaaaggagaacttctactatttcatcatttg

SEQ ID NO: 89051 - DNA, 1037 bp, Homo sapiens
ggccctggggggaagactggtggtgttaggaatcatgagtccagctggaggcatctcagccaggaacctcctggcaccctcttattctccatgatcctcgccttgcttagttactatcagagtgttcacactctctcctattcttttatctttctttcaggactcctacatggtggattatttcaaatccatcagtcagtacctgcatgcgggtccgcctgtgtactttgtcctggaggaagggcacgactacacttcttccaaggggcagaacatggtgtgcggcggcatgggctgcaacaatgattccctggtgcagcagatatttaacgcggcgcagctggacaactagtcagtaccaccttgtcttgtacttcagaagcagcggaggaggctctcagccaggcagtcagctcaggcctgaaatgtctcactgaaaatagactttcttggaaaagttgtttttatgcaaaatgtatgttaaatctggctttaccttaaaaaacctttgaaaggactaatttaccacctaatactttgaaggcttttttcattaagtgctcatgtagtttttcttttgactgttagcagtataaaacgtagaaaaggaagttaggttttaagaaaaagtactgaaactaaagacttcctccctgtggagcaggtcagtaaccctgtctgtcctctctagtacccgaataggcttcgccccctcgtcctggatcgacgattatttcgactgggtgaagccacagtcgtcttgctgtcgagtggacaatatcactgaccagttctgcaatgcttcaggtaccttctcctttaccaaatctttcctgttttgctgaaaaattttcaaattatcatttaaaaatcatttgcatcgtgcctcagtttatacctatttgtatatcaaagctgggtctccctgtgtcatcattcctttcctcagtcattcattctgaaattgtcatgttgttcctggctcagacagccaccctcggggctgcaagctgaacaaggtccacatgttcggagtg

SEQ ID NO: 89052 - DNA, 1071 bp, Homo sapiens
tgtctgtccattactcttcccagactggccccctccttcaggagcccccttggtgggcaccccatgctctaggacaggacatcttttctttgaattattattattttttttttagagatgggatcttgctatgttgtccaggctggactcaaactcctgggttatagccatccttctgcctcagcttcctgagtacttgagattaggcgtgccaccatacccggcatacaggacttgccaaaccaccatcttgctctcattccctctcactgttctctctccctccctttttcctcccacagttgtaattgtgtgagacacccttttgtcctccctctttggtgaaatccccctcatcctcggagctctgggtctgtacagtctcttcctcttggctataattttgccttttagtgtttgctccctcctctgtgcctgcatagcgccatgcaccatgtgccattgatggcactgggctgtatttgcctgcctcttgcccagtgattctgagctcccaaaggtgagtgctgagctgtattactcaactgagaaacctcagggcccatgttgtccttagaatacagccagcctcatcaaatgttcactgtgtaaatgtttaggtccctgatgtcttgaggcccttctaactgggaggtgttttctaaactttttggcagggctcctgcctctctgaatgatacaagtttgctccatgacccttgtctgggtacgtttggtggaccagtgttcccgtggcttgtgttgggaggctatgatggtaagtaagagaagctttgacttttccttttagataaagtcatctcggttttgtcattagcatcaagtggtaattatgaagatttcataaattgggcagttttgttaatttcttacctcttgaatcccagaatagtatctcctttggctttgggtttgggtttcattccagatttaaaagaagtggattgggttagccatttttaggtcacacatgcctttgagaagctgtcgaaggctaagtacctttccccagaataatgcaattgcaaacctctgcattgttgttcagct

SEQ ID NO: 89053 - DNA, 1401 bp, Homo sapiens
gcatttggggcaagatccatcccattgctcctagaaaggcatgtaaaccttcccattgtccctgtcacacttgccttggagaactgtacctgtgcataaactgtaccggcttcttttttaatgaatgtataatcacatggtttttcctttaaacattgctcatgtctacaagaaagtctgcaatcttgaaaagcattaaaatggtcccaagacttgaatcttttctctacccagtgactgtctgttgctttttccagcttgttgctgaaggtgaacagcatagtcatttacctccaagatcatcttctctgttaggaaataaggggacatatataaatggctgtagtgcagagcaaggcaggaggttatgtgttactattgagaggagggtcagggagaccaggagtccccctccactctcccctctggcctgctggccaccactggagaacggtggaggggagatggttgtgtgtcctatgttgatagctgttctggtcatggtgttccccctacccctcgccgcctctgtggacgcctctaactagtttgctgttagagtgggcctgtggcctgaccagttttcttactgtattgcatcttaattctctccctcatcttaggaagtattttccccaaatactctttgtcttctgaccctcagggcaatgctgattaatcaagatctgagagaaatgtgacgtgtttctgggtttgcttatttttaaaatcttctttcaggttcttgacttacaaatagccatcgaaaacattactgcctcttatgacaatgagactgtgacacttcaagacatctgcttggcccctctttcaccgtataacacgaactgcaccattttgagtgtgttaaattacttccagaacagccattccgtgctggaccacaagaaaggggacgacttctttgtgtatgccgattaccacacgcactttctgtactgcgtacggtaagtggcaagagacaatcattggtagacaccattcttgggtctgacttagggtacatgggcaaaagcttgttttatgagcataacccagaggtgagcaaacaacaagaccttgccctgtgaagtttacatcatcttttttttttttttttgagacagggtctcgctctgtcgcccaggctggagtgcagtggcgcaatcttggctcactgtaacctccggctcccaagttcaagcgattctcatacctcagcctcctgagtagctaggactacaggtgtgtgccaccacgcccagctaatttttgtattttcagtagagatggggtttcgccatgttggccaggctggtctcaatctcctgacctcaggcgatccgcccacctcggcctcccaaagtgctgggattacaggcgtgagcttccatgcccagc

SEQ ID NO: 89054 - DNA, 1856 bp, Homo sapiens
tacacctcccatccccagctttatcttacatattccctgtccctgccctgcaaggagctctggttccttttattggagaatggtatgtagaaacgaagatctgggcactaggtatgctcattgctgctggaaagagtagcatgtttttgtttgtttgtttgtttttttgagatggagtcttgctctgtcaccaggctggaatgcagtggcgcgatctcagctcactgcaaccaccgcctccctggttcaagcagttctcctgcctcagcctcccaaggcacgtgccaccacacccagctaacctttttgtatttttagtagagacagggtttcaccatgttggccaggttggtctcgatctcttgacctcgtgatcccgcccaccttggcctcccaaagtgctgggtttacaggcgtgagccaccgcgcctagcccagtagtgtgtttttaaaggacctaaaagttttaaataaaatgagggccacaaggtgaaattatcctttattaattgttctcttaacatcttcttaaattttctcctgagactggtgagcagagggacccagagcaaggggacttaggggaaagaaggcagtaattagggaggaggaggccaggaggaggaagaaagcatttcatgggattacaggaatgtcccaaaaacaacctcactgtgatgaagtccactaatgctatttcttcacttctgtttttcagaaaacggtattttgtctccgagtacactcccatcgatagcaatatagctttttctgttaatgcaagtgacaaaggtaggcatatttgtccatgaataaaagggttcagatgatgctgtctgtcatgagagcattcgtttcctcagtggggttgcagcagtgggtgaggtggtgtgccagtgccgaggacacggctgcgaccaaggcagacatggtccttgcctttgtggccctaccatctagtcagggtggcacagcagaaccaagtaattaatcatagctggggaggcgcgaaagcagcaggacaagagtgggaatagcagggcagggttgaacctcacccttcagaggctcctgtgtcggcatctcctctgtggggtgggaatagcgctcattgagggcagccaacaaaggtggctttgctgagcagataggtagctgagggcaggggtctcatatgtgtccccaggtgggcttgattcctgccatgagatagcaactaatgctttccctgttccgactttcaggaacggcttggctcttaacctccaccttcccttcctctcccgttcttccaggagaggcgtcctgctgtgaccctgtcagcgcagcatttgagggctgcttgaggcggctgttcacacgctgggggtctttctgcgtccgaaaccctggctgtgtcattttcttctcgctggtcttcattactgcgtgttcgtcaggcctggtgtttgtccgggtcacaaccaatccagttgacctctggtcagcccccagcagccaggctcgcctggaaaaagagtactttgaccagcactttgggcctttcttccggacggagcagctcatcatccgggcccctctcactgacaaacacatttaccagccatacccttcgggagctgatgtaccctttggacctccgcttgacatacagatactgcaccaggtaacctgctgtttgaagaaataagtcactctagatgaccttgtggtttgctggcttttacatgttgactactgctagatggggatttggggctgaatgtcatggtatatcttgaaaatcttagcgtataatggcaaagctgcctttaagttaggtttcaagaaagtgaatgatgttgaacttaatggaa

SEQ ID NO: 89055 - DNA, 1196 bp, Homo sapiens
ctctttacattggggtgttgatgtttgtggttttgttgttttgttcttcatgttactcatgatgtattgatattaattaacctaaatacatatggaaatattctttcattacttagagcttatatagttcctggtgcagatgtgcaaaaatagtgctttagtaattgctaagtcactatcttgcttttctctctactgtgattgagtatttcttacatggaactatagcttcctcttatcaacaaataagcaggaaatagaaattatgtaaataagcaatttccattacctacttcactgacttgacaaataggcatttggtctgctttaattaatatttttcaaaatgttaagtgcctgttgctgttacttaattttgcaggtagcattggaagtttctgtgattgtacttgagtgggcacttcttgttgaaatttaccattgagaccctggtaacactgaagtttgtgttgactttctgtaggtgttttcacagtcctgtgtttggtatggagagtgtggaattgcatatggggacaagaggtacaattgcgaatattctggcccaccaaaaccattgccaaaggatggatatgacttagtgcaggtaagttcattatcttaggcactgggaacacaaaatgctgatcacaagatcctctgtaattattccttaaatgttattgcagggtggaggtggagatgagactaacaggcttaagtcttatcccggactctcaaactctaacctgtggcatacagtgcagagaaagaacaccgtaactccaaaggcttaatttttcaggggctgactttatacctctcataaagtttcccaatagcaggttgctatttagagactgaccttggtacttcgtatgttgcccttgcagcatctgcaaaatatattagaagttagctggttttgattcctagatttcaggactcaaatggactctgttgctaagtggctttgacgtccttgtcccctggtcatttcagtgttttctctgtgttccactgagagcctgtgaattttggctgctaccaggattctgattcctgttctttttttaccatcctgtgatacacagggatattagaactggaaaaatcatgtgaaaagcctggttttagaggcttaaagtaatcaaaagtcaagtcgacatgataacagagttcctaggctcacttgt

SEQ ID NO: 89056 - DNA, 1036 bp, Homo sapiens
ctgaacagattggggtggagccatgaagccaaacagattgggagagagagtgtgtctgcttttagaattcgtaccgatgatagcagctcattagcttcagtctgagcgctagtagagttctatcatggaattatggactagttgtcctgtgtaagatctgaaatacatgttggggggatttttgctttttcttaatgttcaatatgtacagatgatgtaataacattactagactgccttgtttttaaaaccctgtagtcatctaaaaactatatgcagttttgagacatagcctttatttttcccggctgtaattttggtaagctttatcttgagggacttggaacatagagaagcctgggtagaaattaagcattaaaatggcttttcctcagaagactgggaatggttaatcttttgacctgtgagtgattaagaacaaccatctgaaattggaatgactgtgggaaatctttccccatctttcccactccttgactgatgctgtgatcagaaattttactaacataagtaatcaaggggaaaatgagatttttttaaatttgagccagtgggcagagggaaaaggactcgctgaataggcctttgtattcctccagtgtttgttatattacccagaacaaagaatcactctggtcatgaagacagtgtgctctctctttcctgggtaaccctccactcctaaaagggatgcagtattctaagcatggcagattacctacagcggaagcctggatcagtcatctctgatctcgggtgcccctttctgccctttgacctccagctctgtgaagggcatcagctctccagtcaaattgaactgcttgctagcaaaatcctgcccatcttccagggccccatttcacatgctacattatctacgacattcttgtcctgttcccctaactagaatgccttccctctgaagttctgaatctttatttaaactgctgcaacagcatttgctgcctcattaaaagaccttggtgtgggtcttgactcttctctgttccca

SEQ ID NO: 89057 - DNA, 1008 bp, Homo sapiens
agatcctgtctctacaaaaaattacaaacttagccggctgtggtggtgtgcgcctgtggtcccagcttctcaggaggctgaggtgggaggatcgcttgagcctggaacagtgccactgtactctagcctatgcaagacagcaagactctgtctcaaataataataataataagataaaatataaaaatttagaaatgatttaactgttttgtatagtcgattgagaaattaaattggcttaatgaatgtaggtccaaaaaatgattttgacaaattcattggtgttgacataatttgcataagatttttatatttataaacatggagtcaaatatgcaaaaaataatctttagagcaaaaagcaaactcaaagcatttgggtcaaaacatcctgattgttttatacatggtttggatgataaattcagtaaagatacaggcataatccttatatgcaaattagttgatgggtattttctatggtgatttcagacaaggaacctgcaggtcactctggaagatggttacattgaattgagcaccagcgatagcggcagcccaatttttaaatctccacagacgtatatggatggtttactgcattatgtatctgtaataagcgacaactctgggtgagtggaataatacttctgtcagagctgtgagtgagttttactctctttcgtttaatggaattttctggtgtctttttgcaaaatatttgtccttgataccaaaaatacttcactaataagtcttgtccttcttcctttttccatatcaatttcttcataaaaaaataaactgccacacatggtggctcatgtctgtaatcccaacaactaagaaggctgaggcaagagggttgcttgaggccaagagttcgagaccagtcttggaaacacagtgaaaccatgtctctacgaaaactaaaataaaataaaatgtaaataaataaaattttaaaaataaatcagttggatggataaattgtggtgtattcaaatg

SEQ ID NO: 89058 - DNA, 1095 bp, Homo sapiens
tttgtatttttagtagagatggggtttcactgtgttagccaggaaggtcttgatctcctgacctcgtgatccacctgccttggcctcccaaagtgctgggattacaggcatgagccaccgtgcccagcctgtgaatatttttacatagtttgtcctactacacttcttacttgtatcctgccttttccatttatcatcatgatacagtaactagtttattgtatgtgccgagcttcagactagacatttgggatacttttcttgtttactgattatatccacataaggcagtataattacatcacattttcacatgaggaaatgcaagttgagagtttgtctatcttgctaatagtcatagatttagtccaggatcaacttgagattttaacttggtagcgttttctagagcctgtgctttttccagcacaccagagtaagcattaccttagttatgactttttgttacaaaataatattttgctaggtgaatatgtttaatttggctaacagtctgtattcctcaatattctagttattcttgtttctcaatactgcatatcatactactatgaatgtttttgcatagaaattttttctatattcttcttaggatagattcttagaaacatttttaagtctcttgaaatgtagagaactttccaaaagatttgcaccaattttcattcccaccactcactgtaaatattatattgtatatttgaatgcatataggcaaagcaatatgcttttttcatgcttccacagaaaaaatacatttaaacgtattttatttttgcttcaaataatgacttttgtttcacttaatttaattgacttttgttactgaaatacttaactttccctaaatatcagctctgtagtacatagaatgttagcatgacattcatattctgccctgctcagaactttagtacagtttgcagtttcttaagaagatatacatttacattgatatatatttctttttttttctttttttgagatggagtctcactcggtcacacaggctggagtgcagtggcgcgatctccgcttactgcaacctctgcctcatggggtcaagcgattctc

SEQ ID NO: 89059 - DNA, 1054 bp, Homo sapiens
cggttcaagcaattctgcctcagtctcccaagtagctaggattacaaatcccagtgactctgttttgtttacctagtttaacatggccatttttttttttaaataatgagtttggagcaagggagtctgaagtaatttatttatttgcttgttttttaaattgaacatcttcaaaggccagagaaagagccctttgtcttatcccctcacttattttaacccaacttagtataatttgtgtctgtggtttccatatttaaatttattcttttttataaattttctttttccttttgacctatttatttgtgcatgatatttaaacttagattctaggtttataccctaagttttgtgaacgcaagagaaaacaacattttccttttgccaaaaataaataaataaagcttttattacaagggaacggtaaactcatggtgactagttaccatttctaattggtgcattaatgagtaaagtgtagaattcagagatttatgtcagccatctcttcagcgatccatctagaaggctcagaaaagctaaatgctcctgttactttattctcttctcccctgagggaagggtgtcttctgatttatatattgtgctaaagttgcagttttccaaatattaacattaaaatggggaaagtctctgattttacttcttcagagactgcatagtaagctttttggatagagtagtattggaagaacacatactggagttttgaaaaatggaaatggtgtaaggaaagttaatgtgctcaatgtttctctccctcttcctctagattagctctgctctggtatcatactgtagtccgcccgttttttgccttggatggcagtgataacaaggcaggcctggatgaagctaaggaaattctccttaaaaaagaagctgcttatccaaattcttccctctttatgtttttcaagggacggatacaacgactagaggtactgtaccttcctcatctttttaaaataaagcctccgatgatcaaatctctgattctcacttgaggactggtattaaaacgagccag

SEQ ID NO: 89060 - DNA, 1059 bp, Homo sapiens
tttcagctttaacaatctgctttgtatgtgacatgtaaggatttggttttctgtaaatacatactttcacacacataccttatatggtgtgactagtaatgtaactaatttttaatattatttacctctaaaaaagtgttcagatattcaaataaatgaaagtcgttttctataaagttaatgaacatattctaacaaagttcctatgcaagcattttgagaactgttttttttttgtttttttttgagacagagtcttgctctgtcacccaggctggagtacagtggtgcaatcttggctcactgcaacctccgcctcccgggttcaagtgattctcctgtctcagcctcccgagtagctgggattacaggtgtgcaccaccatgcctggctgatttttgtattattagtagagatggggtttcaccatgttggctaggctggtctcaagctcctgacctttattttgaaacagtctcctgagcttgagcccatacgttgtgaatatcctgcatgctgacattttaaagccttaggtttggtttttggaaatcgaaatctgggcctagcacaggactggccctcaatgtatgttggctgaatgaatagatgaagctactggtagaaaaatctattgctgtatgtcatttcttttttcagaaatgatgttggttatcaaggactatttacttttcttgtggcacctaaatgtgtttctgaagtcagttccaaagaagaagttgtaaaaatgtcttgataattgaaataagaagatgatctcctaagaaggggaccaaatcagctatttaaattccagtatgctggctaaacaatcagtttcatttcttgagagtcacatttttatttcaaagatgggattataaagaactgaattaaatttaattgaagtaaaaaagtaaatacattaaatgaactttatctgttatatttgtattggtgtatatttgtcacatacacatacatgcaaatagatgttaacatacacacagacataggtaaaaatcatgttggtgtcttcacctcatctgcagctcttgg

SEQ ID NO: 89061 - DNA, 1051 bp, Homo sapiens
aaattgaaccagaaggggaatcaacagctgaataaggtttgatgaagccaggtaagaaaatcaggtatttccattacaaattgcatttcaggtgacatctgtatttcaggtagccatctctgtcggctccctgcagattggtcagtctttattttcaatagactttttttaaatgccaaagccatttaaagactttgttgtatttgagattctactactatgagaggagtgattttaaagtgatgtccccaaagcctggcctcagagtttggtcatctagcacttttgcgttattcttttggacatattatgtagtcaacaacagtatagcctgttgtcaggtacaaaatatattcatgtgatctgaatatgctgattgcaaaactgtaattagagggtgttggtttgaaattttcctcttgtgaatctaaaaattaaactacagcaatgcatttacataggctatggcattttaaaaagtgaaaaaatggtggtgtgtttgactgctttcacactgagtcaggagagctctgtaaccaggtttggggtgctgggccatgcgtttgtgttctgcctgggagcttcctgcagctgaaggagcagtttcatagctagatggagaggggaaaggtcaggggagccgggaggtatcagcagcagaaaggacggcccggcacttgcggcacttgaacagcaatagatgcagttcacgtaattggcttcctttgatcagctccctcttcctggcaagtgccaaaatcaagctgctttcttggctgttgaactatcaccatgttttcctatgacatagacatgatgtgaccttcatctccatctaattatggcatttggtctgctcaccttcctgccttatggataattgcaggggcccttctctttttagggacagaagggacgtgcatgagccaaccccccattccttttgcaaaaactctttcaatcctgactcttaactgagccagagtgattcaaaaagtgttagcaaagcaggtgtttagaaaagatcacattttgtctggcagtgtgacag

SEQ ID NO: 89062 - DNA, 1251 bp, Homo sapiens
aatggactaggtattcaaaggtgactgagttcattagtttcatgtatcgggcatcaaatccttggcatgagtcattgtggtacagtgcacctgctgtgcatttattagtaactggtgtttaggaagttggagacagtaaccccaggaagttagagtataccccaacttattatctcaaattgtttttaaatatctaaatctccaggtcaagaaatcaaaatgcttaaaacgcgcgtgtgttaaggcctaaatattatggtaggaaagtgtacctaccagttttcagtttctgctttgcgacgtttgtgagcagtagtcacggttacctccccagcaataccgtaacttccaaagggagcacatttgtcaccagatcctgaactttttttagctacatcttctactgggaaagcaacagaaaggaaaacagggctttttggcctggggacatcttgtccacttggaggattagcattctggggacttagggtatgtttctggtatttctcatctgcaggaacagcaatgggcacttgcattgcaacatatctcaagacatctgactgtgaaacgacagcatgtccaggaagaggtttccatccctgtgcttcctgaacatttgagcctactaagataaaaggtggggcactggtcttcttggtgtcgcccatcacataagttggaaaagtgacttttggtggatgctgctgaaactgtggatccttaggattaggtaaatagagggttgcttggggaaaaggcccaggtgcaggtggcggtgatgggtgaccttgttgattcttatcagttagacaataaagggtccacatgttagaacatggtggtggttgtcctcgttcacttgttgccattgctataaaaaaaaattttgcaggaattaaagttttggtctctgtatcaggcactatgcatagtaatgtctttgtaagtctcttttacatataaaacagctgtagtgatatgtaccgtagagcatgctatagagagggctgcataatcgtgtttgacaggtgaaagagattctctacagttgaaaaaggagaacagtgttgtggtggcaagtggcagggacactacagttgtggctgaagaagcaatcttattctaagttgcagtttccagctacttcaactttagacgtggcttctataggctcctcgcagacgaaactggtcaacacaacctttagctttacccaaaagtcaattgaagagtgtgttaagccattaa

SEQ ID NO: 89063 - DNA, 1175 bp, Homo sapiens
gaagtggactgaatgtttatacagtgttgaccctgccacgtttgacgcttacaaaaaaaatgataagaaaaatacagaagagaagaagaacagcaaacaggtgaacatcctgtaaggtggtatcgaaggaataactggattcttcaatgtgtactaatccttttggaggtggcctgttctagggtcacagtttaactttcttcttccttgttgctaatgcatgtcacttttctctttttaatgatcagacatttgctttaacaagtactcggcatagccttgtataggatgtggacacctatcagttttttaactgtggagcagttatatgtggagctttgctttaattcacatagctttggaatgttggagttcatcttaatgaaacattttcttttcctcctgtttatgtgcattgaaagttgaaattgttgaagatttaaaatttcctccaaaagtctctctgacattttcatgcttatcatcagttttgttgccttgttccttatcgtgaaattaccgaagttaagatggtcgtagttaaaggagtcatccctgggctgctttcctcttactaaactttcttctttgtgggatagttaaatcccagtaggggaggcacatacgtggcttcttgtcgcgtggtcccaaacaggctccagtggttagcaaactcctgccccttccctcctggcataaatgctcgaggactgcacctctttggacaggaaatatttgaggacggattcctttccagtaaccaagacaatggttccgagcacaaactctgggttagaatcttagccccaccggtgatgagcagtacaagccgagatttctcatctctctgcctcactgcctccatttgtaacacgggcactataatagcacctacttgttaaatgagttaacaaacataatgggctcagaatagtatctgctcatagtaaagactgataaagtcatttctgccaaaagtacttcctcggactggcatcttgagcatcatctgcgagctcattagaaatgcaggcggcccagcttcacctcagacctaccgaagaccagtctctggggctctttagcgtttcttatgcatgtgaaagttcaggaagccctaagatccctcaaaagcagaaggtgtatttatgagtgactttctttgtagacggagt

SEQ ID NO: 89064 - DNA, 2446 bp, Homo sapiens
ggccgggcatggtggctcatgcctgtaatcccagcactttgggaggctgaggtgggttgatcacgaggtcaggagttcgaaaccaacctggccaacatgatgaaacccccgtctctactaaaaatacaaaaattagccaggtgtggtggtgcatgcctgtaatcccaattagtcgagaggctgagggaggagaagtgcttgaacctgggaggcaggggttgcagtgagccaagatcacgccactgctccagcctgagcgacagagcaagattttgtctcaacaacaacaacaaaagaattgtttactttgaaagggcaattatgtacatgtttaatgatagagttaattataatgttgcttttttttttctttttttttttttttaaatcttaagagatgaccttggatttagactcatctccgaacaggtcagccatcacccaccaatcagtgcatttcatgctgaaggattaaacaatgacttcatctttcatggctctatctatcccaaactgaaattctgggggaagagtgtagaagcagaacccaaaggaaccatcaccttggagctccttgagtgagttctgatcaagccattacactcttttcatgtagacctgcctgtaagtgtagacatgcacactcagctgaccttactgttcaaaagctggagaaaaagaaacagctttcatacagtgcaaactgtctacgtctatgtaaaagaatttgagaaacatggcagtagccattgctaattaatctgggtatgtgtaaatagtttaacttgatttttgactctggtgtttggatctattttaagatcgatggagttaattgcttcatgacagttcttatgaaacatgcttttttatatccttgtgccaatgttttgtttacagatctttcaaaatgaattcactctgagaaataatgaaatgacaattgtgtggcacatgttaggcgttagataaattgggagttctcttcttttgtaagattagctttaaatccacaattaattccagttaggagagaataagcatacgataccctatctctttaacactgattacaactagataccccggacagaagacaaagcaacaacccaaagactctgaaaagtagatagtagcaggcagactggggagagaaatcaaaacctgaacaccaatatggcagtgagtttactggttttatatatttctcccaaatctggctcagaatcagagcagcaaattgcagaactggggattagaggccgaccgaaaaagttctgagagtaattctttctttctaattaaaggacctagaaagatacccttgcaggaagtagagaataggggaaatcctgttttaattttgtctcacagccttgccccaaagcaagcactagggtctgtagctacactcctgctgcgatggtggctgtggcaatcacacacgtacctcagagtccttctctttggccagagaaactgagtaaaggaacccctggggttcaaagagtgtgagagaattcctgttacttgtttttctttcttttcttttacccctttgccccagaagaagacctagttgtgggagatacaagacagagcagagaggctcaaaccccagcttgccagccggaggggagagaaagcgccccctggtgtctaagagtgttggggaaaccacaaagaggagggagctcaagaaaggggtcccctgaagctgcattatgagttcctacgctcatccctacacacatgcattgaaatgacccagaagggtacacaagggcctcaggatctgaaatgctgtgtggcctgagagccaggtccctggatggctattgaggggtggatctgagcagcactacagaggctttgaaaattaaactgacactggaatgaaagctcacaggaggagagtcaggacttctggcctgaaactctgttaattgcctactaaaaaaaatttttatcagtattctccagaagaggttaagaggacagagtcttacaatattcaggtgtgcagaatacaatccaaaatcattcagcataccaagcaacaggaaaatctcaacaaactaaaatagaaaaagacattttagccaaaaaaaaaaaatagaagtatttttggaaattttagtactaaaaatatagtaatagaatataataactgggataggctcaatggcagaatgcaaatgtcaaaatatgtaaaggatgtgtatgttgaaaactacaagatactgttgaaagtaatcaagaattacctcagtaatgcagagacacactgtctcgatatatttggaagcctcaattatagttaagatgtcagttcacccctcactgatctataagcagtctgtatgagcacagtccaaatcaaaatcccaagatgatttttaatagatacagagaagttgattctaacttacgaattctaagtttg

SEQ ID NO: 89065 - DNA, 1038 bp, Homo sapiens
attaaaagtaactttggacttgagggttttttaaaagtccttgagagaatttgtagcactgttagagtgtgatgaaaaccatggttgggaataacactgtaggaagcaactgaaagtaattttcattctgaatatccaagtttccatgtcccactgctagagccatattaaaactccaaagtaatgaaactcctcaaaataattctgtaaattactgtcttcagcaaaatttcagttcctaaaagaatgcggagcgagctcggctatttttgacttgttctcatgctctgtcccacagtgtgtagctgcgtttgctgtatctgctgttgcttctcagtgggaacggactggaaaacctttcaacccactgctgggagagacttatgaattagtgcggtgaggcctttcacttgcatgctttatacagcgttgcagatgaagaggagaaatacatacatattggtcatcacgaataacaattatataggactggagcaagttaacaattttgatgtttgtttctaggatagctattattttagagactgtcaaaaatactgaaacatatataaaaggtaccattataagaaataattgcaaagatttttgtattcctgatcacatgggattaatcaccctccttttttccttatgtagatcatgagacatgatcgagttttgttttgttttttttttttactttaagttttagggtacatgtgcacaatgtgcaggttagttacatatctatacatgtgccatgttggtgtgctgcacccattaactcgtcatttaacctcaggtatatctcctaaaaataatcatttaaagtttattagctgggttgtggtggcacaggcctatagtcccagctacttgagaggctgaggcagcaggatctcttgagcccaggagctctgggctgtagtgcactatgctggccaggtgtctgcactaagtttggcatgaatatggtgacctcccaggagagggaggtcagaaatggacgcaggtcaaaactcctgtgctggtcagtgg

SEQ ID NO: 89066 - DNA, 1480 bp, Homo sapiens
gacagagtgagactccatctcaaaaaaaaaaagaaaaatagaagaaagagagcctgggacacttcaattaagacaagccttagcagtcacagtttttctgacttgtccccagtagtgaatctctgggtttaatgagctcttagagtgtatgtagttgagccttttatttctctatatacattcctgttttccctcatctccccagtgatgcagcagtaaatttaccatttcttttcatcaggctgagctgttacatgtctgttttctgcagtattttatggtaatgaatgagcttattttctttgattgcgctccagtttcagttctttgcaggttgcattatttttaattgaaaatctcagtgggaatatggatatttagggggaaaagtcagaggtaagtcaggtggcattcagcctgactacgcacctcaggactgttcacccgcccacgcaaccagccagcaggcctcatgaaagacctgattcccaagggaatggtcgatagaagtttgggaagattgtcagaatattccggtaaataccaagataagtgtgttacttaatgaattttgtaaaggtctcaccagaatattgcttgctggtggcacatggtaaacagaattgaacagttgcagttgaggtcagaaacttcctaattgttaaattatttttgagagtcgcttgtgatggaggcattctggcagacagaatttaaaatctattctgtaaaatatgcagtagcctgctagtaccctagaccataatttatactagattggtgtgctcagataagctcggtgttgtcatatcatttcatttcatttcattgtcatttcaaaagctgtgaaatttcttttggaaaattactcacaaaaatggtatgtgtggttaatccttagcccgttgttacaagacaaatgtagacatattgaagttttaacacatatatttgaacagacagcaattcatgacttgaacagccccagacctgaagctgttccacactccactgagaaggcagcacactccactgagaaggcaggaaggggagcttttacttttataaggtgttctttgagggagccagacaaagaaagtgcattcatttggggaaagtgtaacattcctagatagaggttagtttggcagtttctgattggtgaggcttaagttaacaggggagagggtttcagcggtttgcttatgaaggaactcaaggcactggagccatctccagtaattaatggccctgcagttaattattttaacaccactatgaagaattttgttctgtctccattgcctttgtctcccatttcctaattctgatgtaaggcagactgatgaagagtcatctgctcatgctcaccagcaggtagtgagctccctggagccaaggagaatgtttgggcagtctttgtatttcctccttcaaggcctagaaggatatactccatggtattaggtgctctggaaag

SEQ ID NO: 89067 - DNA, 1068 bp, Homo sapiens
tgtttcacatgtagattatgataataacatatgtagccttcccaggtaggtagatttggtttagcaaatcataccgtaaacagaatcacatgaccaatgttagacttgggataagttatctgtaatgcaggtggtgaatgaaatatctgtaatacacaaagagctcctacgtagtgagaagataatttagtggacagatgatgtcaccactgacaatgagtgtttttatcttagtatgtttgtactttataaaaataacaatttaaaaaattcttaaaaactgacatgtaggtaagaagttgaaccttcatttctgagaagccttaattgtcctaggcattttccttagtgcagatctagctgccagcagaaggagaattgtacagctgtgtagcttcgacttgcaagatttgccccaggttacgcagctgggtggtagcaagagtttgcactgtagctctggtttccattccacggttcttttatagcctccatgaaagagatgacacctccccgacctcctgccaagtataaggatgtctcagtaaatatatgcatgcacacacacaagacccagaagagctcatgtgtgtctcatgaaaatcaggaggcaaacctggaaagcatgaaacgcctggcagccaattccagatgaagcttaattttgcctacctttgtgttatcatcttgttctttttttcagagggcctctatgagcaaacagtgttgagtgtctagcctagcaatccacagagcagatgcaggaggtgggctcagtgtccagcgggtagataaaggagatctgtgcagttaggtaaatttgtgaggctcagcttccaaataacatacaatttctttcttttttttttttaatggactcttggtctgttgcccaggtgggagtgcagtggcacagcctcagctcactgcaacctctgcctcctgggttcaagtgattctcctgcctcagcctcccgagtagctgggactgcaggcatgtgccaccacgctcagctaatttttgtatttttagtagagacggggtttcaccatgttggccaggctggt

SEQ ID NO: 89068 - DNA, 1052 bp, Homo sapiens
tcaatctctacttcatgttgaaggttttctacctaccaggcactgggctgaatgttttatatcactgaccaatttccatatttaaaataaaattaaatttgaccacataatgcacacatatggggtgaatgtgtattgttgggacagaattttcattaacaatacctacccttgccagatgagtttgatttcattttttaaaatgctggttatattaccattaaattgagtctatagatcagaatgaatggggcctaaagttttaaaaacactctctgtatgcattgtttcatgggaactccaccacggccatatgaaacactagtattgtcattttctaagaaaaaccgaggtttggaataggttagttacatgttcaagttcacacagtcagtaagtggcagagttctgaaagccaggagtgacggctgtggagttaaagaatccattctactaattcaatatatgaccatggacaagttatttaataccagtgcttaataagattactttgaggattaaatgaggtgatacacattaagtgattaacacagtctaaactggagcaaactctcactaaatgctagccattagtattcatccacttcatcttagtagaactctttaaagctagcctggggatattttgatttcacagcatttgtgaaagtgttgcttttttaaaaacgcctgaactttttctgtcttccctgaaacatacaaatcaatgatcaagggtcttttgaaccgagatagaagctggaatgaagctaaataaaaatatagactattaagattcctggaattgcgagtaagagaagtgttggagagagagctcctctgtcttaggagaaagggaatagggccactgcacagaccctgtttgtgaaaggcatagagggcacgagaatcttagtctcaagtggccccagatgagcaaacaaggacataccccttaaagagacctagctatctttatgtagagttatggacttgagagagaagaaatatatatatatcatttagagaatgggaacatcatgtttaaaaaa

SEQ ID NO: 89069 - DNA, 2428 bp, Homo sapiens
ttttgagatggagtctcactccatcacccaggctggagtgcagtagcacaattttagctcactactcacgattttggcaacctccacctcccagattcaagtgattctcctgcctcagcctcccaagtagttgggattacaggcccccaccaccacgcctggctaatttttgtatttttagtagagacggggtttcaacatgttggccaggctggtcttgaactcctgacctcatgatccacctgcctcggcctcccaaagtgctaggattacaggcgtgagccactgcacctggccctggggtcttcagtaatttttaagagtttaattgatcttaagaccaaaagtttgagaaatgctaatctatagcaacaagttacattacattatagtttctttttgtttgtttcgtggttgcagtataatttttatatagtgaaagtaacagatcttacatataaatttggtgagttttgtcaggtgcatggacccatgtaactaacatcccattcaagatgtggaacatttccatcactccaggatgttctccctgactcctttcagtcgatcccccactctccgtagacagccactgctctgatttctgccactatggattagtcttatcttgaactgcattataaatgaatcacagtgcgtgtgctccttgaatgtggcgttagtcactcaacaccgtgtcttgacttccattcctattgtatatatcgttgctctttcctttttattggtgaatgctctgttagtttgaatatcccacagtttggcttatctgtactcctgttgatggaatttgttttttttccagtttggagttatgaacaaaaaagcttttataaatgttcttctagataccattctgcagacatgtttcattctcttcactatgtaggagtagaacttttgggtcatcggggagatgtgtgtttagctttgtaagatgttactgtactgtttcctgaatatgtaccattttgcactgcagtctgaaatacgtaagaattttagttgctccacatcctcaccaacatttgatgttttgtaggtatgacatggtaccttgttctgtggttttaatttatattttcttattgattttgaatgcttttgcatgttttccttagccattgtttttgtgacgtgtctgggagttttgcccattttaaatttgtttgtatgtctttgtattattgatttgtagtaattctttatgtattctggatactaatcctctatcaaatacacgtatcatgagtattttctcttagttggtagcttgccctttcatttctttaataatgaacagaagtctttaatttcttctttgtttgaacagagtctttaattttaatgaagtccactttgtaatttttctattatgttagtgctctcttgggggttctaagtaattgttgcctaccccaaactttcagccactgccctggtgctctctggtgtatcaccagtggtgtgttcttgaagttaacttggtcagtgtcttttgaagagaatgacagaagaatgaaaggtatttagagcacatcagaaattcagtgatgcaacattttaattcctcagagtaaacaatggccttttgttgttgatactatggaataattgtttctcattgtaaatgtgcgcgggacagtttactcattctagatccctaattaatagaaaatcatctggcataaagttgatctcagcaatgtgtgctaagtacctatattacaggttctatgccattcactgcaggttcaacagggcttggaatctaatggtaataagagtttaattaagtaagtaaatctgccacagcaactttacatgttcttaagaaattggtggtaggtgagtaacagtgtttgtaggaacttttagcctttcaaatggagagaatgtgttgcattctctgtggttccttatgccccaaccaggacaaagaaggagtagagagatgagtgttaaatttctaacaatggaatttggtacttttcaaatgacttgtaagtcagaatgtatttatccagtggtgagattgctaggcttttctgctcatcatttgttttcaaccattgtttaaagaatagacttgtgagctgtatcccagatgaactatgtaaagatttttttcaagcaagattatgcatcatttgtgaaaatgaagtgagactttttaattactacagtaatttactctctaacataattttaaaatctaattacttttgtgaattcaagtttattttatagtttagctctaatgacttcctaatttggaagactattttgctttgagtgtttagtaaacttcagcagagcaatagaaattaaagatacaagctgtgtcattaaattatatttaaattgggacttgtaggcagggcgcggtggttcatgcctgtaatcc

SEQ ID NO: 89070 - DNA, 1023 bp, Homo sapiens
ttgtctgagacttgtactgacctgcttctaagacgctacgctaattttagttggagaggtctaacagcaggttaaatacccagctgttgagtcaccctcgtctctgactaagttgtaagatatggtgctcatttatactaggcttcagaatggcattctggatatacagagagaactttgtgatgactgtatttgtctgaattcgaacctgaaactaggtacagggtacattataataacagtcatgcaggaagagttttaagtgattggcttctttaagaccagcctaaattctgcttctgttgaaatggggatgggcaaatttcaggaatttaattgtatcggtaaattttagacactttgtgttgatttctgtatattaaacttgccaagtatttcatatataactttgaagatcttgaatcttcatgtacattacaactaaagttttaattaatagtacacaactgagaaaaatagtatttttatgaccgtggaatacatcttatcacctttggagggcaaacattttcccttgtttgagggcatcattttcattgtgataaaatcaaattatatcaacttaaggtgagattctgtgagttgtgtgactaaaaaccagtatttactctcagatttaaatgttaagagaatatgaaaaatcatatcgaacttttaggcagtcaggtgaactactaaagatgagtatgttggttgaaatttttgaattctgtcttattaaaataaggttatatttgtttcagactatcttatttatttcaaatatttttaagcccacttagtggaagtgccagagttttaaagtttttgaaggccgggcgtggtgtctcacacccgtaatcccagctctttgggaggctgaggcgggtggatcacgaggtcaggagatcgagaccatcctggccaacattctactaaaattaaaaaaaaaaaaattagccaggtgtggtggtgtgcgcctttagtcctagctactcaggaggctgaggcaggggaatcgct

SEQ ID NO: 89071 - DNA, 1056 bp, Homo sapiens
gtcagagaaccctggagatattatgtgttatgtatcacagagcaggaaggaaccagaaactcaactcccttcctagaaattctatccctctgatggtaagcaatcaaaagcatctcagatcatttataaacagagttaaatcaggctgtggaagtagctaaagcaaagcacaaacaaattgttatatttattctgaaaaagtaggtgtggtttgaagggaagttagtctggaaagttcagagccatgaaaagcaacacagtcatatttgcagaagggcacttctgttattcagtccatctctgcttcgttttttgtcttctcttgttgtgaagtattttttgcacagttttccccaaacccttgttttggtgatcagaaatccttgtctgcagtgttccagataacatacagcctattaaaaacagccttgctccagagttacattcaacgatcaacaatttttatcaagagttcaaacctacattctagtagagaactccaggtctcaccaaacagcctactgctaccatcagcctcctaatccaactggaggtgttcaagttctgagacatgacctttctcgatagagagcccaagagatttctatgatagtcaagaagggcttctttcccctccccaaccaacaaaattaccagtaataagacagctttggatcctttttggaatgtggagagatgttagtagatgtgtgctcaccaccttgaagcctctctgctccttagagagctccacactgcaggagacctagttaatcctttagggatgacggtagttagctctgatctgtgcagcattcaccatgcattgcattaatctctctgttgttcagaccgtttcctttaggtcctaacgaccgtgatctactctcacttttcacttaatttcaatgactttacatccgtctgttccagcacctgttgtatgaaatctaagttattcttagagataaaggtgagcaaagaatagtgaccttgtccctaggttaaggtctgccttcctgtttcatctttccttccccaggactgtgctgaact

SEQ ID NO: 89072 - DNA, 1050 bp, Homo sapiens
caggtgtgagccactgcgcttggccagtttttcattttattgagaatacaaaggcgtgtctggtctctacaaagctggttgtaaagttacattgtcaaatgtaaacaagaggtgacgagaggctgtaagctctgttatttgtacctgggtcccttgatactactttccccattcagaggtctcgttattttctccttttgatccctggactttttcaatatcttaggtaaatatccaatttctatttcaagtttactttacaaacacttataatccccaggatgtcaacagaaagaagcagttaaatatttattaaaacgtatattcttgcttggcatctcgatctatttatccaaagatgtaccctcttcccccaaccctcccattcccaacacacgtgaacacaagattttgagtgcctaggaaatatctttcacagtaacagccttttaatggtctgccttaacctgtttcttctgcccacatcttctaataaatcatagattgggtatcttgacttctggtgacttaagggatttggtctctacaaatacactgaagtgtctgttttcctttggagctgtgccaatctaaattttgcctaaaggagaaaatcgcctcaggggacacggagttctttggccttatttgctttgcttggtagcttaggaggaattttcctttttcagaaaacaccatatataataataaaaaaattgcaaggtaaataaattaaggaagtgattgttttaaaaaccacatagatccttaacaggttggttggttggttggtttgccttgtgttttagaatcctcagaaaaatttggtttatacacagctcttttcaaaacacattgattgcataaaatgtgatatgttctcattgtctgggctatgacctgctgttgtatcatgttgatacagcacagtgttcagccaggatttgaaatttagcataaagtatccattttaccatagtaaatttcagatctgattgtgtgttttaggacattgtgtaatctttctcagcagaaaaaaaacctgcttta

SEQ ID NO: 89073 - DNA, 1037 bp, Homo sapiens
gtggctcatgcttgtaatactagtactttgggaggctgaggcgggtggatcacttgaggccaggagttcaagaccagcctggccaatgtggcgaaaccccgtttctactacaaacacaaaaattagctgagcgtggtggcacacgcctgtagtcccagctgcttaggaggctgaggttgcagtgagccaagatcatggcattatacaccagcctgggtgacaaagcgagactctgtctcaaaaaaaaaaaccaaaacaaaacaaaatctcacttcctaaagatacgggatagatgatctgggctcagacgtcattagatcagggaatagagttagcagcaagtcaccccacccagagatcctctggtgccctgggtagaaaaatactctgtctatcaggaaatatttggggtaattcctcatcatgtagtgaccaggagcacttaagctacacctttgattttcagagaacccaggagcagtgagcagtaaggaaaagagcaagagccctgcccagaatgagccagatttgtggtgagggctgggggctggagggaacagtggttccccaagacaatgggagcctgtgctctccttttatctcccggctccctgcctagagtacttgtcctggaaagtagagggttgcaataaaaagaatgagtagcatcactagaagcacaagcagctctgctgtgaagcccacctctttcacaagctggacacaagcctatctcaactctcccaagcgagaaaagagaactagggaccaaggagcaggcaatgagaagctttcagaggaatagtaaaggaagaagatgcttggtattctaaaaggcatgtaggtcagacgagggcaccactgtgctgtggtgtaggcggactgttggcagtcctgccacggcaggtgtctgtcatcagaggccagtggagattggacacctggaacagattggcaagttgaatggcagcagctgaagcagaggactaaaagccagcaggccactcattacgtgtgacatccatctctcccacaaa

SEQ ID NO: 89074 - DNA, 2453 bp, Homo sapiens
ttttaaaaattaaaatttttttggaagttatacttaagatgctttgtgagggaagaaagaggtggaaattttgggggcaaccactgaatatgatttcgtaaagaactgagtaatctttggagatgtcttttactatgtgagatctgtttacttgtaagcttatgtaagtgtacctctgtttgataaatccacttcagccttatattaggtgcaggttctgtgaaatccctgaggaggtagttaacagatggattgttgagggacaaagtaggctgcttaggtttcaaagcctgaggcatgaagggagggatccattgttacggaagcctcacacccaagttcaattcattaactatgaacctgctctgccacagattccgagtccgaaaggtccctgagtagattggaagcagtgacagcacgctcctttgaagaggaaggagagcatttgggcagtagaaaacacagaatgtccgaagaaaaagactgtggtggcggagatgctctctccaatggcatcaagaaacacaggtaggatcgcctctgacagttgtcactgctgcgtttttacgataaagtacatttggattcataaagaaatatatgtcttgtcttcatttttccccgtgtaggggatttatattgctatatcacctcaaagaaagcatttaacttaagcactttttcctctgtccatttaagagaatcatctataattgtaggaacagagcacatgggcttagcaatcatgttcttagaggggcacataaatcctttagttggtgatttagaaaggttattcagaactacctgttaaaactgatcctatgtgccctttctcatcatacatcttttatgactctgccttccattgctattttagtttctggccatttgatcttctagttggttttattaagaatgagtggcaatgttgccagtctgttgatgcaatttagttaaatttaaacaaagacttttattaagacccaggacttgctgaacatacccattttatactgtctaataacattagtatgtttttatccccttaatggcttggtcctagagattgtcccgaattaatgagacgtaatagatacccacagttctctgatttcagcccaagtttagagagacagtggtgtatatgcatgctagtgttcatatagtaaaatattttataaaatgatcagtgaaggatgtattctgttgtcattataaaaattactttttgggtaaggagttattaatggtaattgctggaaaataattttttgtttaatatttgtaggttgtgtaactctaattccatttctgtactatgattctggccacaatggttttgactactgttctagaaaaaaaaagtgtgcatcacttctctggcttatgtgtattttccctttgttaacaaaaaatgtctcagtttgtatttatttttaaaagattagtgagttttaggtaaccaactagataaaaacagttttcttctgttgggttagaggttgtcctccaaacatgcttataattgcaaattatgtgtccagcagtgagtgtctttcccgattccctctgtagttactatcagtttctttggagtgcagtacaaaattctatttaagacatgaaatacttaacagtaaacttggcagacctaccaatctctaaagagaagacagtctttaactatttaacacatacaccatgccagtctgatgagaacacaggtgaaatctttggaaagttcaaagaagcatgcagatattcagtattattaatatcagaaaaagcattgtgcttagatgctgtcctctgctgtagctacaggggatttctttattgcttgtcaggactcagtagttctttcgtatgtgtgctataatcatgacagtagttattttgcatttgacagaattatattataccatattcatacattctgtgttctaaagtcaaacccagaatggtacaaatgtgaaagttaagatgagattaaactttcaaaaacaaatgcagtcaggacaggtcactaaggaagaatacaaagaaatgcaagcaggtgacctaaccagaaaagtgtaactgataaatgagatgcaacttactaaacctataaatgtagtatgacgttcttcagttgttcaaagtgaaagaggaaaacttaggaaattgtcagcagtgtaatatgtgggaatacgtaattcctatttttaaaaagtagctttcacaggagttttttaaaacccttttttcataaagttcttctctaatcaaatagatagagcatatgccacagataatttaaaagtttaattttagaataggaaacaagagtattcagtgctatcacatccctcttgcctgcaccctacattgcataataaataatctatgattataatagtttttatattgatatcaagaataatttgtattcatagtagtttggg

SEQ ID NO: 89075 - DNA, 1341 bp, Homo sapiens
ttgttttctttgtagagttaatgcataatgtgaccttcctaaaaataatgttgagaaacaagacaaattgggaagctctggatttggtagcccaaaatagatccacgtaagatttccagtagcccacacactacggtttgtataactcctcatgttccattacatgtgcagatgttacaaattgtagaaaacagtagtagatttagttgcttggggatgagccggtacttttaagaaactctgtcacaagcaataccctaccatttggctaattttgaccttggacatcattcagagaggatctgtctagaatgtctccgactcttgttgcttgctgccaagaatctgtttcaagcttttgtcacttccttagtaaattattgcagcagtctcttggcagccccctctggactcatcccggttttcagtttatgattcactttaaatatgttaggttgtgtttactttctttgtgttcttcatatttactgtgctatttctgagtttatgcagttgtacctcaaggctaaataaaaatttggcactgatattttaagctgtaccttgggttgctttggacattttcagaacatgcctggtacgtgggaaaccgtaaacaataaaggtattaaattaagcatgtgtgcgtttcctggctgttttctgttaccttcagtaacaggaggaagggtgacttggacattatccacagttcttccccatcttgctgctttgtgtactatttgttctcaggctggtttccaaaggtcaggataaaaaagtgcttatcaggataacttacaagaattgttggcatgtttatattgtgaactttatggcctcttctttcagccttttaatagtaggaaaaattaacaaatcaactcttggaaagttctctcactcaattacaaaaaggagcatagcggtcaggatcttaattctagagtaaagttaaagtcaccataagccggcaatagccattcattggcttccatgctattttgatgagaaaggagactgtgttcaatctgaatgtgtttaaaataattctgagttctaacatggacagaactttaaagatcttaaagcaggtgcagtggcttacacctgtaatcctagcactttgaggccaaagtgggtggatcacttgaggtccggagttcaagaccagcctggccaacatggtgaaaccccatctctactaaaatacaaaaatgctgggcgtggtggtgggcgcctgtaatcccagctactagggaggctgaggcaggagagttgcttgaatccaggaggcggaggttgcagtgaactgagatcacgccactgcactccagactg

SEQ ID NO: 89076 - DNA, 1016 bp, Homo sapiens
ctcagtaatattttaatagtcgtctcctccgggaggaagagagaaaaagaaccatagtccctagatcaggattggcaaatacatttcatctcaagtgccagttcagattgttttgccgtatctgctgctttgtggattgctgtgttgagaacgatcctgaggctcagtccaaacgcctaggctcatcagcacatcctgccatggctataggaagtggagcaagggtcaggtgccaagcatattctccttgccttgaatagcacacctgagttttgttacacttgcatgaacacagtagcccttctgtggctactcctatttcctactaaaaatcttggaataatttggcacagtgtagaaactgcattaaaatgaagagtcagatgccctgtcaagtgctgacttgctgttgacctagccacccaattcattgaaatcatcaaagccatcatatgggaatgacttcatcttccctctgtagtctctacacaccagcctctgtccccatttcctccttcactctattacaagggaacaaatggtcccccctcattaaggccatctcttcctcatttgttctggtacctgtctccttgtgacttctcaaggagacttttgtttagttattgcttccttcacctacactttcaatattgtataactaaatactaacttgaaattcctgtattagtctgctattgctactgcaatagatcaccacaaacttagtggcttagtagacaatgcaaatatattctgttacagttggtggtcagaagttccaacatcaaggtgtccacagggctgtgtttcttctaaaggctctagaagagactgttgccttgccttttctagcttctagggacctgcctgcattccctggctcaaggccccatcctccatctggaagtctctctctgactgcccgtgactctggccttgctccttcccttttataaagacctatggcattacgttggacctactcagatgatccagtataatctccccatctc

SEQ ID NO: 89077 - DNA, 1304 bp, Homo sapiens
ctactaaaaataccaaaattagccaggtgtggtggtgcacaactgtaatcccagctactcaggaggcagaggcatgagaatagcttgaacccaagaggcggaggtttcagagtcgagatcgcaccactgcactccagcttaggcgacaaaatgaggctccatctcaaaaaaaaaaaaaaaaaagagaaaaatgaaaaatagaatgtttgtagtcattaccaggcaacctgtttcccttcatttgatataccaactattaccaactattttgggagtaaactgagggattatattttatgctttgatgtagtttgctttttaatatttagaatttttttaaaatttttgttccaagacttgctgaaactgttttttttaactgtgtacttaatgttgagagagaaatattctttatgtttaaaaagaattgtatgatttctgaattgactgatgttcttatgccaggatcctgatcatttgagctgaatttatttgctagttctgaatctattttcattagctaagctgttgccagaaaaggccccatgggaagaacaaaattagtttaataattttgctcattcatccatgcacatgtgacacgactgttttcatttctgatattgcagttgaactggatcaaaagcaattaattttcacatcctctgagtacgtctgtgtctcctgtcactctgaagtcttttctgtatatctgttttcttctaggtgaggaattttaaattggaacaagagcaagaaaaaaacaaaatcttgtcagaagcactggagacgctggccactgaacatcatgaattagagcagtctctggtgaaaggctctccacccgccagcatccttagcgaggacgagttctatgatgcgctgtcaggtaactctgggatccttccctctgcattgttggtgatttagagtccaccacctaaatgagcaatgtccccttgagtccaccaccttagagcagaggtcacctagagtttcctggaataaacagatagcgatgtattggtatagctccccagattttttgtgtgtcatgttattaaggctggtgtctgaaagtgtggaatgaaattcatcacagtctctgcctatactgaagatgtattctaggctaggttagagtgctgttaaaactgcccacatttgatttgtcctttactgggtgaccatttcctagtgccaggcattagcacatattgtaaggagagacagacagacagtttctgtcttcaaagaggtctttatataaagaatacaggtaacgaagcgcaagtgcttggtga

SEQ ID NO: 89078 - DNA, 1027 bp, Homo sapiens
gaaaggatcattttggacattgctcaattttgtagtccttgtttattttttattttttatgtttttgagacagaatctcgcctgttgctcaggctggagtgcgacggcgtgatctcagctcactgcaacctccacctcagggttcaagcgattcttctgcctcagccttctgcagttgagattacagtctcctgccactgcgcctggcttattttgtattttcagtagagatggggtttcgctgtgttggccaggctggtctcgaagtcaagtgatctgcccgcctcatgtagtccttgtttatataatagagaaatgaagtgtttaacccatctgatggaagtaggacagctttttatttatttttttaagttgactctagccttagtatgcttatttcctcttctggagatacaatttagattataggaatatttgcaagtatttttcagattttctaaaaattgtaattacatgagtaatttgtttttcaatttttcatgtctcttctgatcttgattgcttaccatttattgcgatttttatttcattatcacagctgtaataataataatctgcctgctgtattgataaacactaaagtgcctgaggactggaacttgggtttaaccttgtttctgctataaacttaacatttcagtaaaactgtatcttaagctatgtctaagaccttagagtgttgtacctgatgtgcagctggcaggaactcagggccacagaacagagaagagccttcatccttgggggctgtggggaggagcatgggagagggagtgtcaagaggtaaaagggttagatttggcagtgagtaatgcaggatttgtgagaggggccacagttcccaaaacctcaagatggaaagtgtgacctagaggaggttttggatgtcactccatccagtgcttttcttttctttctttcttttttttttttaaccccctaactgaatcttttttgtttgtttgtttgtttgttttaattatacttaaagttctgggatatatat

SEQ ID NO: 89079 - DNA, 2260 bp, Homo sapiens
tttacctaggaccccccagaggactttggccgcgggtgacgaagcttgccaacaaactcgagttctgaccactgagatgggtgattctctggctagggctggtccaaatgctcctgtgtgtgtgggtgctgggtgagcccagcctggctttgctcgccactatgacaggggagcaatgagttcaatgtaatgtcccccagttggtgtactctgcaagtgcagatactctccatgctgtacagctgttgccaggggataggggagggttggtgttggtgattcaagactgtctgttggaccctcctcaatacctttttcagagatatgaaatcaggtgctgtgattgctcacctgatttttggttcttgtgatggtgcttttctgtgtgcagatacttgttacaatttggtgttcctgtgaggggtacaaaggatgtaagcttctattccgccatcttgctctgccaacattgttttttaatttacatgatgatacataaaacccttttgaaattttaaatacattataccataatctgaaaaaatttggaaatgacacatggacgtgcatagtacttttaggaatataatcctctaagtgcgacttctggattgtaaactgtacatggtaatggaaattttaaatttctgtggaagttcctcatatgagagttataaccagcattaagtagttcaactttgcagttgaagagcaaactgttgtgagacttgcatcaaattattttaaatgccagagccattaacaaagcattggagtaaatgtgtattgaatccactattggtagcataccgtgggagtgaacacgacttttgtttcagaagacgcgttcatcttatctgctttgtaaaagacatgtaaaaactaaaacgtatttgttaaattgtcatttgtgtatagtgctagtcttccattgattttatgggaagttatttttaaatcattctgacaaaaataagtgtcaaatattctgggtttatattgattcttccaagtatcattatcaccttgcttataaaatgccctatttatttaccaagtctttcttctgttcccccaagtatttaggggctctgtcctagatttggggttatctccaaattctaccctgatttaaatgtctgaaggtacagtttggaagtaatcgatctaacagattgttagcagaaagtgatgttgaacaagcttcattgaggccattctatttttagcatggtcagtacgtcaaaaaccagacaagttcttatcttctttcccatggaggagcttgagtgaagagatatgcagaggtcattctgagtggcatttccttttctttgcttgaaccaggttgaagaagatggcaatgcctgtaagaaaggggcatttttagtggtgccacaggccaatcacagtcagctataaccaatgggaaaatgtgttgggctgatcaagttagtgctcatgaggctttgtagggccttgagactcgtttcatttctaatctcaggatgaacttatgtataatgtcaagagactagaggcttcttacttcatcacctgttggaatcaattaggttgaggacatctttgtctgtttcttattctctgtattccttatatgctctgagatagcagaagcaattagaagaaaacttggttacacgtactcatctatctgaatctgtgcaccatactcactgcatttctcctgcaactaaggatggactgtctgagcctttagcaaaggccagctgtatactagtggattagatctcctccctttttgacaaagtcaagaacattattccagcaattctcccctctcacttctgcaaacataatcccatctcagttgaaccttttctatccatgtaaaagcaacccgggttgtcttccataatgaaaacttcattgaccccacaaccccttccagcaactgccctacctttctcctccttttttgagcagaaattatttttttaaaagaattttattctttttttagtttttaaaataacctctgtaaccagcgtcctcttgtaggctaggcgtgatgtggctctgcctgtaatcccagcactttgggaggccaaggtgggtggattgtttgagtcccgggagttcaagaccagccggggcaacatggcaaaaccctgtccctattaaaaaaaattacaaaaaaaattagccagccatggtgatgtgctcctgtagtcccagctccttgggaggctgaggtgggaggatcacttgagcccag

SEQ ID NO: 89080 - DNA, 1084 bp, Homo sapiens
attgaagtcagagcagtggttgcctgggtagggggtggagagaagggggacagtgaccgtgaaaggggcacatgggggagagtgaccgtgaaaggggcacatgagaacttgggggagagaggtaatggaaatgtcctgtatcttgatggtggtgctagttacatggcggcgtatatatttgtaaaagcttactgaatcatacacttaacataaaggtattgtatatgattcaaataaagtttatttaaacaattcattgctatggtgttacttctgttacatataactgtttctagttattttcatcagcaaaactatcaattgcagagcccctgaataacttctgaaaacaagatttgtttagattatgattaaacttccctacttttaaaaatgattatttacctctggtggcgtatctcaaaaaaaaaaactatttattttgaggatatgtaaaatatacaaatctgtggctagtgattatgtaagagcaagctatttttaggtcgaagctttgcaaccatgatgagacaggagtgtgcttaaattctcagattgggctcccataccagacatctgagaaagtcatatgttctgcagtatttaagaggaccttgcaaacattgttttgcatctgatgcattgccaatctgatgcaaaatttgatgatgcaattatcagttcctaagtaggcgtattttaaaatatttcgctaattatagaattatgagatatatatggaagatatacaggagtatacagaaagctattttagagcttatagagaagaatatgaaaaccaggtcccagcaaccaccagcaggattttggtgtgtcttagcttatacacatgagtgtgcaaacacaaatacaatgcatcttgctgtttaatatcttacatcattttcagtaatatcagagtgagtatttttctttgaaaaacacctattctttgaaaaaattttttattttttgagacaaagtcttgctctgtcgcccaggctggagtgcagtggcatgatcttggctcactgcagaggtctcagctcactgcagccttaacttccctgggtcagatgatcgt

SEQ ID NO: 89081 - DNA, 1389 bp, Homo sapiens
gcaggaagagcccctggggaaaaagcccgtggactgatgtgtttctcagttgaatattggtattaggtcaagaagggctggagtgggaggagtaagacagtgaaagacattattgtcctaaataaccttccaagttagtgatttttcgcatggctgtgctccggctgacattgagatgaacttaccatccgctcttcagaggccgctgaaattccaagaatacgagaagtgcatgagcggattaaggagagaaagggaaattctatttgtgttggggaatggggaggtggcttttaactttaatgttttgattaaggatttttgattactcacaggctttctttgtagcctaaaccagcggggaatcacgtttcctagcattcagagcatgtggctagttgttttgtgctttctgttgtgctggatttttctgggtttggagagagggtggtaaggagaggaagatgccagagaagagcttagtacagcttttctgagttattaaggctattaaaagtttcttaattttaattaggttcaaagactgaattaaggcattgcttagcaggaatctttttcgagagagaaaaatgcttgaaatgtgtgttggtggaatagtgtgtaggcaggaaaacggggtggggtggggggtgtctaaatacaaacttgctttccattttgaggacacaccgaagttaatctcctctccaaatcaaattttttagtccctaagctgatgtctttggcaaggtaactcaatttctgtttagtggatatttaatctgagcataactaccagggagctatttcagcctctgtcccagtgctacttttgccagactggagttttaaaggaacttgtatcagcctgaatatagttgctggactctagtctcccctctttaaaaaccctttaaaggttaaatttaggagattgtattgacagtgaaagtgacccgtataatttctttgcccccagttgtgagccctgcataatgggggggaagtaaaagagcctgttaggttttccatattaaagcaaaggtcttactgatactcagggtggtttataaatagtttgagcatgtttaaatattgtgcataactgagaaaataattatgcaacatcataatctaagctccatgtacaatttttgacatttatcatttacattctttataaaaaggttggctaaacttactacttctggcattcaaatatatgactgtttatcagctttctgagaattataagaaatattttaattcctctaaaaatagaaatttagaattgttattcagtccacattattcaacatatattcctaaaattttcagtttattttatatatagtccagagatatagctacaaattaattttggaagca

SEQ ID NO: 89082 - DNA, 1112 bp, Homo sapiens
tcattctctaattttcagggcctagggagagattctgtagcagggactcctctttccatacatgatttttccaagtacagtaacagttattattctgagtgaaaaaagtaaaagaaatgaactgacttttcaaagatgccatgaggctgggcgtggtggctcacgcctgtaatcccagcactttgggaggccagggcaggtggatcacttgatgccaggagttggagaccagcatgaccaacatagcaaaacccccgtctctactaaaaatacaaaaaattagctgggtttggtggtgcaggcctgtaatcccagctactcaggaagctggggcacgagaatcacttgaacccaggaggtggaggttgcagtgagctgagattgtgccactacactccagcctgggcgacagagcaagactctgtctccaaataaataaattaattaattaatacaataaaataacaatgaaaacaaagatgccatgaaacctcactgacattcattcccaattttcccagcatggcctggaatggtctttaacacattctaggtctgtagtgcaattacagctaccaccaacttcaatgggacttaaagtacctaggatcttgtgaaagaaatatttaattttgttcatttttactctgaactcactaaagtatgaggacagagttaaacactttagtaaggtgaaaggtttgaaacatgttgaaacaaaaagatttctttccctccatcagagtgttacagttaaccataaatttcattaacctgaacatcccacttaagtgtggtatttgggtggtgggttttcctgtcctctgaacctttgcccttcaagcctggctggaataattttacctaagtaggtttcacggtagtaggattaataccgttgttttccttgttgctcagtgtcccaactagggtataaacaataaatatgtgaagactgcctttcagtcttggttttggaaccgtaaacgcgaacgcttcagcgtgagccggagtaagtgacaggcaggactggagagaagattcctttgctttccagagtttcccaaggggcgggttggttaaaaaaaaaaaaaaagaaaaaagaaaaaaaa

SEQ ID NO: 89083 - DNA, 1119 bp, Homo sapiens
cctcctcattttgtgtactatcgagcttccttgatgttagtcataccaatttttccaaggtaagaactgcccatttaaagtcagtagaagctcacttatcaagtgttttatacatatttcatgttaaatctcctgactgctgaaaagctgtgacccaactgtatgactggaatgtcatacaggcacggtggctcatgcctgtaatcccagcactttgggaggctgaggtggtggatcacctgaggttaggagtttgagaccaatctgtccaacatggtgaaacctcgtctctactaaaaatacaaaaaattagccaggcgtggtggcaggcacttgtaatcccagctactcgggaggctgaggcaggagaatcgcttgaacccaggaggcagagattgcagtaagcgagattgcacccttgccctccagcctgagcaacggagtgagactccgtctcaagaaaaaaaaaaaaaaagagagtgggactaattttgtggtataatggaaagattcagaccctacattggaaccgtctgaagggttggaattctgtactgcttctttggactggacactggtatctttgaagagagatcatgtgttcatgtggacttacagctctacaaagtcatgatctcttccattcatttcatttcctttgctgtcgggcagtcctgtagtcattttgtgaccctgatatcttttgttccctaatgttcttcacagctcttttgggcctgcacccgtctctggccttctgtctctgtagtcccctcagatctccttccactctgagcagaattcctttgttaaacatgaggtagtcactgtatatggctccactccctaccactcttcactccagtttttatctgcatctgctcttatactttcctctagccttttgctggaggcatctgtctccttccattctgcttctctggggaccttgcttcaaaaaatagctcctgtctttggaattctctacccccttatttatagcttttgtctatctccctgcatccttttccaattccatttttgaaaatgtgatactttctgtttctacttcttaattttcagcaagtccaccgaaactgttcttgccagtatttcctt

SEQ ID NO: 89084 - DNA, 1064 bp, Homo sapiens
agacaatgctacttcctcccaaaacaaaataaatccactgttacacacataaaagctccaagatactatcagaaaagagaggctacaaatgttaattagttaagatcttacaataactgttaacttttattcagggcttactatgtgtctggtactatgctaagtattttgcttacattatcttatttaatcctcatgataaatttaagaggctaaaagaggtcaattagcctaaactttaggctaacactcttgcacatctaaataacctaaagaattaggttattttttaagcagatagtttaaaaattagaataggttgattgcttcagaaattaaacatgaaccaacataacacgttacttccaatctaatgttcagccttaaaaccatatatctctggaacaagaaagctatcgatacatccatcaggtaccacataagagacatgagtgaaatgcggttttacaaggtactaaatatttcatgaatcctatgacatcatattttattaatttcaaagatattctgaatgcaatcatcctgttcagatttatttagaacactaaatcatctgttatttaaataaacttacacatgaaatttgcaaaccaccaaaaatagaagtgctgaggagggatattttcaaacagtattaaaaaatcaaccatttgaaatgtttaatgaacaattatgttttcctgtgatagttaatataattctattaaaagacttttggtaagtttgttttaaatgatttttatttccatatttgtcttattctccaaataaattaatatgtagaattggtgctacatatagcaaacacagcatttaaaaatgtgtatatgctcgccatggaggctcgtgcctgtaatcccagcactttgggaggccgagtcgggcagatggcttgcatctaggagttcaggaccaacctgggcaacatacaaaggcccatttctttaaaaaaaaaaaaaaaaaaaaaatcaaaaattagctgggcatcatggtgcatgccagtagtcccagctacttgtgaggctgaggtgggaggatcactt

SEQ ID NO: 89085 - DNA, 1057 bp, Homo sapiens
cttaagattccttaaaatccgactcactgtatttatttttttctttatagaaatgcttccatcatttcttcagaaagttgaagttgtctcagaagcttctagagaaacttgtgtagctttgactgattgccttaatctcttcaccaaacaagaaggggtaggtagttcagaattgaatttgtaaaataattgtttggatgttgcatgcgtggttgtccatgaagtcattgctttcaaattgttcaaaggtaggaaaaaattagtattaacaaaggaaagcttcatttgtcacaaaaatttagaacttatttattattgattaagcaggatgaaataacttgtgttcatatcttttgaatttgttgatgtagccatatttaataagtatacttaaaattgatctactcaggattgttatgacacttcaataagagagatgtgaaaatattctagaaacagaaggtctttacattaaaaatacttttatttagaaaatagagtactatcatacttatctatgtaaactaagcccaatggattaaatattttttgtgttctttcccctcactctcttacccttcaacagtttgccatttgcttttctaaatatgagtaagggctgagcatggtggatcatgcctgtaattccagcattttgggaggctgaggcgggcagatcacctgaagtcaggagttcgaaaccagcctgtccaacatgctgaaaccccgtctctaccaaaaaatacaaaaattaggccaggcgtggtggctcacgcctataatcccagcgctttgggaggctaaggtgggcaatcacttgaggtcaggagttcgagaccagtctggccaacatgatgaaaccccatctctactaaaaatacaaaaattagccaggcgtggtggcgcacacctgcaatccagctacttgggaggctgaggcaagagaatcacttgagcctgggaggcagaggttgcagtaagccgatattgcaccactgcactccagcctgggtgatggagtagactctgtctcaaaaaaaaatcagccagagaatca

SEQ ID NO: 89086 - DNA, 1540 bp, Homo sapiens
ttctcttcctatgtccccctaccattatgctaaaataggccatagccatctttcccattgattaccacaacttcttggctggacacactgcctccacaatttttttttttttttttgagacagtcttgctctgtcacccaggctggagtgcaatggccgatctcggctcactgcaacctccgccttccaggtttaagtgattctcctgccccagcttcccaagtagctgggattacaggcgtgtgccaccatgcccagctaatttttgtatttttagtagagacagggtttcaccatgttggccaggctagtctcgaacttctgacctcaggtgatctgcctgccttggcctcccaaagtgctgggattacaggcgtgagccactgcacccagtcctgcctccactcttatattccttcatttacctccatggaatattccacagaatagttagatgcttctgaaacaccaattggaatggtcacagccttaacagaagcattcagtgccttagggtataatctaaactctaagttgactgactttatgacctgtgtgtctactcacttcagctgcttcctctcttaactattccttccttccttctacactctgtgcagcaacagtgaccttttctcatgcatttgggtcttagcgtatgttgtttccaaggtatgaaatcgctttttctcatcttttacatgtagtttccagaaactcctccttgacttctctaagactatgttcttatgtgttttcagatcaccctgcactttgtctaccatagcactagccactctttaatgtaatgcttcctgtttccatttctctctctgggcaggcccagcctcctcaggtgttagaagggacagaaagagcaagcaaaggtacaggccacaacagttgcccctattcaggcctgtcgtacagggcactggagagtgagcttctgtctttggtccaagctttctttcaggcagcaaggttgaagaatccaataggtgagacagtgtggctatgagactacgtgatttattgctcacttttacttctgccaaagtctattttattttattttattttattttattttattttattttatttttgagacagagtctctctctgttgcccaggctggagtgcagtggcacgatctcggctcactacaacctctgcctcctggttcaagcgattctcctgcctcagcctcccgggtagctgggattacaggcaagtaccacctcgcccagctaatttttgtatttttagtagagacagggtttcaccatgttggccaggttggtctggaactcctgatctcaggtgatctgcctgccttggcctcccaaagtgctgggattgcaggtgtgagccaccatgcctggcctacttctgccaaagtctagaagacaggcaagcatcataccctgaagctctctcaagcactcagaatggataaactctcttatgtcatccagttctgcaccttattctttgtggcacagacctttccaagactcctctcttgaccttggcc

SEQ ID NO: 89087 - DNA, 1033 bp, Homo sapiens
tgcctcccaggttcaagtgattctcctgcctcagcctcctgagtagctgggattacaggtgcacctgccaccatgcctggctaattttttaaattttattttaatttattttaattttttattttttagtagagacagggtttcaccacattggccaggctggtctcgaactcctgacctcaggtgatccacctgcctcagtctcccaaagtgctggaattacaggcaatctctcgtttttttttttccctgtcccccaagtccccttttgttactgcaaagatttttcactttgtttttggtattctgcagttttattctgtctctgggtttggattttgttgttctatagcttgcttgaaactctgttctttaattcaaggactcatttattatctttctttaagttagaaaagttcttagctattatctcttccaattttacttcatcattctttatattctctcctgccagaactcttaatagacatatgttgagccttctcgttctatcctcctacctcatttcttattccatttctttctgttgcattctgagtacttttcttagttctattttctagctttagtttctttctcaatttagtcagtttttctgcttaatcttttgactttctactttctaatcttagtgactgtattttataattctagaaattttagttggtggttttaaaaatttgttatttttccccatagtgacatgttcttttatattacatgcatttctaattttatctctaataacttcagacatatgaatttaaagcatttttttcagaatgtttttatacctcaagttgttgcacagctaagtcttttgtttcttctgctgaatgtccatcacaatggattgtaactttatggacagctcatcttcagtagagcttgtgggtttttttgtttgttgtgttttattttgtttttgtttttcctgcttcttgggtttggaggtgtccatatagagtagttttgtgtgtgtcgctgttgaggctgtaaaggtttctctgct

SEQ ID NO: 89088 - DNA, 1675 bp, Homo sapiens
ctgctaataaagacataccccagactgggtaatttataaaggaaagaggtttaattgattcacagttccacatggctggagaggcctcacaatcttggtggaaggtgaaggaggagcaaaggcatgtcttacatggcagcaggcaagagagcttttgcaggggaactcccctttataaaaccatcagatcctatgcggcttgttcactatcatgagaacagcacaggaaaagcccacccccatgattcaattacctcccaccgggttcctcccacaaaacatggggattattggagctataattcaaggtgagatttgggtgaggacacagccaaatcatatcagttcctgacataatatcaatggcatagaagtcaaaaatgagaaaccatgttggactctgcaaaatattaataagaattaactttcataaattgatttttagtttttcaaaatataactagtagcgactaagcaaatgggagaccatattatgttttattatattaataacctcttctttttagtatcttttagtatcagttaaaaagcactaagttgtttagaacagaagacatactttgtacacaacttaaaacagtatgtgtagattggatcttctccagctgacctgttatgtaccctttaaaacaagtaaatcgtcgatcaaggaaacttattaataactgttagatggaaatatgattcaagggaagataaatgtgattcatgtatttgaagatgatgctatagaaggtgtttcctgcctttaattataacttaggaaaactatcctgtttattacagattcatagtctgcaattgaagccattgcttacttttatgcctctagcttactttcatcataggaaggataaaacagtatcattgacttgcacataagcagagtattaaatatgtatagagcaagaatgatgattttctattcatcatgagtgatgcatttggttgcagtgcatgttttggtgcctctagataaactttttccctgcccctcaacctgtattcacaggctgtgtctggaaaaattatcaggcatatatggtgttttaaattgcatagtgtaggtattctccccctgctctccaccaagtgaatggtacgtaggtgttgttagagccctcaaaacaaaggagagtaatacaaattttgaagagaatattgcctgtcactaatgtgataacatgaataattctactgtggttgagttgaactttgtaagcactaaaaaatttataaggtgaaataggagaaaagagtatttacctatgccaccttgacatactgatctatagtaagtttgattttgggggtgcaaaatgttttgtgatgggctagctgagattaggagtacaaagtagggaagtttcataaggctaaatatattactctacctaaaagaatgtgattcgattgtttataaggtcaagattctcagaataaatattttctattttgataaccaagcaaatttacaataataattttcttgcttattcttcccacctctttaaagggaaatgatatataaaactgccttcaaaatgacatttttaatgtaataaatggatttgactgatctttcattttggatttctaaatctgcactaagatgggatgtaactttcatcaagaaattctatatttatgtttt

SEQ ID NO: 89089 - DNA, 1030 bp, Homo sapiens
gccttatccctagaggaatatcagcataggtaattgaaatgaaataggtgttttgaggggtcatcaattttctggctgtaccttttatttccatcttgtgtctaaaagaatgggaattgagttcggaagaattagaactatggaatgatgatgagtttcagtctgaataattacgtcaggatatatgaatttgcctactaaatttaatttttgtctttataaattaaatgagttggcggcaagatttgaatgtttctagttcaactttaatgaagttaaattccccaatacctatggagttttatcaacttagggacctttacattaaaatataaaaggtattttgactctttcaatccctaatcttaatttatgatggaacattaaagaatttgaactctcccatgtttgttgaagacattccccagaattgatgacaactcctttaccatactacctctggtttaaagcctaatgtgtatgtgagaaccataaacaaaattttcagatcagtgaactttgcaaaggtaacatctactacagcatttaagtaacattaaaactgggaaaatatggaagatttaaatacatatggccaaaattacattaaacaagtaaaaaaataaaacgatgctaaatattttaactttcagttggtattccctaattgaaaagaaatccttccctatttacctatcgtcaataagaggtaaatgataaaacctggaaggattgacaaagcatactaatatctttcctaggattatgataattttaaaagtttttaaatggaagttacaggtaaaataaaagcatactaacttacataccattaaaaatatttcttctttttttttttcttttcttttttttttttttttgagacggagtcttgctctgtcgcccaggctggagttcagtggcgcgatctcggctcactgcaagttccacctccagggttcacgccattcccctgcctcagcctgccgagtagctgggactacaggcgcctgccaccgcacctggctaa

SEQ ID NO: 89090 - DNA, 1061 bp, Homo sapiens
caccgtgactggcaagccacttttatactactggatttcaagaggcttccactggttgtagccattacttttctgtgtgttgatggtcccttttaggtgtttttttggtgttgatgagtcacttttaggtgactaagtttttatgaaaaggagtggggggaaaatacatttttttcttactagatcaaagaattacagtattatttttgttatgaacatcaaaccatggaagacttagaagaaaattaatatttgaattatcacatggtacatatataaaatttttccagtcctaacagtttctacattttggagaatcctgttttctagaattaaccttgaagagcacataatttcttttgcatttgcaagcaatcccttaatctatttatgtatctgtatgcttatattgtataagataaatttaggataattttcttttttagacattcattcatgactttgaggaaattgtctttgaagcccacaactggtatattttctgtaaataatccctgaacagttttgtcagaaccataaactgtaatcatcattgatcttatcagtatggcatttctgctgttcctgtcaccctgtagtggtatgttttcattactgcacttagtacctaagttcatgtttgatcatttttttttactgttcagtgctactgtctaaagactcaaatatgactgtcctcacttaattactttttatcagtcaagcatttgaatctagatgtgtcagcttgggaaatctttgttatttttcccttagagttcaagattttttggctggagattattctgggtagtgttagagcatggagtcctttcatggtataggaaacagtaagtattatgatctttacacttatcaaatttcactgtataaattttgaaatacgaatttttttcacttgtctcttttccttttgtcttgataatttcatttttattttgaaggcctgatgcagttcataatatttatcgccagggatgcaaacacctgactcaagcagtatgcacggtaggatgaaacatggatcatttgctcctcta

SEQ ID NO: 89091 - DNA, 1036 bp, Homo sapiens
aaacataataaataggaccctataaaggaataagtttttctagttttgatcagcagtagtttctgggaggaatgctacacttctggaaggtactatgcaaagaagggacagtattttggaatacttataccacattagactgaaaggtttgcctgttccccgccaccttagaagacctactttccagcttccattcctgcacagtctcattaaacatgaaactctaaatttgttctgaattcatgactgaagcactgccatttgctttaaagttatttcagctcatttgaaagggcctctttggtttctaagtatagcacctaaagcagtttttaaattttgtgaaatggaggctatataaagaagcttctaaagcaataagttgggaacaacaaattcagtagaaccttgacatttacacatttaacatttatggttttaactcttctgaaggactggcagactgatttgtaattctgctgtcacaagtatgaattgcaagcctggtaggggcatgtaaatcattgtgaaatcttagtgtctgaggtgtgtgagatggtgctggcacagtgcagagtgtctcttgtcagaggagtgtgagacccggacacaggcctgagatctatctcagggcatctgagaataagcatgggtgtggcagggttggctggtttagtgagcaagaaaccactaacagcctggatgccaaggagcttggctattcttcgggctctgctgatacaccctcctgtgaattatgagaggaaagtctatctttgatatataattctgcattgcatttttttaattgttagctcaacaggcccaatcctcctgatgttaactgttcggatcagttaggaaatacacccttgcattgtgcagcttaccgggcccataaacaatgtgccttaaagcttctaagaagtggagcagaccctaatctgaagaacaaaaatggtaagcatattggtgaaaaccatcgttggccattttgaaattataaaatgaagtcaatgccatataaaattgtttt

SEQ ID NO: 89092 - DNA, 1051 bp, Homo sapiens
agttttgaagtcaagatgtatctttaactttgttcttcttttaaatattattttggctttttggggtcccttgaaattccatgtgaattttaggatgggattttctgtttctgtaaaaatgtcgttagtatttgatagggattgcattgaatctgtagatagctttgggtagtattctcctcttaacaatattaagtctttccatccatgatcgctggatgttttcccatttatttatgtcattttacatttctttcagcagtgttttgtgctgagtcttttgtgtataagccttttgtcttcatggttaagtttattcctaagcattttattctttttgatgctactataaatagaattgtttttcttggtttccctttttggattgttcattgttgtctttgcccatttttaattgggttgtctttttattattgaggtgtaaatgttctttatatattctggatacaagtcaagagacttgtatttgtaaatttttttttctcattctgtgggttactctactttctttaattaatatgaactatttaggtaaagcatgaaaacatgagccccaaaatgttacctttaagatgatagaaaatgttaagatattttataagaattcactttattaaaatattaggatattttaaaaaaccattttcctgtttttttaatgtggtagtacattttatataataatactcaaatatgaaaaatgtgtaaacaccatgtactgtactgggaaatgtagctataaaacaattgtggcatgtaagtaaaatcatgttacgaaaactcaaattttgcctagggaaattgattagtaagaaatatgccaaaatgtttatagtggtcataaaatgatgagggtaataagtatatgtattttttgcctgtttatgttttttagattttatttaagcattttttgctatgaaaacattctaaaagaatgtaggaaatggacgtcatggcccaaaggaaagatgaaattcctaggacagcataacgtgtagcaacacaggatatcacttcatattttaca

SEQ ID NO: 89093 - DNA, 1094 bp, Homo sapiens
gggaggccaaggcgggaggattgcttgaggccaggagtccaaggtcagcctgggaaacatagcaagaccctgtctctacaaaaaatgaaaaaaaaaaaaaatagctaggcacagtggcatgtgcctgtagtagtcccagcactttgggaggctgaggttggaagatctcttgagccaggagcttgaggctgcagtgactatgatcatgccactacactccagcctgggcaacagagtgaaaccctgtctctacctaaaataaataaaaataaaaagtagaaatgactcgaatattcattagttatttaatagataaacatgtggtatagtcatgcaatggagtattattcagaaatcaagagaatgaagtactgatacacaccaaaacataaatgaaccttgagaacatgctaactgaaagaagccagacacaaaaagccacatattgtttgatttatttatagaaatgtccagagtaggcaaatccatagagactgaaagtagattagtggttactaggggattatgaggaggggaaataggcagtgattgttaacagatatggggtttctttttgtagtgatgaaatgttctgaaattagatagtgatgatgtacaactctatgaatatactcaaagccacagaattgtgcacttttagcagggtgaagtttatggtatgtgaattacacctcaataaagctgttatttaaaaaaaataatctgggcatgaggatttttctctaagcatttcatctgagatgacttgtgtgatggtgacagcaatataatggctcaataagggaatgactgactgctgagcggaaagtggagctggggcgatttgggagcgtgattcacggctgtgttaactttgttctttgccctcacccgtgtgctgctggtccaaacatactctgtgcagccattaaaaaataaaagtatcatgctcaaagtgaatactttactcctctgactttttagtagttagttgtcaaattggccaaagtgctgtcttagccaggaatattttcagtaaaacatctttattcaggaaaaagtattcaaaaacaaatagcattgctctaggggca

SEQ ID NO: 89094 - DNA, 1110 bp, Homo sapiens
tttctttaatggatatccagcaccacaaaatggttagttttgacaattttgtccagctttatgctcattttttcaggataacagttgtcttatcctttcatagctaaaagttgctttaccccatattaatgtttttttgattatttaaatgatatgcaaaattaactatgacatagagtgtatttcttgtatattctagttgttgaccatagtccaacatgatacctaaaggttatttcgtaagcacgtgattggaagctttatgtgaatttatcatgagttaaagaacaaatttattattatattgtttcacacttttcattattctaatgactagatttaactaacttttaatacgttaccatgagtcaattctgtatgtgctaagcatgtttgaattagtacattttataccactcttgtctatttgttcataaattgatacttgtgaaccagatatggagtcttaactcaagctgagaaaaaagaaccttttataataaacaataaaggttgtggttaatttctatgcttgactttgtggggtttcaaatatgagctgcagatggctcgatttgcctgactacgtgaactacttgctgtttttttttatggtcttgctcattcttttctatatacctaagaaaattctattgtcatctatttctacatggcccagatctacccattcaaagtgctactcaaatgtaatatccataaattctttcctaacatcttgcagctggaaggaaactatactcttccaggattcctgggcacagtacagcactttcattcgtcttctaccttgtattagtgttatttttgtctatgtctttttttttttttttttttttttgagatggagtctcccattgtcacccaggctggagtgcagtggcacgatctcacttcactgcaatctccgcctctcgggttcaagtgattctcctgcctcagcctcctgagtagctggaattacaggcatgtgccaccatagtgtgtatttttagtagagacagggtttcaccatgttggttggccaggctggtctcaaactcctgacctcaagtgctctcaatcccaaagtgctggggttataggagggag

SEQ ID NO: 89095 - DNA, 1054 bp, Homo sapiens
ccattcctggcctgaagttttcaacatagagatcttgcagtccttttcttaaatgtattaaccagcctggctttaatctgtggaatctggactgagtctggccagctaatatatctgctgagttaaaaaaaaaaaattaaaaaaaaattgtttgtttgttttagagacaagtctcactatattgcctaggctggacttgaactcctgagctcaagtgatcttcctacctcagcctcttgagtagctgggactgtaggcatgcacaactgtgcctggctttcagcatagtattttaggattcatgcctgcatctgtgtagcctagtggtgagcctgtatttgagcagcagtgggctccattactcaatccccttaggcttctgtgctctgccctggatctatgtgtaggctggagagtgctttcagagtccaggcatttctcgcttcttcctctgctctgacttttgcaaggccccctctcctttctcctgcaaatgtgtggagtttcccagcagcctggggtacctgggaagctcacctactcctactccagttcttttgttttcagggttgtctcattaagttttaggctgttttgccatttgcctgtgtggtaggcagaatcatggccctccaaagacatccacatcctaatcccccaaaacttgtaaatatgttagattacacagcaaggggaagttaaagttgcagatggagttgagattgctcatcagctaaccttaaggtaggaaaattattttggattatctcggtgggcccattgtaatcacaggtgtccttagaagtgtaagagaggctggacacagtggctcacgcctgtaatctcagcactttgggaggccaaggtggaaggatcacttgagcacgggagtttgagaccagcctgggcaacatagggagaatcccatctctaaaaaaaaaaaattgcctggtgtggtggtgtgcatctgtagtcccaactgctcgggaggctgaggttggaggatcacttgagccggggaggtcgaggctgaagtgagccatgatttcaccac

SEQ ID NO: 89096 - DNA, 1110 bp, Homo sapiens
cctttactgactcttgatgtggtacaggtgtacagagagttgctgtgagctgccttcagctcctccataccctcctgatacaggttttcaaagagagttgcttgtcgtgaactatgtcaataaaacccctcttgacctgatgatggcaagatgattaaagactcggagccctagagtcaagaagctgctagagatcatctagctcgaatgtaacccccgtcctgtctccctctatccctttagaggtgaagacatcgagtcagaaggtggcaccagatctgcaccttgtgagttctcgtcctttacacccattacacttcttggtcacatatcttgcctctcacttatcagcaatgcattgcaaaggagattattgaggtagcttgttatggagaagttaatttcgttgtaaaattacctaaatatgacctaaaaataccttatatttttccatttttaggaagaagtaagtctaacttgggctggacacctctacatctggcatgctattttggacacagacaagtggtccaggatctgttgaaggtctatttatgactttaatttttaatgactacagtaaatattattgttatggaaattttaagatgaaagtcttagaaaagccacctgagccataatgacttatttaaagcaatagttcatcattcaagacacttaattgttctttattaaataaatacatgaattaggttagcctgattaattaaaattgtatgtttaatcattagatttttttattactagcttttaaaaataataaaagtaggcatattaatgaagattttattttcagttctgagtgtgacagttgaaaaaataaccaaagcacaccctaaataattaaaaaataatgtcaatacacaaataaaaattaaaaagaaaaaacaatgtcacaatctcttagcactgtatttaaagagaattgagagctcatatttcttaattctatgatgaataacttctcacattctgatagttctgaaatttgcttgcatcttacaattcatctgtacatttaaataatggcatcttttttcctcaaaacttattaaattgataaaggaggaaatgtggtatttcattcag

SEQ ID NO: 89097 - DNA, 1079 bp, Homo sapiens
aaagtcatactttgactttatctctaattttgttttttccttttatgtctaatttttaatgtaataactatttgcataatactatgtatttgacagaatgctttcacatacataatcttacaacaaacagcttatgcggttggttgtattctgcagatgaggaaactaaggccttaagaagttaagagacttgcccaagtgtctcctgtactgcttcaataataataggaagggcaaggggtctcaggctcaagttctcaccctgcaacggatttattcagttgttgtgtctgtcttatcagctgcaaaatgaggattctttcccctttctgtattagcaggtgatatctaaaagctaattatgttcttaaataatagcaatgttattattttcttaatttagaaatgaacacagaagcggagcaacagcttctccatcacgccagaaatggcaatgctgaagaagtaagacaactattagagaccatggcgaggaatgaagtgattgctgacattaattgcaaaggtaaactttgaatggattttgtagctttctcttatgagtctgcactactcttagcatttatttaatgctaacctttcttatctatcatgtaattaatctctatctctcatgctaggaagaaccccacagattggaggaaatgtctctcctagccccctctgagtcagagaaagtgacataagaattttaaattcttaaaattgttatggatcccaaatattacaagccacaagggtggctctagcccacaggatacatcctattgagaggtgacagcgtgctggcagtcctcacagacctcgctcgctttcgggcctcctctgcctgggctcccactttggcggcacttgaggagcccttcagcccatcgctgcactgtgggagcccctttctgtgctggccaaggctggagccggctccctcggcttgcagggaggtgtggaaggagaggcgctagcgggaaccagggctgcgcgcggcgtttgcgggccggctggagttccgtgtgggcgtgggcgtgggcttggtgggccccgcactgggagcagccggc

SEQ ID NO: 89098 - DNA, 1062 bp, Homo sapiens
gaaatagttttaatgctattactaggaagataaactaggtcgctcactttacttttatttatcagcctgcaagtaggaaattactgtatagtgaaagcagtctttaactgtacaatttcgtatcatgtgacaatggaaagtaaccacatgtttttactttgtgtttaaagtttttctttaaagaggtatttctgtgatgcataaatggtcagtattattatacatgagtttaattgagtttgaaagataattttcaaatgtgaaataattgaaatgggaaaattttaatgcatttttctaaaatttagggaattttgtcattaaaaggtaacaatcagcctccttgctaggatttttattactaaacttgatttgttaaatttgtagggttctctgctcttcatacctgctctgttttgaaacagtagtaaatagttttcagaatctgtcaaattgaagttcaaatcaggggtgcatctaggaattagtgcttaattgttaaagcagctaaaattatagcaccaaagttattttaaacaacttcattaagcaaagctatgaagcttatttaatttttactaattttaagaaacattaaaatttccaaccgaatatgggtaagataaatacctggtgatatggttggttttttattatgtccgtatggtatccaagttggtgtgggtatggaatggatatgaataagagaaggtaatgtaaatttatcaaatataaagtaaataataatttggtataaacattttatgatttcaatgctttataaaccattagatgacacataattgtggccaattctccatcatttctcctgtgggagatgaatgctttttattagggcacaaaaacttattgaggaagttagagaaaaagtttcactgaattaaaaattaagtgattaaaattttgtcttataacttaaaacgatacaggttagtgcttcccaaaataggctttataatttgctcctgttttccttaaattgccatgttttaggtattcttttcagttaataaataaagctttttaaaatgaggcactcaa

SEQ ID NO: 89099 - DNA, 1038 bp, Homo sapiens
gaatggggcctttgacctgtattaggtgctgacaggtgactgagatatagatagcggtggttagtaggtatctggaaaagagatgtatttcagaagagtcagaagagcgaagaacaacatgagaccctgaagagatggctgttgaaaggaaaggaggtatccacaaggttgttggttacagattaaaatgggagagatgagaacaggaaagggggtagtaatggtgtattaggctctttctgggctcaaggaatagaaaaacactcaggttacatcagataaagagtaagaatttattgcaacaatacagagacataaaagcagagacatcacgctgctgcagaaggttgttgaagatttaactgcagcccaccattctggacctctcagcagggggcgccatcctttgctccctaccctagtgtttccgcactctggggtctcaatcattctctctctgctcttgcttctgccgctcctggtcatcttttctgtattctcctttaggctgtcccatggcttctgcttactctctgctctcacttccctctgtgagcctttctgcatctaccttgactaaggactgtcctttgcatgcgtcacggttaaacctacccaagagagaaatctagatggttcaatgctactcagtatagagatttcctgttgggcaaagcacatataccaggcctttggtaagcctaatagaaaggtgccatttaggaggccctgctcttgctccttcagctgagccaagaattgtaggttgcataatgaagtcctcaaaaaggggcaataggcagggcagactttccaaggcttcctagaaggggtcatgtgactgtcaggcacactgcttgagcagacaattagggatagaaaagcggaatatattcttttttgtttgtttgtttgtttgttttttgaggcagggtctctgtctcccaggctgaagtgcagtgatgtgatctcagttcactgcagcctccacctgccaggttcaagtgatcctcccacctcagcctcctcagtagctgg

SEQ ID NO: 89100 - DNA, 1042 bp, Homo sapiens
gttttgtttctaaaatattttgaggacatatttccctaagaaaaatatttcagaaccagataatattgtaagttaatattgttaaaagataaacacattaaaattgtcacgagtttgagaatgaagctattcatgaatcacgcagcaccagagctcaaacagttcaacactccactaaattggtgggagggagaaatttttctaaggtgtttgcagaagcaagataaagaaaatatttgatggcttaaactagaaagtccctagttagatgtcacttagtggtttctgattggttaagcttaagtttacactgagttctatttctgtttgcttactcagaaacacaaggcaatggaactgtcttagcctcatggcctcccaattaattattttaacaaaaccatatggacagaatttgcctgtgttacagtgtatcctagagcagtttgttctagtcttcttggagaggaagataccaaaatgaagttaaatatgcaagaaatgtgttaggggaaatgcctgtagaaaattgggaaggaacttgaagaggctcagagaaccatcacaccgatactaatctgatcctgagtgaatgttgagaaacaagtagaggaaagggccttcgctgtggctcacgcctgtaatcccagtactttgggaggctgaggcaggaggatcgcttgagcccaggagtttgagaccagcctgggcaacatagtgagacctccactctaaaacaaatcaaaaaattagcctggtgtggtagcgtgtgcctgtagtcccagctacttgggggtgctgaggtgggagaattaattaagccctggaaattgaggccacagcgagctatgattcccaccactgcactccagcccaggcgacagagatcctgtctctaagaaataaaaaataaaaagaagaagaagtagaggaaggttgtgcggcagtttttctaaggaaagttcagcaaggcgtggagcccaagcaccccatcagaggagtcctgtctcccaaaagtaggcccacctgagtaactgccata

SEQ ID NO: 89101 - DNA, 1030 bp, Homo sapiens
aaacagacaaacaaacacacaaaaactctccctaggaatgtaaagacgagtctgggactgtggactgaggtttgagtcccttcccgggacgcggtggtaaatgactccctaaagtctcctggccattccgatggcgccaaggccgcaatgggcaagcaaaagccccccgccccggcgcattcctaggagacagagccgtgagggcctctggctgcaactcgcgagggtcggctttccctgggtctccgccctacgggagacagtgaaggcgggagcaaggccccaaccgagaaccccaccccaaacccgggggccaggagccctttacacccttcggcccgccacccggaagcagatgccggcggcgcggcgtggcagggttgtggttccgggtcgggccgcgccgcagccagctctcggctcgcagccgcagcgccccgcccccgcgctccggacctggcaggcggcggctgcagggcaggtccaggggccacatggctgagggggacgcagggagcgaccagaggcaggtgaggccccggcggggtgctgtctctccaggctcggctccggctcgcctcgccatgccagtcctcctcagccgaggggccctccgcctggggccgccccgggttccgccagcactggccacgccatttgctccaccgcgttccattttcccggcgcttcccgtcggccgagcgctcttaggccggcggctcctcggcggccgcggtctcggcctgtctcggacggtgtcctcgtcaaccattaacacgcgactaagcagctctgggccgaaggcaaaaaccggggtttcgatccccaccctgccgccgccgagtcatcttggacaaatcacttaagaattcgggtttccccctttgcaaaatggcaatagcccagaccctgcaggtcccgagagcccaccgaatctcactccttctggtccttggcatcgagctttccctgtgccttgttcacgtgggcgatcataagtcttttcctacagggctgtgagtacaaaatg

SEQ ID NO: 89102 - DNA, 1978 bp, Homo sapiens
agcaaccacccacccatctagtccttgtgtaccccctccccacctccccccaacacaaaatttaatacgaaggaaccagtgagacacccagcaggagtacacagataatgtggggcagagctattgggggtgggagtcaggggtggagattacctgttaaaaaagagaaggtggaacagagaagataggtttatcttttcacgtgtgaatggtcactacaaagtatgggagtgcatatatattatattttgactcaatagtggccaaaagcacagtaatgcagtagcaaggctggctccagtcattgcagtagcgcctagcaaccacccagagagcagaacatggtgacctgctcttaagaaactcttggcctggtgaggctcatctaggaatttttgatctactctggtaatgttgaatttgaataccttataaagtagtaagaataggattttaagatgtgtacatttgttgacttttaaaaaatcaatttctttcagaatgaggaaattgaagcaatggcagccatttatggcgaggagtggtgtgtcattgatgactgtgccaaaatattttgtattagaattagcgacgatatagatgaccccaaatggacactttgcttgcaggtactttttcccccttccttgcagccatctttcagttacagtatgaactatattgttgacttctgtattctaatgattgtgttgttttctaaattatctttgttcttggcttttctcaatgattaaacacatgggcagttacatctcagatcactttcaaatcatacattaattgatagttccagtctttctaatccaatgcttttaatcatttaaaagtgttaatgtacccttgagagactgtagttttgcttcccttcattattctcttcatctggtaggagagggtccaaacctggaaagatggctaacatttaaaaggaaagagaggttagtaatgtagatgactcgtagaggagacagtcatttctttattaattgagaatcaatgatcaatgatcagttgtagttaggataaaataaatgaaaaggtcagctatggcttttcttagtgcttaatctttgatgactgcttgtatgtactttcaacataaaggatgcaaaacagtttttgccagtgtttgtttttataatactgatttgaaaagaagtatgtatggttctctattatatgttagctatttcatatagttaatggtgtttcctaggatttttgtagtatttcttctgaaaagtacccagaaaatattataatgccacttcatccacttggggtcagggtataatgtccatatttcagttttccttttcctttcatctctgtcctccttgccttttttgtccagttgctagctttataaatatggttacttttgaaccttgatgaagtgtaaacagatgtttttgaacctgcattgtaggtgatgctgccgaatgaatacccaggtacagctccacctatctaccagttgaagtaagctgtatttctacgtttatattgctataaaaagattctattctgaaagatgtttatactgtactttgcgtttacataaaatacctttcttattaacatgtatatagaaattaaaaataccttttgggtttggtatagagcatttaaataaaaattaaattctataaaacaataaaatatgccacttagtataaaagagaatcacaaggttcgtagaggtgaagtaggtacagaattgtctttagagatgaggaaggaaaccttcctctttagcctagtaatctagcaaccttggcccttagagttactcctaacctagatctcctgacctagccacagttccttgatgtacctgtaagactgcctgccttccaggagttacttatgatgcttctggtgtttctccctgcccctttccccgttgatgttgacgaaccatcttcttagcagcccgagcttaatctttatgagc

SEQ ID NO: 89103 - DNA, 2266 bp, Homo sapiens
aaatgtctatgtactttgaatggtaatttcccttgtattaggccataagactcagaatctattgatgggctatattcttcattcattccttcattcaataaatattacatggcaggcactgtactagatcctgggtgcaggtatggctagcatgaacagaagtgccctttttcatggcagttagaatttatggtgtggcagagatattacttataatattgtaaaaatgaatataacaatagctgtggtaagttctatgaaaggaagatatgcaaaactaattgagtttgaaacaagacctgacatagtctcggaggtgagggatggcttgtttgacttaaaagtggagttaattaggggatgataattccagtgagaggccacagcacagggcttggtgttggggagcttggcacattacaggaaacagtaatggtgatatgcagtggtaagagacaggatgagatggagggaatatggtaggaaaaggacctggagaggtagacaagacagatcctgcagagttttgtaggttatgttgaagattctgtctttatactaagaatagctggaagcagagaagggttttaagtagtagggtgccatgataagattttcttttttttgagacaggttcttgctctcttgcccaggctggagtgcagtggcacagtagtgactcactgcagtcttgacatcccaggctcaagtaatttctcccacctcagtctcccgggtagctgggactatagatacgtgccaccgtgcccagctaattttaatttttttaattaaaattttttttaaaatttttttgagatggaagctcactctgttgcccaggctggagtgcagtggcatgatcttggctcactgcaacccctgcccctcaggttcaagcagttctccagcctcagcctcctgagtagatgggactacaggcgcccgccaccacgcacagccaatgtttgtatttttagtagaggcggagtttcaccatgttggccaggctggtctcgaactcctgaccttaaatgatccacccaccttggcctcccaaagtgctgggattacaggtgtgagctaccatgctctgccttcagctaatttttttaaaaattatttttttgtactgatggagccttggtttgttgtccaggctggtctcaaactcctggcctcaagcagttctcctgccttggcctcccaaggtgcagagatacaggtttaagccactgtgcctggccatgataatattttcatttaaaaaagatcattctattttctgtttgaagtagtgtttggaaggtagcaagagtagatgtgggacatcagttagggggctaatgcagttgtctagagaggaaatatctatgatttagattaattttaatgaaataatttagtaaaacaaataatgttctggaatatcagttttactgtaatccaggatctagtaaggactgtattatatgttctaggtggccactccatttggtacagtgacagtccctctttgtgtccctgggatccaggccaggtttcttttcctcccaaaatacttaattagaaaatggtgagttgttgtggaatccattctgcttattcctgcctagagcaagtatggtcttccttgggtccccatttagtgattccgtcatccttggcggaagtataagtatttcattaattaaatgttttctgatatctctccctaacattactggccactccaacttttgtgcccccaacaaacttctttctataatcctctcatatttgccaatttatctgcccccccgatcccccagtagaataagatcagtatactgtggatttgttcaccattaacaccagaattgttcatctagtggccatttttcagctcttacctaacttttggtggtattgaccacttcctcctccttgaaaatctttccacactgcttccatcatgttaatcacattcatcagttagcgttttttcttacccatgtacaatgtcatacacttagaagtggctcttcacctgcctatcccctatcccaaaagtcctccttttactaaaagataccttcccacaggacgcaactttccttttctctttaactagttcacttgagctatttgaaacttacgaagtgtcagagattacaatatagtttgttctaatggtggaatatggggtcttgtttatttaatgcgctcgaataaccttggtccagtggtattattttcacacatgtagtctaaatagaaatacaca

SEQ ID NO: 89104 - DNA, 1183 bp, Homo sapiens
gaggcaaccaaacatcatttggaaccaaaatgaatcaatttaggcaatagaatgttttgtcagaaacaagatatgaatataaaattgttgaattgtcttttaggtcttgtaaattgactccctgaaggagtttcccatatgctttacattctttcttgttgagataagtatactaaatgataagtgtaccaaataaggggtttgaaattcttaaaaaactttaaaaaagcaagcagtgatcagacatcgatactgaaagattgtatccacttacagaaactaagtcacatttatatttctttaatccatctagtttggaaatgtttattcccctctttggttacagctcttctgcttattttaaagtaagccatgttaattttggagtcaactggaatttttaacgttgctataacctgtattaactactcagacacaaatgttgataaaccccaggtttttataaattattttaaaaaagaaatggttagattgtttataatgtcttggattgcaaatgtctgtatcttcttgaatttgagaagatgatttttgaaataacaattttttttttcccctgaattttgtttagtcagaatatcggtgaaagtattctttacctgtgggtggagaaaataagagatgttcttatacaaaaatctcagatgacagaaccaggtaggattgaaaaatactatcaatactcttttaacttataataactacatttttatgtagatactctagttgaaatttaatgtgaaaatctgtattctggtttatggtttgtatattataaaatacaagtttctctgaaaagtttaattgctcatgtaattatagttatttatttctataaggtttagcctctttgattttgtattacagtattcctcctcatctgagatttggctttccatggtttcagttacctgtggtcacctgttgtctgaaaatattaaatggaaatttccagaaataattcataagttttaaattgtgtgccattctgaaaatgttatgaaaccttgggctgtcccattctgtctagggtcttgtctaggattctacattgctttccattgttgtttctctttactctcctttagtctgtaaacagttgttcagtgtttccttgacttataaccttgacacttatgaagactactgatagttattttgt

SEQ ID NO: 89105 - DNA, 1037 bp, Homo sapiens
ggaattctattatgaggaagggatgtctcttcccatttatgtatttatttatctgtttattatttatatcagtatggactcatgtatattatttcagtccatgggttaaaatgccatcctatcatatttttttgttgctcaaattgttctagctttgacctttaagagccccttcaggttaactcctgtgttctttttataagccccatctctttttgagcatttcccagtttgtggatccacatgaggttccaggttcatcttgtagtttccttgctccaactcaggaatcaaccagttctcctacgggctgagtgctggttcctttcgttgaagagtggtatttagaacccaagacccagtgatttttttttaaaaagcatcgtttcttacctgcgtcataaagtaattgtgtctcatattcacataggcccagatgtaaagaagaaaactgaagaggaagatgttgaatgtgaagatgatctcattttagcatgtcagccggaaagttcgcttaaagcattggattttgatatcagtgaaactcggacaggtataatgttactaactaatttcttttgaggagagtgggttggtagtattatgtattgttctttgagatgatagagaaatttactaattttctccagttttaggaaggagttattaatttgcagataagattaattttttcctgcctgttggcaattttggtgtttgccaagtcttatcagaatggcaaggaaaaaatggaaatttactcttttccccctactttctagagttttgatttagtgatggaagaaattgaaactaagaaaggctattaacgtttttagttaacatcatgtttttatatttctgtattgaaatccttagctgtttcctgatgtttcaggattaaattttagtctgtgctcacaaatacaaatatattaactgaaagtgcagccctggaaattaaagctagtaaaatgcctttaagaggttttttttgagagacaaggtctcgctgtgttgcccaagttgaccttgaa

SEQ ID NO: 89106 - DNA, 1030 bp, Homo sapiens
catctttccttttgatgcaggagaactgccacttataagacctggctcatgtgacctcctctatgaaccttacttgactcccagagaaagatgtggttttataacatttggaacataccactattgtacacctgctacattggatgtatacatttggtaaatttcagagctagtttttagaagttttatatgatacatttaaaattccctacatggggaacaaactttccctttgacatagtagtaccgaaatatttgttgataattagtgctcaaaaataccaggtctgtcatttttataccaattatgagtaccagtctctgcccctaaaatgagaaggaaactttggaaatgactttttcagagtatagtagactctttaagtgactatttattttaatacagcatgcttcaaggtatttttctagcatttatttacagagcaaatataaaaagcatacttatttatattattgctgtttttaaggtgaaaatggttctttccaaattgtatgagaataagaaaatagctagtgccacccacaacatctatgcctacaggtgagtaatcatcacaagctttagtatactcagtttgttaaaaatagagggaaatgatgcatgattttagaaaataataactattgtgtattttttccattgtaatagtaatagacatggaatatttggaaactgcagaaaagataaaaaagaattgaagggaaaaatctggcattttctgccatcaaatgtaactgacaatattttgttttttgtttcatttttttctctgcaaagtttaatttttcccaatgctttatttacccttgtatcctgtttttttcttaattaaacaaaagcactttttcatattgttataactgcttgataaatactgtttaatggctgtaaaatatttgagatgccatactacaattaaccatttccttttagtttttcatgtttttcaccattataaagagtggtccagggaacatctttgtatactttttaggttatttcctcagg

SEQ ID NO: 89107 - DNA, 6597 bp, Homo sapiens
gttggttttgttgccttcatcttttttttatatgctttttgtttcactacatcttaaggctctttgaagacagatgcatgccacttacttcctttataatatgtcttagtacctgttgcttttatacagtatattctcaataaatgtttttcaatgattgctcttgttacttcaaggttaaatgaagtaaggggaatgtcacatggataaattcaccttcccataatagcaacatttctgatataaaggagatgcctttgattcctagctttcccaagtatataaaaaggcaaacatactggatagtaaaccgtcagtgaaaatatatctaatataatacatatttcaggaaggatttaaaaaaatgaatatgctgattttggaagtaatcaaaatgatcacaaatgttgaggaataagttttattataatattttagtttcaaagtgtaatactcttacatgtatttgcagaatatattgtgaggataaacagaccttcttacaggattgtgaggatgatggggaaacagcagctggtgggcgtcttcttcatctcatggaggtaggtgtaagttaaactatcaatcctgttctgtacaagccataaaatttctcaacaaaacagagctccatttagtaatagctaagtcagttgaactatgtaacataagatatatttgatttaattagtagttgatgttaaaatattgattgaatgaaaattttaaccagtggatgtgggacagaaagcaaataattaataagaagtgctatgctttcaagacatagacaatagaagattgtcttcaactttgggaaaacactttgtttttttgacaatttccttctctttattttttctattctttctttatggaactccggttagttggatattggaacttctggatagatccagaattttttttttttaaattgagttgtccatctcattgtctttatattctgagacattttcttgactgttgtccaaaatttctgttgaatttgaaattttgtttagcagccatatatttaatttttaagagttctttcttgttttctgtttttcctttttaagaatatcctgttctgttttatggctccaatatcttctaaaatttctctgattatattaattagagtttcttttttaagatgttctcacccctaaaaaaatttttcctggtccatttttgtttgtttatcttgtcctttctctttcatgctgctggattttcttcatctgtctggtgatcatttattgttcattaattttaggattggattatttttttcctaaggtagttacctggttttttctgctcttgtatgtgaaggtttattttctaacaaggcctttcccttgaatagtaactgtgtttgtgggtcaggcctgtaaactggtgggcttcacattaagggcagcatttgacaaatgtcaaactgatgaagacggccaggtatggtggctcacacctgtaaccctagcactttgggaagctgaggcggggagatcacttgagcccaggagttcgaaaccagcctgggcaacatggtgaaaccctgtctctactaaaaaaacacaaaaattagctgggcatggtggtgcatgcacctgtaggtcccagctacttgggaggctggggtgggaggatcacttgagcccaggaggcagaggttgcagtgagccaagattgtgccactgcactgtagcctgggtgacagagtgagactgatctagatctcaactgatgaaaccttactaatagcaccagggatattgatgcctcgtgcagcccctgtagctttgttcagaagcagggttttttttgttgttatttggcctagtggtaaaatgctgcctaaacttagctgttctggttgaagtcaccaggtgctagaatcctacttgcatggtctccccttcactctgtccagttgccccaaatctgggagtttgaggacattgtgaaacacagtgatggttttccagattcccttctgttcttccatttcactccctgaattgttagtaatctcactcagtgcctactcactcatatggctctaccattaaagtcactgggaaattttatgtgcaattttatacatgggttatttcattctccttttttaaaactcatatttatacatgtctgtctatgtatctaattatgcttccaaaaaataacagattttgaatgtgaagaatgtcatggtggtagtatcacgctggtatggagggattctgctaggaccagatcgctttaaacatatcaacaactgtgccagaaacatactagtggaaaagaactacacaaattcacctgtaagtggctcttcgtactacatctagagaatttctcatcactgcctgggaattttttaaaaagacagaaaattaagaatgaatcagaatgtgagtggtgaattggtaaaacctttggactcagaacctggagacctagactctaaacagtgtgtctggccagtcacgtgactttggaccgatcacttaatcccttcgcaccttgatttcataggacagaccacttcatcccttcgcaccttgatttcataggttcatagaattttataattagaaaaaccttttaagaccaactaggttccatccctaaaattgagccccagagtggttgtagctgatatcacatcagactagatgttctttaaacatctagaaaattctgaaattctctgttagtgtcaaaacatctcccccttcactggcatacctttagatgctttcttcctttatactttgagtttattttgttttatattttaggtatgttcatatctgccttatttaaattttactgccttgggaaagtggggcaatagatgaaataattttgaaattattcaaacataaatccactagataaataaggtttccttgattattcttgattgtttaaaaaatattagcctataagtgaaagtaccctttaaaacacagaaatgacacatataaaagtgattataccctcactgtaacatatatacatacatacatatatgtatgaatatatgtggaatatatatgtgtaaatatattctaagtgattagattgaagatttcatctttatgtaaatggagagatgctgcactgatttgtgtctttttcaggaggagtcatctaaggctttgggaaagaacaaaaaagtaagaaaagacaagaagaggaatgaacattaatacctgaaactataggaaaggttaatttgcctataattatatatacattccatagtcatcaaggaatatattgtgcagagagagtatccttgactgcttaagtcagccagttcagcatggataccaacattagcttttcttcttggttatatcatctgccaaaaatagagaacttatgatctattcatgtgtgtttcaggcttatttgggagaactaatttgaacttaatcaccacttcatctaattttagcaaggtaacagttgcccagggcagtacctgaattaactgtccatttcagtacatgtcaagtgcctttgttaggtggagaagaaatgtctctagaggaatataaatacctgatttcttgtcatcgagattcttgtactgttaaatgaatattgccttttactgctctttatggcttattggaataggagctcatttaagattgatcttggagagtttcttcttgtgattttagttcataagtatgtcacctttcattttatagtgttcatcattgagtaatggattaagtgaaaatccaggagtatccatctgcagttatgtgctgaggtgataattcatccaacatatttgttagcataaatattatgcttcagtttctgttgcaaattggtgattgtgaaattacagaaagtgattttctagtctgctttttttgtttaattcttgtaatgtaagcaataaatatggagtgtcagtagtctccttccaccccagaaatgtgttggtgtaacattctcgtttcttttaacaacctggaagtacctttcttgtgatcttcactgaggaattagaactatgatagaagttaggctgtggcaaatgggacattcgtagagtgggatagaggtggcagaatgaacctggtgtagggcaggagtatgttgtgtagttacatcaatttgatgcatgctttccatctgcactccagacggctttctcagttccaagattttgcagagagaaggagcaaaccttttcattggaaaaacagaaacaaccctcccccccattttttcccctctattcatcaaacctttatgtatctttcatcttccagttacctctaggcatttagatagtgaaatttacctttgagatataacaataagtgattaactgttcactttcagatgtaatggcaaacaattgttaaaagttattaactgatcacagatttgcctggacttcccttcccagggagggaacagaagttaggaggcaactttgggatggtgctagagcatggaaagcacagagaattggacaaacaggtctttttctcttttctctgatgttttacctttaaaagatccaacatccttaccgttggtatttttagtaaggttatagtaaatagctttacaccaggatggattctgaaatataaattctaaattatatttgttataactatattttatgttgtatgttatcaggagccatcagagaatgacctttttgtgtttggaacacttggttccatgaaaagtatgctttgtgttttaactgttaaaataatttaaaaattaattattttacataattaaagaagttaaaaactattaacattaaataatttcacaatttcaacatgtcaaacctatgaagggagataggaaacaatgagaaacttacttttgctcctttatacagaattattaactatattttactaactaaaaaactctagtattctttacctaaagtcaattggctggtaagagggagagatgcaaaattctccagctctgaacttggagctacttcacactctactcttaatggaaacttgaactaatgatagatagtatttttttcctctatttaaaatttttgtcttgattaggagatttttcagttctccatataataattttctacaatcagatctatgctgtggcatattttgctttatttaaaaatttttttttagagatgagttcttgctctgtcacctaggctggagtgcagtggcatgatcatggctcactgcagccttgaccttccagcctgccaagtagctgggattacagacaggcatgtgctattacacctggctaatttttaaagttttttttgtaaagatagggtctttctatgttgcccaggctcgtcttgagctcctggcctcaatcgatcttcctgccaaggttttggaattacaggtgtgagccaccatgcctggcctgctttgacatattttatagtgtgttaattacaaatagtcttcatatgccagaatataagagcaagtgttatctactttttagatgggaattgcagaagctgcatcaaaagtatgctttgaggtatatatagtgaaacagagcctttctgaagagaattatatcaaactaattacaaccaagaaataatagtatgaagcggatgctgtttggaggacaggaaaatttatcgggaaaattacataatccctctgattccactatccagagatagccattattattaatatttggtatgtacatccttatattatttttttcttatgcatgattttgtatatatggttatttttctttccataaaaatggtattaaactgtatatactgttttgtagcctacatatttcatatagaagtatattgttaacattttccatgtcaataaatattcttctatggcttaaatgtcttatgactgcattgtattctgtcttctcagtattatactaactagtcctccacttatttccaatttttaagtttttttcaacttttcactgttataaacaactgtgaaaacctacatcatttgcagatttttgtatgtatctttgattatttctttaggaaaagctcctagatatcgaatttcttggtcaaggtttgtacattctaatagcttttgattagttgagtcagattgtcatccaggaaagtgttatcagtgattgctccattaatattgtgttggaatatttaataccagccaaagatgggaaaaaataggcagtttgcttgataactcccaagatcctttttaaaaaagtaaactttttggccaggcacagtgtctcacgtctgtaatcccagcattttgggtggctgaggcaggcggatcacttgaggtcaggaggttgagaccagcctgaccaacatggtcaaacctgtctctactaaaaatacaaaaaaaattagctgggtgtggtggcgggcacctgtaatcccagctactcaggggggctgaggcaggaatatcacttgaacccgggaggcagagattgcagtgagcccacatcgtgcctttgcactccagcctggcgacaagagtgaaactccatctcaaaaaaaaaaaaaacaaccttcttgccttg

SEQ ID NO: 89108 - DNA, 1113 bp, Homo sapiens
aaatattatgtggagggtgaatttatacctccaggatactatcggatccatgcatactctttgaggtacttgtagtagacacataatatcaactaattgaaatcacttttatatatactgtgctcataaatggtgtccaggaaattttggttgaatgttttaacataatgccataataacacttccataagcaatataaaactacttgaagtagaactagttgttactgtgagcatagcttggatttatatagctcaaaacatttgcacatatatctttctaacacctatggtttaaaatcaggagctttggaagctgtatcaacactgttagaggagtgtatttgacatagatgttaatttgtttggaacaaaatatctctgcttatttgatgtaacttaaatagatagaatttttactagcattttaactgtcagcacagttaagtcatttatttgtttctccaattgaaaataagataaagtttgcacaacacaagaacagcaatacgacaaaaatggagaaggaaatctgagtaagagttaaggacaagaaaagggggaaatgttcagtacaaatagaagaagcaaaaaataaaggatggctctgaaattagcttatatttacactgtaaattcataaaggcactctcaattcttcaacttttatcatttcaccaaatgatctgcttatgaaaagcagtcaattgccatgactttattcatgtgttacttagtttctgaagcaggacccagtggccagtaagctaaggagaaaaaatgaagcaggactgcagctgttgttaaaactaaaaggtatacaaaattagggtagttactttagttcttccccacctcctcctcatcctgtatctcttcacagatccttctacttgttgatgggtacagaaaggggaacagaagaaaaacttacccagttacaaataaaagatgactagagatttttgctctcctcgctcttgcagttgaaaataatagaaatttagagaaaagagcattctgtcggcttcttgttttcataagaaagctgagatccataaatgttccatcacttaacgcaggctccaagcagcactggggccaggacacagat

SEQ ID NO: 89109 - DNA, 1009 bp, Homo sapiens
gcacactgaaaagggacataacagaagctggtacttgtataaataatagattggttgctatatttatagcaccaagctattatattgactaaggaatagtagtcttaaataattgtatcttttaggcatttctgatgttaagcattaaaatatcatgtcttcccaatctctccttgagccctaatttatgacaagtgaaaagacttttttttttaattcgaatgctctgaaaaccaatccttcactgactatgaccgaaatttgtcactcacaaaacacagttatcttacagttttgcagcaggtagacctccctttgctagtacaggttcagggtatctggaaataaactgaacattttgctgaagggctttttaatttctcataaggatttatccattgacctagcctgtttccagaatatttatacttaaaagaaagcaggaagggaggaatggagggaaagaagaaggagagaaggaaaagaacagaacagaaactttaatttttttaaaactcaatgcatagaaatcagtgaacataaaatagatgacagatgtgaatacatagtgaccaaaaactttgaactttatcccatttccagaccacaagaatatccatcctctggtgagcctcgtatctatactcaatcaggataactaagaatggcataaataagtcctgtgcaaataattatgtcacgtccatttatgcttcacattcatacatgccctactaattgaatcaagtgtttaatcccaggattcattatctatttccctatctaagtcttttttcccatttatatttagcacccagctgtccccttctccaaatggtcaactgctgtctcataaaagccttcagattggcctccggaacccctagctttgtgcagcaattttctcagtaggggccagctggatcttggtgtgtccctgctgctggcttggaattgttaaagaaagcaagctgcatggagatgggggtagaactcagcccttcctagc

SEQ ID NO: 89110 - DNA, 1041 bp, Homo sapiens
aaaaagtgtattttatcaccttttagcttctagctcatctgatttgagttatttacaggtagattatttgagttacttataggtgattttattaaatttcagggtattgaaggctaataaaatttcttcccccaaagcacttgggatgaggttggtacctcaacttatattaagaatttgttgattgagtgattaaacttctgaagttcacttttgcctattttgcctcttttccttcacccctacctgatggttccttagaaccatcccatcagagctaggtgaatgactcaggtattcacctattttgagatgtctctgagaaaaatctttttgtccacatttcatgtcagttggccaacttgtataaaccttggtaattaattaatggagaaacagcaatagcaattttagaactggtgtagagattagcagcttcgggccacagcatgtttctaatttaataatggctttaatagttgtagaaaggaagccttttaagaaaaagttcatgttgaatttgggacttttttccccaaatagcttgaaccagaatgaaatcaacaattctttccatccaggataccctcattttactaatggaattgactattagggaagagtaggttcagatttggaagatggtaaaccatctgaatggacacagaacacagaacttgacacttcctcgttgcttctttaatcttgtcattgtttctgtgacttctccttttgccctattcctgatttcttagaaccattgacattagaactggaaatactcaggattgtatgagggagataaagtatctgtgcttgttttgttgtgttcttgatattacgactggtgaacctttgtcgcttcctttagaactgtgcaaaggcatgttggagaggagaaggaggagaagaggaatgggttataggacaaaagaaaaaaaaagcaatcatgctaaagcctttgaagtgttagacgatccatctgcctgttagagtctgaggctgaatccctttttaaaatgcatcaaatgtttgagtgtg

SEQ ID NO: 89111 - DNA, 1035 bp, Homo sapiens
tatgtgtctttatctcttctttaaaaataatgatttgcaatctttttaatgtgcaggcataatgatctagaaccagaaatatatcctatggcaaaatgataacaagaatcttgtttaaaaaaatccagttaacttcagcccacacattgaggcaaattctatttatctagtgaatttcaaatttactcagctactttggaattttgaatatcgtgatagcaattcattctgtttatgcttcccacttgagctacagtcaaagggtagagaatgaagtatatagcaacaggtttgatttgtagaaaaatctgtaccctgtgtcttttatttcattaaaaagagtagaaaaacttgaatgtgatggaacagcagagattgtgttgagaaagtgagttttaaagatttttttcaaatctgtatttataaaggaaaactttaaaaaatggatagcacttttgtgttatatgtggactaacctacctttaagactttttgacaggagagactagaagcggttggtggtttctggaaataatggctgtaggctgtaactgatgatttaagccaattaaacacacagagtggttctttttggtgttgtttggcagaaaacgatgaaatggtgttgcctgataaggaagagcccagcgtatgtgtgatttcttatgcacatgtgctagaatcagtgcaactcataaattcaaattacttttaaaagctggtcatgatacatttgctcattaaccatatggaaaatggcactcaggaattttctacagtgtgttttcaaagaaagaatccaattgcaggcagacattccttagtacagtgtttatgcagctgtacttgtgattaaattacaccaactcaggcccacatgtagccacagaacttattactttgagtacaaagcaccttgtaggagtatgagaactctcattgtgatgttttttggcctcttggccactgtatcaagcaagcatcaaaagtcatgcatgtgctctgaggtctctggagaaggagctgtgggacaga

SEQ ID NO: 89112 - DNA, 1034 bp, Homo sapiens
ccagtcattgtaggacccagtgatacagtttgtgtactgagtctcctgctaaactgagatgatgggtaaactactgcagctgggagaaatactaacctgccttcccagtttactcacacttagtgtcgatcaggtcacactgacatagacacagagtggtgtatatgtcaaggaaggtactgtacgtgcctggaagatatctcaggtaattggcttgatacttccagcaggagtcaaaagtgtaaggaatgtgttcttactgtatttgtagctcacgcagtttagtgactttggcacgttctgactatctcttttgtggagataattgtatagatatttaactgtcttctccccttcttcccctatatttaaaatcaaggttttgcagttgtctattgtggactgctttttgttgggaagtctgtgcctctcctggtatgtgtttgggaccgggtgcacactacaccttttcagttccacagggataggaccagatggaagaatttgattatctagcagtagaggaccaactgttcagttggatacagaaccgggagaaaagggttgaagagatctaaaatggctgtcgtatgtggagccaacagtttccgaagggaaccaggcaggcactgaggtgtagtaatgcagaatctcttccaagtaccagctggggctttcaggagccgctatccccacagcagacactcagcaggctccaagcagcttgactttaccatatgtggaactttttattctccacctcgctccctagagggacgggccacagggacaccagaggcaggtgaattgctcttaatgcagagcactaaatcactgggttaacatgagaagcctggagagaggaaatggatctgcagaagactgactcggagtctcttaaccttggagctattctgagcaccaaaaaagataccgcataatgtttcattaggctttcaccttgtgcataccctcttttatgcgagtgaccttttcatccttgtacatattttctaaatgcttttaaaagccat

SEQ ID NO: 89113 - DNA, 1096 bp, Homo sapiens
gcgtgaatctcagtaagagcgccagcccaggcattaacgtccctcccggcacgaatagaccaggcttgggccagaatgagaatctgagtgccattgaggggaaaggcaaggtggggggactgaagacacgctgctctagctgcaacgttaagtttgagtctgaaagtgaactccagaaccacatccaaaccatccaccgagagctcgtgccagacagcaacagcacacagttgaaaacgccccaagtatcaccaatgcccagaatcagtccctcccagtcggatgaggtaactcgccttttttaatgtttgctatttaacctcctcaagaaacggtccctgctttatgtttacactctccacagctttatttattgtcatgggccaaaagatgcttagattgaaatgcagtgggtttctttttcccccatagccattagctagcaattacttgcttcttgataagcagcattttggcttgaatggtgcaaaataggactaattccagtctccctaggatattgtcttctctatgactgaagagaccagcgctcatgccaacactactgagatctggaatctcagcatagcttcaccgtgagttgaaatccccagctatgacttgtgtgtatggcagagagataatgactcaaaagtaagatgctatgagccaccatgctggcttagagtaaattaaaaagaatatatatatttggggataacaaattgggtaggggtggctttttaatgccatgttgtcaacactcactgtttttctttgtcttctgggtagagaggaaaatacttcctcacaacaggatttttaaaaatcccctacatttattaagcaccacatgcccattattctgtttaaagacactatccctgagtttgaggcctactctctgggtttcaaaatcaatgtgtgcgtttttttttttctccttagtttcagagtagttttctgctttctttgccgtgacgagtacaaaaaacaagttcatttataatgaaatcatttcataagtcatcatttcttagtagctgagcagaggatggctcattttaatatttctttatgctttatcacctggttt

SEQ ID NO: 89114 - DNA, 1030 bp, Homo sapiens
tatgtaaggcaagtggggggaaacctgaaattttgttggtctcaagtcttaccctattgtttgagcctcaaaaaaaaatttactgaatcaacttaccatgttgctaaataatgcaatgattgtattgctcgtgttttaaggagaagagaggtataaaccgcattcttggcctcagaattccatagaaaaacacttgtgccaaggttacctgcctgtaaagacccaagattatatcccatgtttgataatttaatgtttggaacatagtaagcacagatttatggtctattaacatttaggtatcaccagctatttatcttttattttcttgctagctgcgtatacaactgtgaaagcttaaggcactgtagattgccattgggtcagtccttaaaattaatattcctgagattgcattaaaggaaagaaaatattaaaatatgtttatgctatattcatagaagcttacacatggaaacagaaatacatgcaacacatataaatctttttgtttacatatgcagcttttcttccagccatgataaggtgccctagaaacattcactagtctttgtaacaccccagagggtaagtagcaagaattcttatcttcatattgcaggtgaaatacctaggtaggggcagattaaatgacttagccaggtcactctctaagtcagttatgaagctagaaataaaactccaggatcttgacttttggttcctacacaagtatcagacccatcagtatttgtgcttcttctcctcacttgaaaagtaaccattgatgtaaatcctgtccctgttaaggaaatcttgctgtgtggcactagcacacatgatactgagtccccgatgggcagttaagagggtactctgctgttgcagtgaacaagctcaggtagcaaaaggatattgttaagccagtttcttgcagaccaggccctatgaagaacattatcagaagtttccataacttcagagaaagtattttcatctactttcttacattagtttctcttgaataatt

SEQ ID NO: 89115 - DNA, 1230 bp, Homo sapiens
acagtgcaatttcttttctagccagcaagtgacttgaaagtattgaaagataaacaacctgagcaagggccttggattcttgccatatgctaggatctcaattaagggatgaaattgcaagacactcttcatttttatcaccagcgaggctgggttctgtgggtcagtaaagcaggcaagagtggcggctgttcgaggcatgggcacagctagtggagggtcataactacctgcattagcattaatgggacttagcagcacagatcgcttcaaatggaagaacagacccaaaagggaaaagtgggtagagagtgggggttaactttacttgaatctcctctttgttggaaatacttgtctctttttctttgtcatgtgctgaggcatttactaatgagtaagtaacacaaaaaatcacagatgaaagaaattggattctcggtagaggactgagattttaagtgctattcaaaatacaagttgcagaatattggaattaccacatttttgggtacatgaatagtgattctctccatctgagcactaatttgcattgcctgtgctgtcatattttgctgtggcaccattttctctaagtattgcattattgacttaaaaggtgtcattttccaaatgatggaggtaaggaagtacattttccttatttcgtaatttgcacacagattgaagaagacttaccattgtcacaaaatttggatatgatggatcttgtattttaactggattgtgggtgtagggaaatctaccagtacattaattttaatggaagattgtggcatccttgaaaaatattttgaaagttaagtcatgttaattttcttccttatttctttcctcctgtttcttaaggcctcatcatctttgactccttactcttctgtgccatcaatgataactgttaattcaagataattgtggctttagtaatgtttctatttagtatggtgcttttcacccataaaaatatagtgcagatgttaacttacctgatccagagctgaaactaaataacttagtgaaatgctaattttcttttaggtgtgttcctcacagaaagataaggtaaatgacatgaaatacacacacccattcttccactgagcctttggcactcaggtttctgtcagtacaatcatttatgcatattttacttaatagttgagggtccgagtttctctttgatgtcactccgctactgatctttaactt

SEQ ID NO: 89116 - DNA, 1346 bp, Homo sapiens
atggaggcaatttcaagcctgggccttgcactgtacacttaatttattttctgacctttttgtgatttggggagattctgtatagccatgcgtgcatgtgcgcgcgcaggcgcgtacgtgtgtgtgtgtgtgtgtgtgtgtgtgtgtgtgagagagagagagagagaagtgcaactacaaaatctgtctgtagttctgtaggtggtggatagaggtacgtgtgagggggtggttgtcttttgccaagtgatactatactttgttggaaagtgtctgttttctgcctgtcctcgggtaatgtataaaacatggtgcttcaggtagagatgaagggtaaactgatgtccccctaaatggccagcctgtgtatgcacctaacacttcactgagcaatctgtcaacatgtcagcaacacatgttttataaaaagcctccagtgggagcaaaggctcctgccagggcttaggaaatgctttgaattcagcagatttctattgctggagtcccccgaggttccttttacaatgcctacatttcagaaatttgaacttgggacccttagggggttctctccgaatgcctgaaaatgtagagttatattgttgcgtgtccccaagcggtctttactaatacctgaattcggagaagctggaaattacagagctccccaggggaagctttatccacaccaggaagaagagaataactctgcagggagattgcttaatgcattgctgaaataaaagaatttgagagagatgggttgaagtgttttttttttttttcccttttctggccactccttcagcttagctaagtccttaaagacaaagtcagggtaaggaagcagctgggctctttttaatgaaattttagatgtggcttttgaaatagtcagatgcctgatgcctccctgtgtgtgtgtgtgtgtgtgtgtgcgcgcgcgcacgcacatgagtgtttgtgtagtctctctcactagaaacctcttttgtttacatgcaaaaagttgttttcatttttaggtgcatcatcagtttcatcttgtttccttccaggcttagctgtttctttttttatactcccaatgtacctgtctcagttacttggaaatatttcttcatctctttctctttttttatggtgcttttcttttattacatctgcctgtcatgctttgtactctccccttttcataacttgtggtgttgctactttcctttcgaactctcactgctttattgaagacttctttatgcctatgactctgcctctctttttaattttcctccggccctcagcgctctcgtctcaactcagattttggaaatacttgggtatttttt

SEQ ID NO: 89117 - DNA, 1061 bp, Homo sapiens
gtgaatgtactaatctattaataactcaatcaaaaagtctaagaatgggagggaaatatttctgtactaggatttctaaggatttatgaagattgttataataaaaagggaagtatttgaaactcatctcagtcttctagcagaaataaagactaaatatatgaatgccttaaaaacagagtttttatctgataactggtagagaaactgtttatttctttctatttgcactttccctaaaggacctatggtttgtgtctattctgtgaccatagtataacagagtacgtatttgtcttcttgaggatagccatcattcattcattttctctgccagtaatatgaactttcatagtattacgatattgttagtttcttaagtcatactgcatttagtggtattcgcattcattttctatattttcttgtgataaattctgttatagtcaaaaaatttcaaagcaccctggcaatgatttattttaatatctgcgtgagactaaatacacaaataagaaaggatttaatatgaatttttcatggatttgctgtaacttgaatattgtgaattgattttgtgcaagctgtcacagaccttctgattagcacatacttactagaacatctctgttagcaaaactggattacaaagtgtaaatgccaggtatttgtgcttattctgtttagcattctcatgagtttctttacgtatatctagtgtgttacatatgttttgaaagagtacctaccttagagaatgtggctcttgttttatggcccattttaattcagtatatatatatatgtgtgtgtgtgtgtgtgtataaagggacatgtatatgtgtctatatatatgtgtgtgtgtgtatgtgtgtgtatgggaaaaatgtataaagaaatggttgctacttacaaggctttacaatttatggggtgaccacacatacacacttaacaaatacagaaaaacataagacttttttcattcattcattcaatacatatttattgagtaccagctatgtaccaggcactatttatttcttatactgaagatacag

SEQ ID NO: 89118 - DNA, 1050 bp, Homo sapiens
aaggtatttagaaaccaagatatggatactatgtatgctcaatgctataggtgtaccattacttatggacttcagtagacagaagtaggaaatgtacatgcatacttactataatatataatacactcataatatggctcataaaattcacacatatacaagtatatgcacatatgtgtatttttctctatccaataaaaaccatatgttcatattgatacctcccattcaattcagtacctcaggtacatcctagtctttttccttggtgtatttctgctgccttctgtaacagagagaaacctggcttccattatccttattaatatgtttactcatttgcctgagcctagaatatacagtaagtagtttcaaaattgcttgctgataccaccatgataggcaaactgagtttaatatttgtttataattgttaatgctgtaatttttagtgccacatttacatacagtgaaattcataaattataagtatataatttggtgaattttggcaaaataaatacacctatgtgacacgcccttcttaagatataatttctttcatcccagaaagttccctcatgcttctttctgatcaataatgctccactagaagtaaccagtttttgagctgttttaaccatagattcattttacctattctagaacttcttgtaaatgaaattgtacggcgtgcaccctttttttgtgtgtccagcttcttttgttcagcataatgtctatgagatccattcatattgttgtgtatataagtagtgtgttttttattgctgtgtagtattccattatatgaacatatcattatttgttttacattctcttgttagtggatactttatttttagtttttgagtattatgaataaagttcataatagtcaaccttctatatggatctttttgtggacatatgttttatttctctcgttaggaatagaattgctgggtcattgggtgaagggcatgagatatgatatgtttaatctctattagaaacttccaaaccctttttcaaaaactcccaccagca

SEQ ID NO: 89119 - DNA, 1056 bp, Homo sapiens
atattactttatgcatatttggagattatctggaaataatcatttgaaaatatgtttacatatagcattatacgataaaatatatactactctagtatatatgtatatatacatatgtatagatttgtatatgtatatgctacattatatacataaatactatacaaatatataatatgtggtcacattatcctgacaagtcgagattgagacaatataagtgggaacacatttccacgaacaactattaatttacagttactatgataatggcgtacacgttcacttttagttctatctgggtagctctgtaaattgtgtattgattatgctaatggcactcgtgtctttattacttgtctgcagatacatgcagattgaatgcacatttggtgaggtggtcattctgtaggaaaaagtacatttttaaaacctggcttttggagagattgtattaaaactaaagaaaaacattagactcatatggacacctaaggaattattttgtgtcctaggaaatgaaaagtgcagttaaaaaatttaaaacaaatgatgctcttatattatctttgtttcagattccttaaggaaagtgttacagaaatggaactaaatcaataatgatctatttttatagtttatttttggttgtgtggcttttcttgttttgtttatcaggatgaaggaaccttcgacatttagggttgtatgtattttaaaatttattagaccaactaggggaagacacaatgaattcctttttttcaattatacataaattttcttgtagtttataatagctcataaggtataaatcacagcctctttttttttttttttgctgtgatctttcattatacaaatttgtgccttatgttataggatttttctttttttaaaatttctcttttcctgagtcatcatgttaccaaggcagttgttttgaaaatgctttcttatcttcctaagtgggatcatttcttacaaatgtagacttttccacttagaaaagaaaaaaatctgttttcatttgttttcaaattatttttcttttta

SEQ ID NO: 89120 - DNA, 1047 bp, Homo sapiens
aaagaaaatttagacagaattctctgcaataatcaaaagataggagagttaaatactgagggaaaataagtctaaatgttacacccagctaaactattaggttggtgcaaaagtaatcgcagtttttgccactgaaagtaatggtaaaaagcacaataacttttgcaccaacctatataattctgaagtgagggcaaaatgaacattttcaggcttgcaaagatcaagagaattcatcatccatggaagatgtactggagcaaaagaaaataatacagtagaaaggtgtaggatgtaaacaagaatagagactatataaaatttgtcaaaacataattatgggtaggaaacattacttttttgggtgtgagaaaaggtacagttaagtgtgataggttggttccattaatggcctcattttttagccctccaagtccatgccccctttttatataaaagtcagacagattttaaaatatgtttctctcaggagtgggacttactttcctgccacttgattctgcttggccatgtaacttgctttgaccaagggtatgttgttgactcataaggaagtttgtaaaagtgcttgtggagttctgcttccactcttgtacctctgcccttgccatggaaacctgcccaggctaacctgctggaggaatgtgagagacacatggggcaaagccgaactggcacaaccaacaccagctaacccctaaccaaaatcagtagagccacctagccaaccagcctgctgactgtagaagcataagcaagtctagcacagatcagctggactatgcaaactcttaagctaaataaatgtttattgttatacaagctgctgatttgtttgtgtgtgtggttctttgttaatgcagcattactgtggcaataaatagctgatacaatactaagatacaatgacaagataggaagcatgaccaatgaatagattataggtcatgataaagggttgcatgcatgcaactaaagggttaacatgctaaagggttttcatggtcaggagaataggaaaactga

SEQ ID NO: 89121 - DNA, 1051 bp, Homo sapiens
tatcactttaatcgattctttgaatttttttctctaatgctttcttgctgcttccttagttttctgactttgactctatggcatgtgtactttgattctagtttctctgccatcttttctttgaggataaaaaaacatgcaccaaaagtattttgattttactttaatagtagctcttattcagcttaggtcaaatgtaaagagttttatgtctacagaagctgtaactatattagctatggaatgatatttagaaatgatatttatcaggacttctggtatcagtggaccaaaatactgcatatagctatcaaggattttaccttcttttctatcaatatggctatactagggaattctgtctgttattgccttgaaaattaagagcaaggaagtgtagtttggctttctcttcagcactaatattctatccaaagaaatcctatttcctgttcattaatttcagtattccattctttcccaagatcttgcttcacagcaagctttcatacttcaagctctacaagttagtgttcagtcctcattcccacataaacacaaccattttgaaaacatgaactgatattaattacccccttggcaccaaaaagtcaggatttcctgatgcggcacgctaatgtaaaatgcattagtgcaaacggtggctccaaagggtaatactctctaaataaacacagcattttttttttttattcacaactctggggctagtctgaaagttattcatcctccacacccccccaaaaagcattttgatttttaataagttataactgggatttttataagaagaaattgaattccaagctggaaatcagtgtcacttaactctttttggttctgtgaaataaaattctacctgaatgttcgggtgattaagtggctttgaaccataattttcaacaatctattggaagataataacagttcatgtttagtcagtatcactaaaaatgtgtatcttacatttttacttaataaattctttatttcaaatagtcattcaaggtcagaaagtgtgtgtgttttg

SEQ ID NO: 89122 - DNA, 1080 bp, Homo sapiens
tgtacagactatatattctacaactgaaatttgcattttatcgaagtaataatatcatactatcccataaaattccagaaacaaagtattaccaagaaaagagtggggtcactattaaacatttcaaaatatgctaagtgtgttagttctgttatttgggaatatgttattattctgtagcattattcaggtggcacattgtttttggttttctcttaaaattttttaatggaatttttaaacatacacccaagtgtagagcagagtatggtgcgatgggcccccatgtaatgttaacccaatttatatacttagcaactcatggcgaaacttctgattgttcatacactaacccccaaatagaaacaaacgctatattatttaatcacttaaatattccagtaaacatatctaaaagtacttgaagattcttcttgctcctaaattctgtgttttcaatgttaacattgaattagaaaccatctgagaatttgtacgtataagtcattgccttttctttcattttaaaaagtcattcatgttaaataaaagattaatagacatacattatacaaagagttaacatttttcataatttcatccattaaaagtcacaattattaaaaatttggtacttttcttccagtttaactttacacaataagccaacctatgttgttttttaaaacaaaaacggaattatactacatactattctgcaactttcttttctttttaacttagaaatatcttgaatgctccttgttcccttgttgcctcttaattttttactgttgtagaaacaaagcttttataagctatattgcagagttgtttttttggggttttttgtgtgctgttggggtatttctttacagtaaatttttaatatcttaggtgtaaggctatggatgttgaaaaaagtatcaccataaaaggtatatcactggcaacaccagtttcattagtcttactaatttttgcaattctcatcaattttttaaaatgttatctctgaattttatttgaattgcatttatttgtaagttgagcatcaatttaagtacctattacactttt

SEQ ID NO: 89123 - DNA, 2727 bp, Homo sapiens
tgcaattgaatataatatcagaagaaattacagggtgatactgtatacctaacgatataaaaaaattttgtttattgtaggtacggctgcttttttgtggtatgacagtgttagaaatgattcgtttgtaatcttctttgcctgttatggtcaaactattatctaattatatttttaaatttatcttttagggacagtatggaaattaccagcagtgaaaaagtacttacattccagtagccagtatctattagcagccatattgtcacctcagcactgtggacacctccctgtgaagagatccttccattccatctagtttttggaaaaaccttgtggataagtggctgtttcatcagtaagcagcctttgtggtttagttataaaaggctttagtagctcaaaaatactcttgatttcacatttctactctagatggcaacattggacagaaaatgcaatgacataaccaatttgtaatgattttggaactgtgtttcaaatggactgttacagactgaaaggtgtgaacagctttgtatgtttatgaagggtaagggaatttaatacttttccacagatttttttgtaaggggaagagggaaatgtacactttttacagcagcaatattttgtatattatgtttatttcatgtggtgaatatgcaaggcggtacactacgcactggacagcatcagaaatcctctgttaatgtggactggaacatggtagatgcttgattgttttggtctcaaaatggtgtgctataaagataaaggtgaggggaagacaaagcacaccatatgtccactgttctgttctcatagaggaaattcaaatcccttttatctattagataatcaagggcactgtgatacagttttgagtaaaaagacattttttaaaagccttccagttttgtggattaaacctttttataaagatcatttataatactgttttaaaatgtgaggcaataagaattactttgtgttggatctgaggaggctttggtaaaacagtttcatctaaatgaaagtggtaatcctcttctaaaatagcaataactgaaaatgaaagtgttaattttaccttgtttgagttatcagggaacttagtaagtaatatcaaagcattttataaatgatatcaaagaagagtcaacattgatccagtcattttattttgtaatattgagggataattggttattaaactgaatagttcaggagactttacaaacctttgtttcaactttcttatctggaaataatatcatttataaagggacacttttatgtttttcccttttttatgttggttgatataacacaaagagatatttaggaaaatgcttattgatgaggtttattctatctgtttttaaagcaccgaggttgcattctagataaccttgtttattagcatggcatattttaatcattatttgagactgtcctgtgcctgattattttagctaaattcagggagattgcgtggggcaggaaagcatgcattgaaaaatttctaaccacggttatttaagcataatctgaaaacatctagcccaaaggtaagttgctattttcatcacagttgcctatgcccagggaataagatgtattctttataattgaattggtttttcccacgtctaactggaaacaaaacagaaggggcgtcataaatttgaataagcagaacatactgttctcaacatactgtaatcaaaaggaggaatttcagtgggtctctgtgtgtgtatgagagagagagtgtgtgtttgtgtgtttcaaggtcagaacaggtttttttgtttttgttttttgttctttgtttttttttttgagatggagtcttgctcttgtcgcccaggctggagtgcagtggcgcaatctcagctcactgcaacctccgcctcccaggttcaagcagttctcctgcctcagcctcctgagtagctgggatgacaggcacccgccaccacacccagctaatttttgtacttttagtagagacgaggtttcgccatgttggccaggctggtctcgaactcctgacctcaggtgatccacccgcctcggccttccaaagtgctgggattacaggcgtgagccaccgtgcctggccagaataggttttttctttcaacttgatcagtagaaaatggacatcaagtttgaacagataaatcatggacagccttattgtgattgaaatgcttgtaggttctgtgccaattttccaccactgtgtactttgttgctatttaaaactgtatcaactctaacggaagaataaattatttgtgattttaattttctcatttgtttctttaaattagatctctttgactctcttgtcttgtctggagactatgctgtgggtttttatataagttagtccagtataagcagactatatttgtattctaggactttatcaaaattctcttgccatgcccaagttaattagaattaaccgttcagtaatcagcatgttgtgtaggctgtttgttacagaattctttctccgaaaatgaagtccataaggctataatcaagatgactgaattagataaatgagttgaggagacaaaattgtactgaacccaacctggtgtagtacgttatctcatttgaaataagctcaactgacattaagaaataatttgtcttgccaacccatcttctgttgtcttattctccttttaatggaaactaaaa

SEQ ID NO: 89124 - DNA, 1394 bp, Homo sapiens
gtaggtcataatgattacggttatcagcaaccgtcgtatcctgaacaaggctacgataggccttatgaggattcctcacaacattactacgaaggaggtatctatataccttcacacacatacacatatatatccccttctacaggaatgaaaattcttgcataagacaacttctacccatgcaaagctcttgtagaatactagttgctggctttcttgaaagttgcagggagcccaaaacaatcaaaataatttccttacaaatatttaaaatgtataaccatgacttgccatttctaacaataataaaaagactaaaacattaaagataattttttcctcagtggaaattttctatttgaacataaatccatcaaacttttttttctcgtgtgtgtttacatatgtataattttacatataagtatagtgcctttaggaaacagcttgctgatctcgtgtagctagtgtgtgctcttgtagctgtctttaattttgtcttttttattttatttagcatagtcatgatcttatgactgtgatgttccagtaaatgtaatgctcgtatggcagagacgctgaaaatgctgcagttcaaccttgcaaaattggctttaactgcagtttgtttggccgaaatccttctgtttggtttgagttttttctttgttttgttaacttctaaaaatcaatatggcatttcattttgttcttgtgttgttggctatgcatcttagagggaaaaaagttacttaagcagacttctcagttttttttcctcttctccaattatcctgtaggaaattcacagtatggccaacagcaagatgcataccagggaccacctccacaacagggatatccaccccagcagcagcagtacccagggcagcaaggttacccaggacagcagcagggctacggtaaagctttgtacagtgtatttttatcaccaaaaaaatgtgctgattgttttaaaatatggaagtggatatttaatacttatttttacaagaattatcacttgaaaattcagttttagactagtctactgttaaaatgttggtttaaaatgttgctcttagataaactagtaatccatttaaaaagaacaacaaactggagatggttcatgaccaaaggtaatgtgtggagtcatttaaaagacaagaaaaatgaattatcagatgtatttgtcatgcctagccctgtgtgtgctgggaaaactgatgattgggtaattattgaccatatgtatataatctgcttagcaaatttattttgaaaaactagtggccaatacagttttttttaagacatactgattttttttttttttgagtacaaatgagatctattcagaatgcataaagaaaatgtttttgtcattccct

SEQ ID NO: 89125 - DNA, 3041 bp, Homo sapiens
gtcaagttaaccaaggcaatcatatgatgggtcagagacagattcctccctatagacctcctcaacagggtaagattccatttggaaaatttgctacttaatgtaattgaaaggctttaaattttaatgaccttttaatctagacaaagtcagggcgttttctttttttttttttttttttttttttttgacaaaaggtagggttctagtaagtacaaaggggtcacgaagaagataggaacttcttatctgttattttctggaataagttataccatacaattttatatcgaaagctcactaattcacagcagaaaatactgttttgtttttgaaaagttataaagggtcaggaataaacccaattttacttcacagcactgtagtatcaaaattaaaaggaaataaatttgctactagtttgaacctatttttaagaagttagcatttgtttttctgagttggtattttttgatactgcatgtatggtcttaacattgattttagtaaatgtggtatgtggagctgctgtgtatgtatgcatatgtatatgaatagctaaaagtatctgaaatgccaaattatgagatgggaatctatagttgagaaataatctttcataatatcaaattagaaagaaagcctttgatgacatagagaacacattatttatatcttgactggttgtggtttttcaggcccaccacagcagtactcaggccaggaagactattacggggaccaatacagtcatggtggacaaggtcctccagaaggcatgaaccagcaatattaccctgatggtaatctctcctgatgttaactttcccattttctatccctgcctaatattaatgtagagagttatttaaaacatttcagtgaggacgaagaaactaacaatttgtttcctctaaattttgaaacacttcagtactctaaagtaccaatgatagcattagtttataatctaattcaaagtatattttaggtgttccattagtaccatcaggaatcacagtctgtcattggaatccttatgtaaaaggatctttttgtaatatgtttagggttgtttgatttcagccaaagcttatgtttattgatttacttttttttaataagagcttcattaagatataattcacctgccataaagttcacccattagttgacttgtattaattgtacaaatacatagagtatatagttctcaagttatttttccaagtctcatcattttaattaatgtttcatacttctcaacaaactaaggtttacattagtgcttgcctttgagaaaaatttgggagactaaattatatccataatatagccatatagagattgagtagaatgggaaaggcaatttggaaataagatttttagttagggttttttgttttttgtttttttgtagaaagtggcttgtgaaaaattggttagtaagatgcactgtacttcaggaaaatttgaatagcaataatccaagcatacaagtaggttttcacagtacagtttcatcaatttttctgtatgcttgaaaattttataatacagtgtagaagaaaaaataattcagaaatacattacaaaatgatgtgggttgttagggtttgccaaaagccttattcatgtatatgatcctttgatgtaaatataaattactgaacagagaaactaagaaacttaaagctaaagtattagcagccattgactagcagcccatgtaagctagcaagaagatacaatttaggatatttgaaaaaacatctcacctgtcattttttgttaatacataaaacataaaggtacatttgtacttaaggacattggtttttgttttgttttttcttttcatatgtaaacatggtattaagatttttttaaattaaaaactttagtaagattgttgtagactctacgtattttaaagacgtgaaatctactttgttaaattatatgtattaagaagtctgctgaaaataaatgattgtttctattttttaatttttaattacattttaaagaattaaatttgacattgttgttttgatcctgggtatctcttgaaatgtgacatgtgtattgttataacctttctgttcaaaatatattggtttgttattttgtaaatatcaaaacattaaggttactttaattcattttattagtggattttaatttgaagggtatcatttttgcataggtgtatattactttatatctgacatttacatagagtattctatttatgtcgacaattaatatttgtaaacaacattggctcttttctctcatgtccggatatttatgttagtaaatatatagattaggaattggcaaactttttctgtaaagggccagataataaatactttagtctttgtgggccatatggttttggtctcagctactgaactcttattgtagcatgaaagcagctatggacaatactgaaatgaataggcatgactgtattccaataaaattttatttacaaaaacttgccactggccatattaagactgcaggccatagtttgccaacccttcatgtaggtatttatgaggtggcttgggaacattagaatactagagcactgagtataatgttcatttgtaattttattcctgtgtccttaattaggcatttttgtaaaattgagtttagattttaggtaactaaaaggttatttcctacattttcttagtgaaactttaaaaaaaagagtgagagtatttttcactagagtccaattatctcgcaggtaaaatttattgtgctttaaaactaaagatatactctgtcaacacaatattaattttatgaagatgtatgtttatgatacttgaaatattttctaaagatttccaaaatggcagcattaagatatataattttgcatctgaagatactttgagatacttaactttatgcaagtaaatgttagaacttgaaaatttttcagtttctttcaggggaaaaacttatggaactcttttatattttgcattgtttttagcatatgctgtggaatt

SEQ ID NO: 89126 - DNA, 1449 bp, Homo sapiens
taataagtgttcattaaatgttagctgtcattttaaacaatattatttaaaataatttgtagattaatgatacaatttttataaaattttagtgtattggtttgtatctgaggatgtgaaatacatgtgtatatgtatgaatgttctatatatatagaatatttgtaaaattacattattcagaattgacagattaaaacaatgttttccttatagttaagtatttaaaaattatttttttcagtctacctaattgtgtgtcactatagacagtgacagtgctcatcacatctctatattaccatggctcctagcctggggtgttgtacctaataagtactcaataaatttgatccttgacttactcttcaaaagaaaattctttttttttttttttgaccactgacttaagataaaattaagtattaaccatctcattggagaaaagaatgccaataatataaaatatggtaatttgggaggtttttacatgtgtttaaaataaaggatgttattttcatagaatatctattagaatataaaactcaaaatgggaagaaataatgtgctaatgataagtgtttgttatatgcccttgcaaaacacttgcaaaaatatattctaggtaattaagacatcagtagggtctttgcatatgtattatcacgctttgtagtgcgtcttaacatcaaaattgtttatgtaaaagatgaagaataaccttaaagtctgtagtaatgtatgataccattgtttgcagaaaatggttgtagaagatgcattttataatgctatttcactctgcagtacaaatttttagaacatattttggggtaaccttttgagtttgcttctcttagtttcattagtatctcaagagataatatacattgccagtgtagcataatttcattatcctaagaaggaaaataatatacttcctaaacaatcagaattgaagtcatagtcataattttttttttctttaatggataaggcttcgaggaaaattatgaaatgtattgtgctttagtagtgttagctgactgcattctctctgtggtttaggcttgatcatgaatgatgttgggatcctctgagggagagaagtgacagtaaaagaagggtagtaattgagctctttgggattggaactgctcacagtcccaaaagataaagcacaagtggcatggtcttttctatctagggcttaagctacaattactttgctttcctttagagcaaggtttagtgttttgttatgtatctttttggatttttttttcttttggctattgtggttttgctttctttttgtttctaatattataggttttagttatatagttaccttctgttaagacaagaggtctttagacagtgttggagaagaaaaggcaaaaccttcatttactgaaaatgaattacataaatgtccgatcaggttac

SEQ ID NO: 89127 - DNA, 1848 bp, Homo sapiens
gtgatggccaaataacaatgtgtatctattaagtgtgccaaagagaattgtgttcacaaaatggaaaggcatacagtaactggccatttttaaatgtaggaggaagagaacaactgataatacaggaatggacattacatttagaacatcgaagtaaagaataatgcctccctctcctcctacaagattaaaaatgggggattggagcgaaactaaccgtttgctttctccaccaaaatatccctaagaagggacccaggtgtggcagaccacctcatatctgtttttccttttgcccttttgtgaactctgaaggttagtcagtggttttcttcaaaattgcattaggaaatttgccaagggcatccttttgaggcagctgtctctgtacccttggaggccatcagtaatgtttccaatctatagcagtagtcggcacaaaaatgttgaactgttgtcttcatgttttaaaacattcctctgctgccactatcctccaccccgaaatagtgtaaaatatggcacattttgggacttagagtcctttcatcattttttgttactgtacatttttaggtaaaatccatcattaataagtgtatccaatacatcaataatgaaaggacatttaatttttttcacataatttagataataatagacacattagaaatgcttaatatataaataaatgagaattttttgtatagaatgttaacattttaattttcactactgagattttataaagtaaatatgctttaaagttttgggggttattaactatgttcatgatgaaaatgcattagaagaattcgaaatgcatttgtgtttttgttcttactgcaatttagtaacataagcaactcttttaccctatgcatctttcgtatattagtctgtttctcttgttttactaaactgtcttctttcagccacccacacagaatatgcctatgggtcctggagggatgaatcagagcggccctcccccacctccacgctctcacaacatgccttcagatggaatggtaggtgggggtcctcctgcaccgcacatgcagaaccagatgaacggccagatgcctggtaagtttttctcctctaagacattaacaccagagttgcttagcaactgaaacgacatgggggctcaagggatactagattgttgatgacaaaactgctttgaatgcccccgagtacaagctctcttagagtttgttagctacagagctacgtgacctgtattcagtgtttatcaggctgcccttgggctttgatgtagctgacacacaccattcctctgatgaacagaactggctaaatttagtctgtctgaaactgcaatacagttggctttagaagctttttggaaaaaaaggcgttgcaccatggcttaagaattaaagtctgtttaaaaaagatattataacatttccctgagtttttatttacttaaatattgattgatctcagaaacagtatcactgggaaaaacacatggggaaagaaaacagtctctgaagtgctggtgtatttagtatttccttattgatattgaagctgaatctaaatttttttaatacataggtttatagcataacataaatattggaattgattttaaagcaaaaattaaaggctgaaaaataatgtaaacttccttacattatttatacactgagccattctcttttctatttgtcaattttaagtgtagggtcactaggttgatatgttttaagacattggatgctgatttagttacctttggctggtttgaaattttaatcatacaagtatctttacactattttgtttttgtaacagtagcatcaacccatg

SEQ ID NO: 89128 - DNA, 1079 bp, Homo sapiens
ttcttgaggaactgtcaaactgttttccacagtggctgtacccttttacatttccaccagcatatatgagagttgcaatttctatacattgttcacaacacttgttatttttctggacttttaatttttatgttattgcagctatcaaagtgggtgttggtcatttatttttgttttttagaaagccttgcaatttttaagagtgttagaccttgtggttgaacaattatagaagctctagtttgtgttactttgctccaaagagaattaagttttcctttggtatgtgaagtactaggaggttaccttgaatctattaaaggttggttataagactttttagggctgatctatttcaatttcgaccttactcttaaggagtagctggcccttctgtagtctcaacagagagttggagttatttatgaaggctcctctaacttggtggggcctacactccagtctttgtctccatatcagtgagcagcagctggaatctctgctgagctctttagcctcctacctgctatttcgactagttttcttgaatgtttcccctcttgtggtcctttctctctggaaatttattctttagtttccagctctttgatagtcaaaaattctgactcttttttttccttagtccaattggactgcactttctacttgagctgtatttccctgttactcagcaaactcaaggaaaaagccaagataattgtggagctggtcttatatgcttccgttctttcaggagttgtagccccttctgttcctctttgtgtaagtcactctttagtggcttcaaacagtttttactttttgtctagattttatgagttttatttagctgagggttagtttgatacaagttattctagcatggtggtaacagtaatgatgttttattagttgaattacaagaaaatgacctcactattaagagtgagaacatgaatttttaacagaaaatttggacaagaatagaggaaggaggatttctgttttcagacagaagagggttaaggtagccaggtttgaaggatgataaataaggatgattaaaagttagataatat

SEQ ID NO: 89129 - DNA, 1114 bp, Homo sapiens
gtcagcttcatttgatactgtttaacatgaatgatttttataatatgagaaagataatacttattatatattttattagaatgctgtaaaacagttcatggtgtccaacatgtaaaggtactcagtgaatattggcgatgatgacgataataaagatataggtacacattggaggatatcaatggaaaggggcattagattctggagtatttgaagtagaactaacaggattcagttactgagtagatataaagtgtagaagagagtgtttggagactcaactgatggtgatgccatccactaagttgagtacataaaagcatgtcttcattttaaaaggctgaaagctgattggaattccttatcttgtttttacttaattcattgtgagtactgcgtttgaaatatccccagtttagccaaatatacttcgtgaattttaaatttatttaaatatatacttaaaatttttgtaagtatctttacaaagatatctgtacaaaaaataaaagtctgacctgttaaataaaaattgattgaggctatgtagtcttacattttatatattgtttgaaattaagttgcattttttttggtaacatcatatttgacattctgagcagagcccttgggtagcatgtgattagctgtttcttccacacgctttagtaaagatgataatattagtcttcaggttcagcaactgtcctggcaaagcatctgttaaggtacttctctgactaacatttggtcttacagagtttcctttttacaggtgtgattcaagtaaggtgaaggaacacatgcttagagctgtggaacattttgaagattagcaggttgtattacatttgtaacatttactaaatttttagcataggtaactttgttatggttagaacaccaaggactacaaaaagccatacaaaaacctactgtcacttctgtcttctacctgctttttatgcaataaaagccaatataaatatataccttgctgttttctacacaagtagaacttgccgtgtaccctgttctgtaccttgttttttaattacagtaaaaaaaagaaagcatctatattctcatttaaagttatagaaataacttttct

SEQ ID NO: 89130 - DNA, 1636 bp, Homo sapiens
ttgatatctttacaaaattgagttttccaaatcgtgagcattgcatatattttcatttatttagttctttaatgtctgtcaatgaagttttatgatttttccctgtagatggtttgcacatctctcattgggcttattgctagatatttaatactttatattttttgaggccattttaaatcgaatctttgtcttttaagttttattttctagctgcatttgctgtttacatggaaatgcaattaatttgaatctcacattcttgttcagctcttgcttctgagtttttctgtagatgctttcagttttctgtattcatgatcatatcatttgtgaataatcagttttgtttctttcttgtcaatccttacaccttttatttctttttcttgccttacttctctggctatgacctccattacattcctgaatagaagtggtgatagaggacatccttgtcttgttcctgatctcaaagggaaagctttcactgtttgaccattaagtatgatgtttgctgtagtgtttcatagataacttgtcagattaaggaagctcctttctgtttctgatgtgctaagtaaaaatttatatgttgaatggatgttaaattttatcaagtacttttattgcatcgaatgagatgattataagactttttcttctttaatctgttaatgtggtaaaatatactgatatacttttaatgctcagtcagtcttgcattcttgtaattaacctacttgttgatgacccacttggtcatgatgtttttaaagaaattgcgatattcagtttgttaaaattttggttaggatttttgcatctttgtttgtgagtgtgattgacctgtaatttttctttcttataatgccttcgtctggtttttattttgaggctatgctagctttataaaaggagctggagaattttctactttttcttatccagaagaatttacataatatttctatttctttgttaaatgattggtacaattctttagaaaagccatctgaatctgaagttttctttgcaaggaagtttttatttacttacttctttaattgttataggacaatttctatattttataaattgcctattttggtaagttgtggtttttagcattttaataaatttgaacattaattagcatgaaaataaagtaaaagctcttgaaataatcttattttcctaatgtcaacactgtctgtagtgataattttctttttaatgtcattatttgtgacttctgctttgaaatattttttgatcattcttgccagatgtttattatgggttttttaagtcttttcaaagaatcaacttttggttttgattgtgctctgttgcagcatttttcaaaccttttggtctcagaaccctgttacattcttaaaaattactgaggacttaaaagaacttgatgtaggttatattgttaatataaattataaatttttctcagttgtgaaattaaaacaaatctaaaaaatttgttaaaaataataaacttattgcatgttaatataaataacattctttaaaggaaaaataactatctttgtgagatgaatggcatcatgttacgtttttgcaagtttctgttaaatgtctggcttaatagaagaca

SEQ ID NO: 89131 - DNA, 1143 bp, Homo sapiens
accatattcttactacccaaagacttttcagtggtagtacctttgtgtatgttgctttatcaacgctctctgcagacacacacaaattcaaatattacactcatgagtcagtggtctgaatcacttgtggagcgcatgtgcctggaccatcttcctttaaattctggtaacacacgtgagaatgtgttactgattcactgtgatgtttaatttgagcattttctaaatcaacctatgtttgcttaaatcatttcttattttttgcattttagggtgagtccaaactattccagagttgcataaatttcaaacaacaaaaaaaattagtgtcgatcattcatcgtaatttaaaagagttgtttaaatctgtagtttggaagataacttttattctataaagtgcattcccgttgtctaataaatattcatagcttctaggtaaggtttattttataaaatgaaattacttccagcttaattttgtaattatgtcaacaaatagagtgtccattttactttattcaaagtaattgatgagttactcttagtggcctctgtgggaggtgaactggctcttttaataggttaataatcatgagtatttgagaatatttgtcatatttaccaggacagtaccatcatcaaaaataaaatactaaatatattttataacagcccttagcttatatactcctttttttcctcatatcaacatatactctttttttttgttttgtttttcaagacataatctcactcttttgcccaggctggagtgcaagtggtatgataatggctcactgcagcctcaacctcctgttctcaagtgatcctcccaccttagcctcctaagtagcagggactacaggtgcgtgccaccatgctcagctaatttttcactttttcgtagggatagggtctcactttgttgcccaggcttgtcttgaactcctaggcttaagcgatcctcctgcctcagcctcccaaagtgctgggattacaggtgtgagccactgtgcccagcacaacatatactgttttaggaataaaacattaagaaagtaaactgtttcagtgagaaacgtaactatatatagaataaaaatattcaaagtttctgaggaaaatatatttaatatcatt

SEQ ID NO: 89132 - DNA, 1025 bp, Homo sapiens
gaagtaccactgacgtgatattgtgtccttcacagtgcatcctcagtagccatatgttagtagtttgtcccaatattggtgataactttgatgacttagttaaggtggtatcttaactaaggtggtatcataactttatggtttgttcaccataaagttgctatttcttgtaattcatatgtatctaataccttgaggcacatttacattgtttctcatcatacttcaacacactaattttagcatccactaaaaatccaatgatttgcctaaaatagttatcactttaagtggttaccaaatgatgactaaatctatcattccttttacttttacttaagtcctactgtgaggaagaaatttgttcttttcctattccttcattcttcacttatttatctctaaatggacttaaacattattactgtattctctaggttataatctcttactttattatttattttctttaattcttccagatctggccagtgggagcccctcaagctggcttcttgatatgtcttcattattttttgaacatttacttattttcttataccacaaaatgttctaggctcatcctggtttttttttcctgtgcaggtgggtagtcacccgtttctccaagccctggttctttttttggagaatgatgtttagaaactaagatctgagtgctaggttatcttactgttcaatctcttgtatgttttgcattttatatgattgtttccattacatatattattgcttagatgaatcttgtgcatatatttgagaatgttctttaaaaaattaactagctgatctacttctttggtttaactgtggatagtaaggagatcaattcctcaagtcagccatggaatgttaaagcttagaggcacttattagaatacaatcatgcgctacctaatgctcttttggtcaacaatagaccgaaagattataataccatatttgtactataatacccataagattataataccatcttcctactgcaccttttctatttggat

SEQ ID NO: 89133 - DNA, 1020 bp, Homo sapiens
atatttttacaagagatttaaacagtacgtaatgaaattttatgcaagagagctgctgatacactaatgttgctttaaattatatttgttattaaaatgaattttaaaataatttgtaacagcgggtagcaacattaacaaagtcattttaaggaaattttgttttttttgtgtttccatgtttgcttaatgatttatgatagtaatgattgtttgcaggggacagtattttgttaagggatacgctttagagttcttgtacaagcagtatttactaatgccctccctttctgaattttctagttttttattttacttgatgcactagttttatgctaaaccttttctaattctgtttcagatgttggatgacaataaccatcttattcagtgtataatggactctcagaataaaggaaagacctcagagtgttctcagtaagattgataagaaactttttttttattcagttttttgtattggttaattttttactttttactaacagctttattgagatataattcacataccatacaattcacctattttaatgtgtacaattcaatgttttttagtatattcatagagttgtgctggtattacgtgagtcagttttacagcatctttaacatccccaaaagacactgggtatcctttggcagtcactatcccccacccctcaacccgtgacaaccactaatctactctctgtgtgaatttgcctgttgtgacatttcatataaatggattgatatactatgtggtcggttttgactcacatttttcacttagtgtaatacttccgaggttcatccatgttgaaccatgtttcagtacctcattcctttttataggcaagtatttttttccgttatgcagctgtaccacattttatttatccatcggtgatggccatttgtgttgtttgtacttttgactaattttgaataatactgctatgaacatttgtgtacaagcttttgtatgacttgttaatttataaaagaaaactttct

SEQ ID NO: 89134 - DNA, 1064 bp, Homo sapiens
aatgtgcaggtcattggtgacctttacaagaacagtttggatggagtgatggtgatgaaagcatgactggagtggatttagaagaaaaaggctcatacctgtaatcccagcactttgggaggccaaggtgggaggatcacttgaggccaggagctcaagaccagcctgggcaacatagtgaggccttgtctctacaaaattaaaaatagataaataataaaagaaaaggggagagggacgatcaagaatcattaaggggtgccaaaaccatcaagtgaaagatggctgggaaaaggatattcacgtggtgccacatattacttgttaatcacaaagttgtggcggacaccaccatcaccatcaaacttagcatctcctataagaggataaactggcattatatgcgtcctgctgtgatgcaatggaaaagaaataacatgaccttagtagtattattgtcattggatttaacctaaatctgattgagggaacaatcagctaaatctcagttgtaaagcattctacaggatatttcaaaaatgttaatgttaatgaaaaacaaaataaaggcatggaaacttttctagtttaaaggacactaaagaatttatgcaatccaagatttttgactgtatactggatgtgggaaaaacagatgcaaaggacattttgaggacaaccagagacacttaaatatggattgtatattagataatgttgtgtctgttttaaattttcgggatgtgattattataatgtaattatataagagaacaactttgtgggtttttgttgaggggggagggttgttggagtttttggtttttttgttttgttttgttttgttttgttttttgagacggaatctctctctgtcacccaggctggagtgcaatggtaccatctcggcttactgcagcctccacctcccaggttcaagcgattcttctgcctcagcctcccaagtagctgggattacaggtgcctgccaccatgccaagttaatttttaggagagacggggtttcacgctgttggcaggctgctctggaactcctgacctca

SEQ ID NO: 89135 - DNA, 1046 bp, Homo sapiens
actatacgccattttaatttttacaatgtcaattctaactgcgaattttagcaacgcttcagtgtgaagacagcagagaaaaacactgaaaatgcgtgattgaattcttattgagtcactcttctcggaaatcagtcctccccattttctccttaaaaaatagaatcctggagatagtctagtgctggcttttcgaggaacacactacaggggacacaaggagaggaacacggatgccgcagttttccaagtgcagcttgcccctcccacgtgataggtttctggcatcgcccctccttgctggcgattctggggaagattttaacgctccctggagccgtccccagtgacgtcacgggcgcggctccgctccttggccaatcacgcggccggatcccggggaaacccggggcggtggcggcggcctgggcgcgtgcgcgaggtctccgcgtggctatataaacatggctggcgtggccgcgcggcggggccgtgccaatcgcgcgtagggggctgtgggcactcggggttcgtagttttgaaatttctggcgggggagcagctgcgcagttaggctcgaggtgtgagcgacgaccttccgggagccgcaagtccaggctcccccgcagcgggacccgagcctgaggcgcagggctgaggcagcgcacgtgtgagcgccgctgaggaagctgcgagaggtcgggcgggtgtcgctccgggggcagcccaggctcgcgcggacgagaggaaggtccgggacgcgcgtgtcctgccgtgcagcgggcgcccgtcactgacttcgctgctgcggcccccgcgcctctccccagcgatgctgtggaacccgaaccgcaccggagtcggctgccgcgcgccaagcctcccctcacctctgctcccggaaccgcagcgccaaagctgccgctgagcccctgggggatgcccgccggcctcaccgaacccgccggcgccgctcccccggctgctgtgagcgcctcggggaccgtgaccatggccccggccggggcgctgccggtgcgggtgga

SEQ ID NO: 89136 - DNA, 1058 bp, Homo sapiens
tttcttcaggagcatctcattatattcatagattttaaatttttaaatagcttggagtaaaaacatttgttcatctttgtatataagtagcagacatgaaattcagtatgtattgaagacatctttttaaagtgttgaaagaaatgggagaagaaaatatgtgatggttatgctgtatttagtggctcagaggtcacttttttttcttttttaaatataggaaccgttttgattaaaagtaacagtggtccgttgatgttggtatctcctcagcaaactgtaacaagagccgagaccacaagtaacataacctcaaggccagcagtaccagcgaatcctcaaacagtcaaaatctgtacagtgccggtaatataccttaaatatttttcatctttctttgtttctcagctataattttcatataaatgttgtgtatatgtttgctagtaaaaaataatgtaagacatgattctattcagctttttaggtcagcttgccttgaatatgtcaatttaataaagatttttggttttgtcctctgataattgccaaaatagtaaattcagtcttcagattttatgtcctcaaaggaatgttcagagggctatctgcatcttttttgagacaggatctcactctctctcccaggctggagtacaattgcgtgaacatggctcacttggttcactgcagcctcaagctcccgagctcagataatcctcctgcctcaggctcgcatatagctgggaccacaactgcataccaccatgcccgactaattttattttttgcacaggtagcatgtcgctttgttgctcaggctggtcttgaattcttgggctcatgacagtcctcttagcctcccaaagtgctgggattataggtgtgagccactgcacctggcctatttgcatcttaaatggaaagaatataataattctgcctcccgagtagctgggattacaggcgcccactgccatgcctagctaatttttgtgtttatttagtagagacacggttttgccatgctagccaggctggttttgaactcctgactt

SEQ ID NO: 89137 - DNA, 1101 bp, Homo sapiens
aaataattgaaatttgtatgtttcctcgtgtttgtagttattttaaaatgctcatgttaatctgtcattgatatttttgtgtggaccatttatttttcttagctaatttaggttgatgcatattttaagttgggctactccttagtggtagcctagaacagtggaaattagtaaagaatgaagttaatgatatctgtccactttaagggataagcatctcagttttaggcatggaaataaggagctagaacttaaaaatgagagaagatacaactccttgtacttgattgtcagactgtaaatgcaaatgtgtgtgttaagaaattttgaaagtattttcctattaggcttagtctgataaatataacacaagaactagttagaaatcttgtgttcacttttaccttgtatttgatgaagatgtagtttggcccattgttagattggaatctaatgtgcaaatgactagtatttctaattaaatgtgaataaacctaaagcaattgctgtttcagacaggtacagaaaatgaccctccttgaaatgctatttcatcttctaaatttccatacaactcattttattggctctgtgtagaattggttttcacacatttatttcacatatacttcagtccgttttcctcctgtcctcaagacatgcctagtcagtcagtgcagccttgaaaagcattgaagttaccattggctggtctgttgagtcaaaggcggagttgtgattgagtttaagacactttgggccaggcatggtgagtcacacctgtaatcccagcactttgggaggcctaggcaggtggatcacctgaggtcaggagtttgagaccagcttggccaacatgttgaaaccctgtctctactaaacattcaaaaatgagccgggtggtgtggtggggggcggctctcatcccagctactcaggaggctgaggcaggagaatcacttgaacccaggaggcggagattgcagtgagccgagatcgcaccactgcactccagcctggtggacagagccagactccgtctcaaaaaaaaaaaaaaaaagacacttttaagggtgagggggaatggaatttattaggcga

SEQ ID NO: 89138 - DNA, 1755 bp, Homo sapiens
ccccaaacccatgttagggccaccatgtgtccccactcctctccttctatcaattctcagcattttaaatgttcttcctgtttgtaaagaaaatttttttctagagacagggtcttgttaggttacccagactggtctcgaactcctgtcctcaagcaatcctcctggctcagccttccaaagtgctggtattgtaagtgtgagccactgcacttgtccttcttcccattttttaccctcagaacattcttgtctagtacatattccagtctctctaatgtgggagattttattgtacattcaaattcacctatcttgactattatagaaggaaattttcttgaaggtgattgcaacttgacctttttgtgttgcatgcttgtagaacatagacatttaaattaaatgatggtgcattgttcagttttctgtgtgaattgtatgtaaatactattccttatccctgatccccaaacttttattatgttctgtaacttttagtgtttgtctttaagattgttgctttatctcaatgtgattttctaaattactgcctgacttgtgattgcttgtatgaggtttttgtcctgtaggtgatgctagctagagtcacacctcattttgatagaaggtagagaaacaactgaaattcttttcagtgtgaatataagataccacgttttataatattcttcatgcttactttaatggtctacataaaagcagtttatctaaattttagataataagtagattgctctgctttgttcttaagaaaaagcagaatattctatgttctcataaagactttcagatacttcttggagtattaataatattttttgaggacttatttgctttagcactgtttttcacaaaaaatcctaggacagcaggtaccgttgcaatccctatttttgcagagagtaatcaggattagcaagattaagtaacttgcctgcagtcaacacttggtaggtggtaatgaaatagtagatggggtgagaatgaaacccagatctgctagactcaagagttcctagaactgtattatattgccttagactactagagcataacataaaaccacagatgtcaaaattaacttgtctgatgagtgtgaaatgaggcacccactaatgtatcatagtaatacatgcctaaatatttaatacctttaatttcagtctgtggctgtgccaaccagtgtcgtcacagttactcctggaaagccattgaatactgtaactaccctgaagccttcaagtttgggagcatcatccactccttcaaatgagcccaatcttaaagcagagaactcagcagctgttcagattaatctttctccggtaagctcttacttgcaccttacataaatcttgttccttgcaagttcttttgaattgtttgctcactaacacttgtgtttgcttatatttacattttcatatttagacaatgctagaaaatgtgaagaaatgcaagaacttccttgcaatgttaataaaactagcatgtagtggatcacagtccccagaaatggggcaaaatgtgaagaagctggtggaacaacttttggtaagtagtgctataaaatcctgcaaattctggaggaatccatataacatgttgtaattgggaaatgcatatttttaaatgggatttatttaatttatttatttatttaatttatgttttgagacagagtctcgctctgttgcccaagctggagtgcagtggcgtgatctaggctga

SEQ ID NO: 89139 - DNA, 1054 bp, Homo sapiens
gctaattttttgattttttttgtagagacagggtcttgctatgttgctcaggctgatctcaaactcctgagctcaagtaatcatcccaccttggcctggcgaagtgctaggattacgggcatgagccaccgtgcccagcttgtttattaacaaataacagtaaacccattaaatgttaacacaactgacatttaagtgaaaaccgagtttcaaaacaacaacagaattgaatgagaagagtggcattgctgtaccaattttgcaaatctctttagtggctgacctaatggaaaacagctggattctcatatcttctgcatttaatctgttttgtgatatgttatttttttgggagtatttggagaatatctggtcttgtgaagagaggtggttggaatagtgattatttttttaaaaatagcttttctccagatcatggtggatattctttagagtctactggtttatcctgcatgctgaatggatcttttacccacgtatgatttttgtaatgacattcattgttcattgggaaaatactggttcactgagttatgcagatctttcaaatgtttccagatttattatttaagatatcaaaataacatgctcattaaattcaccaaccttattagaaaattcttgtaccaggaagctatcaagctcagaatagttgttacacatttttcaaaattgtaattttggctggagagctttaatttttatcattagcaacaaatgctatccattgttttctttactgttagtggtttagtttgttgttgagaaaatatctaacaaatacccaagtctgaataaccacaattgctttgccattcttttcagtaaaaatggaaaaaagtggctagtttagcgactcaattacagtgcttttccttgatcctctgactttgatctgcaacaaaaatgctccatgtatgtttcctattttgttatatacaatattaaagaggtatctactgaagagttgagatttagtaaagttaatttttactgcttcatccaaggatgtttcaaagtgaaattgggtcta

SEQ ID NO: 89140 - DNA, 1047 bp, Homo sapiens
agcttcatccagcaatgtgttcagcagacttctagtgacatggtcattgctacctgtactacaacagtaacaacttctcctgtggtgacaactacagtgtcctcaagccagtctgaaaagtcaattattgtttctggagcaacagcacccagaactgtgtcagtgcaaactttgaacccacttgctggtccagtgggagcaaaagctggagttgtgacacttcattctgtgggcccaactgctgcaacaggaggaacaacagctggaactggtttgcttcagacttcaaaaccacttgtgacatctgtggcaaacacagtgaccacggtctcactgcaacctgaaaagccagttgtctctggaacagcagtaacactgtcccttccagcagtaacttttggagaaacttcaggtgcagctatttgtcttccatctgtgaaacctgttgtttcttctgctgggaccacatctgacaagcctgttattgggactccagttcaaatcaaacttgcccagccgggccctgtcctttcacaaccagctgggattccacaggcagttcaagtcaagcaactagtgagtaacattttgtttcttccccagttacttattttgaaaattttgaacattcagaaaactggtaagactagtagaaaactagtaaggctatatactgtttacgggtttgaccaattaatttttttttttttttacctcatttgctttgttttcctctttctactcacacccacaaacacacatataagtcctttttttaaagacagagtcttactctgtcgcccaggctggagtgcagtggcacgatctcggctcactgtaacctccacctcccaggttcaagcatttctcatgccttaccctcctgagtagctggaattacaggtgtgcaccaccacgcctttctaatttttgtatttttgttagagatggagtttctccatgttggccaggctagtcttgaactcctggccttaaatgatccacccgccttggcctcccaaagcactgggattacagacaggcaat

SEQ ID NO: 89141 - DNA, 1021 bp, Homo sapiens
tgtcatataacactggtaagatgcttcttattacatatagtgacaaggatgctatgagggaattttagtatttctttcctctccctcttctttacccttaaatatatatactcatcttagtgctgtggccacgtaacaattccattagataaaaacaactgtttaattttgctgatacaaagcaaggagcccagacatcttttgtattttttatgcacatgtatgtatgtgtgtgtgtatatgtacatgagtgtgttttatattttatatataggccatttttgggtaattgctgaggatgtggtttaacgaattcagttggtatagatggagcacaccaaaagtctgaaacagaaaaacaaaactagttttataccatttggttttagaatggctagtctagtaagcttcttcccaagggtctttatgtggatatggacctttcaggaccagataatttctgctgcccttaagtggaatgaatggtagagtacactggggacagctgatggacttttaaccatcttggatgaaaagaaagatgtctgttttcatttctttgtctttcattgcagaggatttatggatgacttggtgtaactccaaatgcctcttggtgtttcttatttgccagactgagagagggaaagttgggacctagaagacaaagttacttctgattcatccttctgttattaaatatacattggtggttagagacactaattactttcaaaagcttaaagggaaaggtagccattcttcacttctcttgattggatgaattaagtaaaataatgccgttagttacaaggagagacctctaattcttttgctctctgaaactctctctctctctctctctctctctctctctctctctctctctctctctgtctctctctctctctcacacacacacacacacacacacacacacacaacctaaaatgtataacttttttttttttctattagagatgaggatgacatcaatgatgtgacttctatggcaggggtc

SEQ ID NO: 89142 - DNA, 1026 bp, Homo sapiens
attactaaccatagtccttatgttctacattagatctttccacttgttcatcctctgttccttttaataagttaaatgattgcattgagtgctcatattgatgctactaagtgttattggctacttttattaaaaaaactaaatacaggaatagcttgtatccctagtggtatgaaccaaatgacttgctgttatcaaggtaaaataacttgatgtagttttggaggagggcgaatatattgggtgattagggatgaaaagagaaggtaacctgagttgaaaataaataaataaataagataactgtttccctctttccaagaaatgtttatagctagattttgaacaagatggtatgtaggtaaccttaagagattttgaatttggaagaatggtcattgccgtgatatcctagtcaaaggttaaaggaaactaggaaattgtcagctactacaccaccagtaagttccctggaggaatcatattattttatttttttttcctttccatttagaactttggaaaaactacatatgattgccaaggtcctcacttgcataaatctttgtgagaatttgctggactgacttaggaatatgtgatcaacaggagaaaaagctatgaaaaaaacaaaaaattaatatcagtattttataattcctagaaacacacaaaaataaataaagatattaattttgtgtttctaggaattttttcatttctcctaggttatctaatttgttggcataggactgttaataatactgtcttgtaaccttttatttctgtaaggtcaatggtaatgatcccccttacattactgatttttgttatttgcatcttctctctttttcttctttgctagtaaagcgaatggtgtgttgattttgttgagcttttcaaataaccaacttttggttttattaattttctgtttttctatttttgatttcgtgtatctccactctagtttttatattattttccttctaagcttcaggcttagtttgctcttcttttttttta

SEQ ID NO: 89143 - DNA, 1166 bp, Homo sapiens
ggtatattttttagtgaggtgattgtttcttgctttttgtctttcagaaaactaagatttaattacttatattaatgtctgctgaggtagataataatctaaaaagattttggttattggtgaatggggcactctttagtttctccttcctattgttggaaggatctgcttggcttaattcctcccccttcaccccacaatgatgtttactagcaaagttctttgaaacataactggttaatcatctctcaaattttaagaatgattaaagtttcttttctggtggagtggatgtagggggatgtttgcttaatagaaacaaaatcattaccttctgaaagttcagcttcctatttatgttggtattcctgcctttagcaggtttatacaatacctaatgtagaatgtgtggcccaggatcattataagactttctgttttcttttttttcccaggcaagtgaaaattacatcctgtgtagtgataccaggtcacagctcaaatttcttgaaaagctggatcaattggagaagcagagaaaggatttggaagaaagagaaatgttacttaaggcagccaaggtaagggccagtgtgatttatgagtgaatgtggcctggcagtgtggtcagaggtggctttatcgttggttgactgtcttggttttattaggcctttagatttctccagaggatttcctaaaacgaaattactaataggatgtctcacagccaggatggtgtggtggctttcagttaatttagtttaatgagtcataatcttttgtcttctcacatttcctgtgtgctctccccatcctcaaacccaggtaaaatgtttcgtaaaatttcagggtctttttaggaatccaatttgatacatgccaagttgaagttgatagggaaaatttggaaagtagacaggaaggttatgggtaaaattagtaatttggattttgtggaacaaaatacaggctgggtggaaatagagtaaaagaatagcgaggcttctttatttaattttatttttggagacagagtcttgcactgtcacccaggctggaatgcagtggcatgatctcggcttactgcaacctctgcctcctgggtttaagcagttctctgcctcagactcctgagtagctgggactacaggtgcctgccacca

SEQ ID NO: 89144 - DNA, 1892 bp, Homo sapiens
tcgttctaataaagaagatccagaacagctgagattaaagcagaaagccaaagaggtaggactttcaagttaccatgcttgtctttgtgtttgagggaaggttggcagctctctcctggcaattaggtcagggtttattttgctgttgcataccatttgcagaagccttggggaaggacaggaactgctaaaggcaagggcagtacttcaaatgaggtcaatgagttatgtgctctctttttaaaatttattttcaaggcttaggcctgtctcgaaatgggtctttgtaaactacagcagcatacttggaggaatataatgtgagattttaaaaaaaaagaaacttttgagatttagcatctgggactgtacaataggctacatttttccagggtaattgttcgttttgtaaatctgatactgcttataattctttggctgggaggcggtgctgggatttagttttaaatggaaaatgcctctggcttttaattttctgggcccagcagttttctgttctggaatggagcccttgtttcacacagttcatgtttagctgcaggggttttagtttatagcttagactggttaagcttttactcccagaggcctctgcatagcaactgtagaaatcaacaaataagttcatttatgtctgcagcctcctctcagtagctgactttttacatttcccaatatccatttcctgacttttctagccccagagaaaaaagctccactaattggagcttattttaattgagccttaatattggatctcactggagttgcccccagagctgctgagaacagaatgaaatgaaagtacctaaggttgaaggtgcagtgtgtgtatgggtgtgtgtgtgaaatttttcacttgacctacagattcttttccctcctgaataaatcatcaagcctgttcacatttctgattaaggatctgacagcagatgataataaagacaattgaggtgtgagacgtgtgatatggagctgaagaaattggtttctatagttacttcactgatttcatgcaatttttaaggatctttgtgctaaataagagtgattttctgagcaaccttttcccttaactgtgcctcttgaactatgaaatttgttgttgcttaacattgctgcagttggctcctaggtgccagcagcagcaggttatttatgaacgttttaaaggcccttattgtttggattaatgtaggaattgaggcaaaacaagtggaaatctagtaagattcttacaatcaatgtggtgtgttttcattaacatagagaaggaaaatacatgaactctgggtggagggatttcaggattgggacagggaacgatggaaagggagaacactttaaaaaaaaagttgagagcagaaacattttattttcagcaacaagatattccttatactgatgtctttccagtggaaaatgtatctaaaattattagtatgagaactgtacctataattctctttaagcaaacctggcatgaggatagattatttagggatgggcaacctactgttgctctgaatcatgggtatcccaccttgttttaattaaggactgactagatgcttatcttctaattgcattccctttttggaaaatgtgcaacagaaagcttacccttttaaccttaccctgtctgttcttccttcataaaccttcataagcatctgaatcttagattaattcttccttcagctttgtatgggatgttttgtttttgtttgcattttattttagtatgttgtttaataattccgtaagggatgaataggtagacaacatttttcaaagaaatctgtgagaggaaatgtaccaaaaaaatgcctctgttaatgagaacaggtggtagcaaacctgtgttt

SEQ ID NO: 89145 - DNA, 1009 bp, Homo sapiens
ataatcgtatcatttgccatcctgtttccacaggcaagcctctaactcagtggccatttttattgaactgaggttacttattgtagtctttatcctcgataaatgccagatttgcattaatgctcagaacttcctccttttctggttaaaagtacctggttttactgttttgtgcttgtcaagatgcattggttttgagaaagcttgttataaatacagggccaatgaaaactatggtcagtttccatttttgttagatttttgtgaaattttctaaaattttgtgtgagagacttcagaaaaccaaagtataatttgcagaatgggagaaaatgttacactacacatagggaatttgaagacagtggtcagtttaaaaaccttttatttggtttgactatcttgcagatgccatttctctacagggaaggactttaaaatatagcttgttgtttgatttgtactgcagggtagattaactaaaatcattattttgtcacctagaagttctgaattgtggcagcattagactctaaaactatattttttattaaaaaggccagcagcaacaagagatattttataacttctgaaaacacttttctaacaatttatttgtaagtaaacacacagtttaaaaggatttctgtcctataatttgtgaagcaagtggaaaatggttcttagttcattttctttaattaattgttgtcttagttcatttgggctgctataatgaaatatcttagactgggtagcttatacacaacagaattttatttctcacagttatagaggctaggaagtccaagatcaaggtgccagcagatttggtgtctggttagagcctacttgcgcactatgttctcacttggtggaaggggcgaggggtttctcttaagtctcttttataagggcactaagtctccaccctcatgacttaatcacctcccagaggccccatctcctaataacagtcaccctgggtgttaggatttcaacattagaa

SEQ ID NO: 89146 - DNA, 1002 bp, Homo sapiens
ttgatgtcagcagttcccctgtcattactaatttaaagtaaatagccaacagagctcctgaagggtggtgaggctcccctcatgaatagagaaataaggaaatggtaagaattaggggcacaggtctttacctccattctcttctaccgggctacaggggaccacagttttctgaagtgttctttatttacttattatagctgagttattaaatgtttaaacagacttattgtcatctaacactttttataaatatgtgtcgattcagtagaatttagagcatgctgttactttaaatgaagtagcttcttatattttaagattttttttttaacattctgttttgttcacgcttcatgaacaaatctgcctcacttattcataaatgacctaaacataaatctgaatcttagttgggtcttttttgagaattccttatttctcacagctttgataaaatgaatatcctctggacccacatgtgtgatcaggacctacatgataaatccactctagcatcccaatttccccaagcctttggatacaaatatttacaatatacaaataaagttctatcatctatctcaatttcactttcaggccaccttctgatctagctttaagtcaaccaactgaattaactgttaaagccactcctagccttctctctgatctaatgtcttctgtctagtatctctattggtgagtccatatcaataacttcagcctgatccaactttatattccttctaccctgaacctacacccttaggatccattcccacaccatcccctcaggtaactgcaggcaaaatcaggtgcttcgtacctcattctctgggggctgctggaacctgaggctgattataggtatagaagcaatgagaggtggtgaggataggtcctgaggaagatcagtagtcccatgtaaggcaacttccttaagggaagtcaatacaggtgctacaggagattaacctccttcagacagacaggggtaga

SEQ ID NO: 89147 - DNA, 1967 bp, Homo sapiens
agttagctttctttatcatagcagtgctggatttatgccactatagccttttctgccttaacacaaagcatgattagggatgtacgaggggagcccatgatgtaccttgttagcatggtggccatgatagccagccatagatacttgttaaactgaaaattatcagtttattattagcaaaatattgagctcacagaatttaagattcccatgtcttttcctcaagtatttctagtgttacattccactgtcccattaagtatttcagttactgttcttcccagggcaaattgtgtgttaatggtgttttatatgtaatatttgaggctttacatggtatttttttcttcatatcactttaattatagttagcctaatcatgagcttatgctaagaaattttttttaaaaggctgtccagctttaagataatttctatgagctttcaggctcccaggaaacagtttttgaaacactccgtctgcctgcttcttctataatttagagtactattactctccttaagttgtagtattctcacaggaccagttatattgttattattccataatgttgtacctgtctctttctgcctttatgcagctgtttggtttacacttcagtgactatgagaagcatgaattgcctgttacataggattgcctataataagtatcagtcaggtcttagagggttttccaaagtgatcaatgagtgttgattaacaacaaaccaacgtttatgggaaaagtggttggtaactgtattaccttttcatagtttaaatgatggttaatttctctgtgaaatttgtcccagttagatgttcagattttcaattaatgttatccacaataccgagtttacatgaaaaacaatgaatctgcttaggtataccttataatgatatttagtgtaccctatttagcttctgtttatgtatgcatttttctcaagaattccatggaatattgaaggaaaagtaaacataagttgattttgaagtgtttatttgaacttgttttggcttatcaggtgtgtgccaacttttttcatcgagatataattcatgtacaataaattcacttttgtaaagtgtccagtccagctctttttggtatattcagaagactgtgtaatcatccccactatttaatcccagaacattttcattaccctacaaagaaatagcttgtttatttggccattagcagtcatcctctcagttcctgacaaccggtaatctatttttcagtctgtaaggattcacctattctaggcattcatacaaacggaatcgtacaacatgtggccttttgtgtctggcttctttcactgagcataatgttttcatggtctgcctctattgtagcatgtatcagtacttcattcttgtttttgattgaataatattccattgtatgaatatgcattttgttcattcatcagctgaaggacatttggttgtttatactttttgctattataagtaatgctgctatgtacattcatatataacttcttaggtggtcatgtattttcatttctcttgggtatatccctaatgtctgggtcatatggtgactatgtttggtgtttttgggaactgccaaactgctttccatagcaactgcatgatttgacttttccatccacaatgcacaagggttccactttctccacatccttgccaacacttgttattgccttttaaaaattttattactgccattgtaatgtgtgtagaagtagtatctcattgtggttttactttgcattttcctgaagactaatgatgttgagcatcttttcatgtgcttgtagaccatttgtacattgactttctagaaataagttcaatttatcaattttttctttggttacttgtatttagttgtcatatccaaaaaaaccattacttaatccagtgtcacaataatttatgttttcttctaggagttttatagt

SEQ ID NO: 89148 - DNA, 1932 bp, Homo sapiens
catagatgtggaattgccaagacattgtgtctgtctagccagttattttaaaatctcatataaaacaccaaagtactgattttaggaaaactcttagaagatttataaacatatagatacagttttagcataatgtatctaatttatggctaaagaaattgcctctagttaaatgtattgtagttgttttttgttttttaagacagagtctcactctgtcacccaggctggagtgcagtggcatgatcttggctcacttcaacctctgcctcccaagttcaagcagttcttccacctcagtctcccgagtaagtgagcttacagacgcacaccaccatgcctggctcatttttatttattttttgttagaggtggggtttcaccatgttagccaggctggtctcgaactcctgacctcaagcgatttgcttgccttggcctaaatatgttgtagttttaaatgggttactcctgtaaacaacaaaatttccactcactgccaattacatgttttagtaactttcttcctaatatgtactttttattcaattttccaaacaaaactgagcttttggtcccattccgcaaaaatcttatgaagatattttgatggtaataatttacaatagttaaagttacatctgagttacaccatctctgagtgttgatgctagcagagtggcatgctagtgcttcactgccaggcttagctgaagtaccagaggcttacacttgtacaaattgcattcattaccaagaaccctgcagaagtggcgagagactggctctatactgtagatgggctctgggataagtagccgaacaattgggcagctgagaccaatttttttccctcttttagaacgtggactttccaaaattgtttccatggatacttatgaacaagtttaacttaatgagtataaaaatatgactgcgacatcatgtccctcaaaaactgggtagtatctcttaaagaagttttatttgtccgtcagataaagtacccctaagtcatgctgtgaacatgcatggaattaagtttgactgattttgaccatggtgttttggagaccttaagagatttccttcccctccatcagaacaagaaacccaaaaaggtggaaggagtaattaaaatttaattgttataaaaggacagtaacagaaccagattttcttcctatgttatctttccttatgtatgtctttcgggtggataaaagagagttgccagtcctatcgagacgttttgtgaaacaaaggattttgttttgaaacaaaggtaaaaagaattaaaggatttcatttttacaaaattatcttttgagagttctgtgtttttcttttcttccaattaaaagtaatagtatatagacatattggtaattcatattggtaaacatattcagaaaactgtcttaattacaggagtgttgtgttttcatcattttaaaatgacatttagaattcatgttgttctgttttaaaccagtacattcagtttagaaaatattgcggataacctgtgttgttctgtgaactctgctaagctctagaggagacagaaaccatagtccttgtcctcagaaagcttatggtctagtgggtatgtagtggtggcgggagcatatacaaattactatagtacaacgtaaggtaattgccacagtgagatttccttggatgaaggacaggtagacccatttgaaatgggtcttaaaagatgagtagattggcctagaatggcctctttgctaatctctgcctattggcagaggagccatgtggctgcagttaagatgtcttgtaaaggagcaatgggaagtgaggttagagcgaaggaagccagagtgatgggtttatacgtgatatggtggataatatagcacagtggttaagagtgcttactttatttttatttttattttt

SEQ ID NO: 89149 - DNA, 1012 bp, Homo sapiens
tatattttaaaatcttacatttgaataaaaagtaatatagcaataatataaagacactccaagtacaatccaagtatgctaggttagactggaggttgcagttgcttcaggcaagattcataccctgaactgcaccaggcaagcagcttcccaggccagcagcccgtacagtgacaccgggccccccatcagcaccctgcacttggtttaatgctctcatgttgccgctgtgacattctgaacactttttgaacaaggggaccttcgctttcattttgctctagaccccatgaatggcgtagctggtcctgctctgctggttccctgttccctgcagaatgaaatccagatgccctccacgtccatccccactgctgggggaacccctctaggcagacaacatggcccagccgtcgtcaccctgaggtctggcacggtgcctggtaggactcagccagtatctgaggactaaaggaaattttgtaaaacaccataaaaaggcttgttctgtatccagataaaatggaagctctttctatcctctcaaaatatccctttttcaaaccaaactcaatttcctagctaaaagccattatcaaacaccaggctcacctcttggttgtacacgcgggtgtttattaaggccacccataaacttaaaacaccttctttcaaatctgacttctttcatttctttttgtgttattcttgtagtggagcttcagtttttgttaaaggaagtctgtctctaatgtactgtttcagcacaagtttcttttaattgactaactgaacaccccagggtaagtggctgtcccagcctaaggaggatgggctgtaggctcttgaattgtcctggtctcagggcaacttttccagcaagagcaaacacagggcctacggcctacaaaaatgttttaacttaaaattcttttgaaatcagaagaagtgataaatttgattcatatatataatatgtaacatgtaaacccagcctggattatatttgtct

SEQ ID NO: 89150 - DNA, 1081 bp, Homo sapiens
aggatcacaggagcaacagcaaaaataatttgtgattcattggttctcggattggatgctggcaaatggcgaacagttctttggctatggaaaggtctgatttctgaacacctgtcatctcttgtgtaaaacaggcacaaataggtctccttgcaaggttactgggggtattaaatgtgattgtgaaaagcacaccgtggccctgtgcccaacatgtagcattgtcttcatacttaatcttctgccaaacccaggaattgtttcttctcaaattccaaatattttccatttcttgctttcctagccatggaagcagctttacatctggattcttgcctggatgactcccgtctcaggggactcctggcctgcaccttctcctcctttatcttaaataccccagccggtcacaagttccgagacatccttatcattaggagatatctttaagaatttgtcaagactctttgaaacaagccttacaaagtaacttctgtttcagctgctaatacctaaagcaaatgacgctgctcaggtaacactggttttgctgttgaattgaccattgggtattgctttgtttcctcttgggttttggggggcgtatttttgtaggtaattaaatgttcatgtcaaagcaacatccaatttaatgggacccatacgcaaattttagtaatcaaagaaacagagaagaactagttcttcatgcttttcccatagcgtcgggtgctccttccaatttctgggaaagtctcttgcatattatcaacccctcttggataaatccaaggacattaggttgcccatggccatggaatcacaaataactccagttagttttgtagattctggggtgcttcaaacccttcctaccctatgggaccattctctgccccaccctcttggatcccctggttccaccctcacctacctcttccttagtgtcacccagaggataggggggctttttctaagatttcaagggaaagacctgtagtttaaaaatactaatttgtatgtaacaagtgaccttaaaagatataatattatctttctacaatttcagagttcctgcaaa

SEQ ID NO: 89151 - DNA, 1036 bp, Homo sapiens
tcctctgaaaagaaaaggttccacaatgaacaggtgtgggcaccccaccagtggggttctgctgcctcctttttacagcatgagaaggcttagcgactttgggcagcaggtgtgtgcaggagccaggagctcagctctctgaacttccagcctttaggaaattaaaacagggagatgccagcccaacgctgagatattttaatgtcatgccagttcaaagtgaggactcttcttactatctcagtatctccaggcaagctggaggaggagtttggaggcataaattgaaagctaataattttccagcctcttgtttgggacatagtaaacattttaaagctaaaatgtggggtcagctgacaccgtctttttagcagttatttttaattttgggggttttagggagttctaatgtgtcaaatttcctcatcccttatctttcacatcacttcagaaatatgtgtgaattaaggtcaattagcatgtgtcgacatccacctcaaactaaatctctaaattgtcttcgtataaatcttgaagaggtagtaatttcagcttaagtggcaattaaaaagcaaggattatacttaataacctctgtgggggtacctgaggtcttctgttgtagagtcttgacaaatactgttagtcatcaataatttagggggctatcgtctgacttccatttagttttacatggttatgcaggctccagttctctctggggagatggcagaaagaaaatagccagcacatgtgtgtgtggaagctggtcactgtgcttaccaggtgcttctcagctgtggccctgagcaagccacccagtcaccctgagcctcagtttcccttttctcagaaatgatcatgaaccagatcttttccagccctgaattcatttgctattcattatcaaaatgctaatatgcaaaatctattttagagctactaactcaaatatagtcctgtgttacgggattaacattaatttagttaagtgtattgtgagatttgacattgaggacatattcatgctaat

SEQ ID NO: 89152 - DNA, 2337 bp, Homo sapiens
ttaacacacagctcaaacaattctaatactaatatgaccacacttcgagaaacactgcctcaaagctcatacattaagcaataaaataatttcctctctagcaatcattctggggcggtgaattcacttgaaaattgaatgcaagttgtgaaacctcttcagaagatgcacacacacacatacacacaccaattttgcctaccatttcagcagagattggagtgaagcctgcattcttgaagctctgcagctacctggtctccaataccactttaatacatatcctcccctggtcaaaacatcatcttggctcctttcttactttagtttcaagtccaaactccccatagtcttgccacagtctaatttcctgacattctctgtttcatctccctgatatgagtccagctctctgttggggacaactccagagagttctggagagctcagacatcgggagaacatttggctgggaggccccaggacagtgatcatggaacttgcgtgtgtttccaaatcacccggaaggcttgttgaagcagggtgcctacatttctcaaaagaagacatacaaatggcaaacaggcacatgaaaatgtgctcaacatcactgatcatcaagagaaatataaatcaaaactacaatgagatatcatctcaccccagttaaaatggcttacacccaaaagacaggcaataacaaatgctggcgaggatgtggagaagagggaatgcttgtatgctgttggtgggaatgtaaattagtacaaccactatggagaatagtttggaggttcctcaaaaaactaaaaatagagcttccatacaatccagcaatcccactgctggatatatacccaaaagataggaaatcagtatatagaagaaatatctgtactcccatgtttgttgcagcactgttgacaatagctaagatttggaagcaacctaagtgtccatcaacagatgaatagataaagaaaatgtggctggtatacacaatggagtactattcagccataaaaaagaatgagatcggccaggtgcagtggctcaagcctgtaatcccagcactttgggaggctgaggctggcggatcacgaggtcaagagatcgagaccatcctggccaacatggtgaaaccccgtctctactaaaaatacaaaaaattagctgggcatggtggcacgcacctgtagtcccagctactcaggaggctgaggcaggaggatcgtttgaatctgggaggtggaggttgcagtgagccgagattgcaccactgcactccagcctgggtgacagagcaagactccgtctcaaaaagaagcaaaaaaagaaaaaaaaaagagaaaagaaaagaatgagatcctgtcatttgcaccaaccttgatggaactgggggtcattatgttaagtgaaagaagccaagcacagagagataaatatcccatgttctcactggagatagagagtagaggatggttaccagagactgggaagggtagtggggtggttgggggagtggtgggaggattaataggtacaaaaaaattagaaagaatgaataagatctgctatttggtggcacaacagggggactatagtcaacaataatttaactgtatattttaaaataactaaaagagtataattggattgtttgtaacacaaaggataaatgcttgaggggatggataccccattctccatgatgtggttattatgcattgcatgccttaacaaaatatctcatgtacccccaaaatacacacacctactatgtacccacaaaaaagaaaacaagaaaagagaagaaacagagtgctgggttcaccctcagagtgtctgattcagccagtctggggtggagctgagcatgtgcacacgctcaggtgattatgctgctgctggttcctggaccccattgtgagaaccacgggcctagaagaggcagatacacatccccagagggaagagtcagcatagtaaaggaggattggtggggctaaggatcaagggtgtggagcctggtgagcctctctgggtcaattcaggaggactcgggggttcagaatcttttttatggctcccatggtaggaggggctgttaaaaggcctgaagcagagtagactcaaccctaaaatatcaacttcctttccaatggggaaatttcccctctcccttccactgatctaaattgtcttgattctttaaggcccagctccaaatcccatgtctctaggagggtcgaaagcagcgaccttctgctgcaggacgcaatggccaggcccttttgccagtgcccttcagtggagcactctccctttggttgtaag

SEQ ID NO: 89153 - DNA, 1078 bp, Homo sapiens
tattttaaaatacagtaaaattaaagcaaattcagcatttccttactaaaacacaagtcttagacaaatcttccaaagaaaacaaacattgggcttttgggactgtggaaatttttttatattattttcttttttttctctattatttccaactttacaagaatagtttcacaaaaattgtttaaaatgtgccactaaagctatatttatgatgcattttaccatgaatttccatatgagccacccataaataaaagactgtcagctattgctagaagtagacatattgtgagtatatttcttgtggttcttctataagtttgaaaacatccttctaggcaagatttgtgatgaattttgagctaaactgcgttgtgatctatattttggctcacacttctgaaagatacctttttattctgatgatttattcattcattcagcaaatgtttataaagcatatgctgtgtggtaagccttgttctgacactgtggatacagtggtgacaagctagttcctgccctgttggagcttaaattgtagtaggggagagaaataaaaaacatgcaaacaaggaagtacacactgaaggttttgaaaaaataagggtgtagggatgacacataatcaaaataggtaaatcgtttaaagggacaagttctgaaatgagatttgaataatattaccaaagcacagttagttcagaacccaaggtataccatggagagagaatacccaatgtaaacaggctgtaaggtagaactgaacttgagtattcaaaaggaaggtagactggagataaacatttcataattcagtccttaaatggatcccacagaacaaaccactctaaacagtaactacttctcactctacttctaaattacagagtgtctagctagtttgaactaattcgatacaaaggctttgaagatttcttttccaaaatatctaataaattgaagtctctaagttggttccaatgttcttttaatcactgaggaaataatgaaccacgatgccaaatctctatgcaatgtaccaaaacagcagtgcatgaaatggttccttatgacc

SEQ ID NO: 89154 - DNA, 1057 bp, Homo sapiens
cattccataacatggtgatttagttaacttggaaaacaaagtaacataaaatgagaagacttatgtacaaagtacattttatattttaaacaaggaatttaatgcttatgtgaatttctgttaacctaaaatcaaactaaaacataatcacagaaaactgcaaatgtattttatgggggtgggatggtgatgatttaaaaaaatgaatgttacaaaagctgtatttcactcttgtcttctctagagttgtaggcttagagagttgtacatctgtatttcaaaacaagagatacattttcaaatctagctgataatacttaacaacaaactgtatttgcaccttttattatagcagacattcttctgcaaactgcaggcaaattaacatttacaagccaaatattttttgtggtaaagtttatactttctgtgatactctatttaattatgttatataaatgtcaacttcagcttttaaatttcttaacctaatttccctaatccccactaagtagatcttcatcttaattcatataatttactagagaaattcttagatacaggtgtgtcttccttgctggtgaaatacatgcccaattcacttttatattttcaactcgctcacagtgcctgccttgtaatgagacatacatattcaggcatggaatggacaaagacaagagactctcatgcagctatgacaaagaactttatacaatgaaaaacattattaatagctctttaaattttaatgcagaggtttttattttcataagtctctcatttattataagtggaattaacctgtatttagttgtctaataaatgtcatttgtgttacatacgtctccttttttgtatctacgcagagcttagtaaattttcctaaaaataaagttaaacaagatgaatatgagtcatccttaaatgagaggtctctgttaacataaagtaactttgaaagtctgaaaaatgaaggttaacctcattaattttgtaaaaattcgccaaacatcaaggggtttgaaaacaccaagagaaacaataagatattcag

SEQ ID NO: 89155 - DNA, 1017 bp, Homo sapiens
atacctggaaggatttaatctcttcatcagtatcttctaaaagctacctcaaggaaaatgttcatagttacctattttttacaatatgcatatggattagaattgagaaggaaaaattgtttgagagaattaaatattttcttttcagttggtaacatggattagttaggaatatgcctggttaaggaaatacatatttttaaaaataaaagtctgatttttcctttgtatagtccttatcaagactgaattatcttaatgatcatggattaaaagaaataagctttttaaaaagaatcttcttgagctaaaacttatgactatcttaggaattttctaggctgtacttctcctgtgcaagaagagagctttcaggcatccccagaggcctctccttgtcaagtggaccatctgggggtgggaatgggagagctatttcagtgctagatgagtccctgcagagcaacaaaagtgaaaaaggcattatatctcctctatgcagcctgctggtttcccctttaaacatttttaaatagaaaaaaatcttactctgaaatatggtaagtattaaagaagcaccttcttgaaacctagaactgcagcccattagctgtgggatctgataaactgcctaaactctgtgagtcttaatttcctcatcaggaaaggaggataatatttacattacaggaattttttttaagaatgaaatgaatagaaagtgactgctctagtgcctgagacatagtatttattaaatggcagcagctacttatgtgggtgtagaagagtcagaagggggtaaaactaaaagaaggtccaattgtataatactaaggcttataactatatgctatcagcaatactgcaatgtctgtattttaattttaccctataccatttaattaaaaatgggctctatttgtgatgatgtgttgttgatattgttctcagttagcatttgccacagtgatgctgcataacaaaccacctcggaactcagtggcttaaaacgac

SEQ ID NO: 89156 - DNA, 1027 bp, Homo sapiens
tatggggcttttacaattttagattcttttcatccttttgttttttttttctctcttctaatcagtatttcattcctattccttgaaatagggtagcagaaggaattttgataattggattgagcaatttattacaatagtcttctgagggtgacaaacaaaattatgtgtgctacttttcctctgacttatttgtttcatttcataaataagcattttatatttatacatgaaggtaatcatttctttagtaaaggctaaggtgagacctgtattagtactgactattgttgatttggcatcatggtcagtaatttctctgccttctgaaggtctgcctttcttggcctttaagaagcaagactgtcattacatgttagactgagagaaggagacattatagagccacttggaaatgaagagttaatttttggttcgtaggtgtgttacaggctgaattgtgttcccttaaaattcatatgtcgaaatcctaaaccccagtatgtgatggtatttggagagaggatcttcatcaggtgggccctactccagtatcattggtgttcttaggacacaggcatacccagaggaaagaccacgtaaagagacagggagaagattgtctacaagccaagcagaaaggcctgcgaagaagccaactctgttaacaccttaatctcagacttgtagtttctagaattgtgagaatacacatttctattgtttaagccaggcagtctgtaatggcagccctagcaaactaatggcggtggtggggtggggggatgttccttaaacagtgattaaaatagctcagttaatcaaatgaaaagataagtttaccattttctttggaaacaaaatttgtattaatgtcattttcaaataactcctatgagaacgtcccaaagccattggtattttaattaattttccagtggtagcttcttcaaatagtaaatcagtaagttgtctttaaagtatcattttctgtgaagcttcaggaaacgtatactctaaaaaataa

SEQ ID NO: 89157 - DNA, 1038 bp, Homo sapiens
ggctgtgagttccatttttttttttttttttaaaaaaaggaacaaaactccatagctgtatttcctttggaatattgtaaccatatgtgtgtaggaggactcagactgtgcatctccattttcaatccctttttggtctcttttttctagctttgaaacacaggtatctaaatttaagaaacacaaatacacattgattccttgtagacacagatgcagaagtgaagaaaggatactactttcttttatcctgcacatcagagcgggtacaccgtcagctacaagggagaccctgataatgcctcagggggactctaagcagagtgtactggaaatacagaggtaggagaaaatattacttgcggctgtgagaattggatggctgaatgaggtggcatgtgtgctagacattgaaagatggcttaaaattatcatgggagaaattatctactgctaaaaatttgcatattttcactacattggcagatttttaattttgatcttgctcaagtacggagcatgcttagcttgtcattattttaagcattgctgctacagaagagcaaatgttgatttatgctatttaagtcttatttacaaagtgcacgtggcatttcacattttttacatatcctcataacaaatttttgttttgtttatgcagtgccttcacgatcataaactattgagtacatgatattagattgtgtcaatacactttagtttgttaacattcttccctgatttgataattttggattttgcttcactttttgatttttacagataatgccaaataaacaacttaatgcttatagcttttttatttcttgtggtgtatttttggagaatgtgttcttaagagtggaattatatgaaactactttttttgttgttatgtattttcatattgcgttccagaaatgtgttactaattaatagtattctctaccatagttacttcatcattgtgtgttatgttaaaaaaaaaaaaaaagaacttgcctccttggcagccataaaatggcatctcaaggt

SEQ ID NO: 89158 - DNA, 1048 bp, Homo sapiens
ttactgaatttgcttgttttcttgatagctgtttgaaaaattcagaacagcatgagatgaagtagagtgcggatattccacgtgttctgtcacttaaaaaaaagtgtcgtaaaattcacatagacatgtttgtataaatggaagtcatcattttaattcagtttcctgactttggaataatcttggaaaattggaaagctggcccataataaattggttgtggtggttcctgtgtggttctggatgagggccgcagccatcttctgtctatcctcaggattgtgtagctgggggccctggtatcaggaatttctctgagcaagataccaggaaccagtggaagctttgtcaccagccagtaggagacagttgccctggcccatgtttgataatccttagggttgactggtttcacttctgctaagtcactggtggatgttgtggtggtcagcaccaggacagcacagtgattcacactgggatattcctgcatcttccagtttggagggtctggagaacaggggagtaactaaaacagtatgactcatgccccacttcccacaaggcattttttgtggaagtagttgctatgggcaatcccctgtgggcagaggaatctttgtcaggaatctctttcataaaaagctgcagcctcaacacctaccccaggagctagcgctctgagtaacgccaggtctttctggatatcagtttgtttcccaggctttaaggacaggttgaagactcctgccactccaaggttctcagcccactgaatttctgtaggcaagaaacgttctcctccctcttggagatcactggaacatgacttaggaacccctgttacacttagctggactgggcaagaaaacggttgagaacaacaaggagcctaacaatttttgacaaactgaatttaaaccttaaagctattcattgtaagacttttttttataatttttttttttgcattctgtaggcagcctacaatttagatggagaagaatacattcatttttttttaagaagatggacaggttgagtctaa

SEQ ID NO: 89159 - DNA, 1087 bp, Homo sapiens
aaactcctttcaaatattttttgacagcacaattaaagtgtgatggcttatattatagataggtttttatatgcaggtggttatgttttgtgagtttaaaattttacagctgtgatttaaaaataccagaatgatggaagtaaattttttcagagaaaaataatttagcattagcaatgcatcaccttttgactcaatggtattttgaaagacagattataattttcagtggagtagctattaaccagaagatcacacaaagcaattctaaggcctgtttgcatatatcaggggtaaaaattacttaacatacgatgcctaatgcttttgagtggactgggatatatctgaaaactatataggaaggtttgatgtacttagatcttatgggtgtggcctgttgttggttgcatctgaaagtagtttacatattgactttcaaatgtaagcaaaagagcaattcaaataggcctttggtttgtaccactggcatatctaccagaaaaaaataaataggatgcctgttgcctgtgtggccgagtgcatcctgtttgtgttttttgtgtcctgtggaaggtagcctcattaatcatggggttaatgctaaacccagcattcacttagctccttaattcatgaatgccactgaagcacattgaaacaaaactttaggtattacagttgaatagtcagactttttttttttttttgagacggggtcgtgccctgtttcccaggctggagtgcaatggcatgatcacggctgtctgcagccttgaccttctgagctcaatcagctcttctatctcagcctcccaagtagctgggactacaggcatgcccagctaattgtttgtttgttatttgtttttttgtagagacagggtttcgccatgttgtgcagattggtcttgaacttctgagatccgcctgctgaggcttcccaagtgctgggattaaggtgtgagtcaccgtgccctgtcagcagtcactagtttttgaacagtagccacatcattagaaataaatacacgtatatctgatattttaggtgcacagacaatattatattgtacacctagagtta

SEQ ID NO: 89160 - DNA, 1059 bp, Homo sapiens
tgtgtggtttcagttttttgctgctgtcagcattcttatgcatgccacctgggtataaatgccagggatactctagggctgtgttccccaaactttatatgagaatcaccagaaagcttgtttaaatgtggatccctggccctagccctgatagtctgattcagtaagcctacagtagagcctgagaatttgcctgtctggcagactcccaggtgatggaacactgttctgctcttggatgtgtaccaaggagtagaattgctagattgcaaggtatgcatgttttcatcattaccagctaatgcaagattgtgttttccatactggtctgccagcagtatgtgcatagtttccccctaattttaggatacttgttgtagtcaaacctcaacatttaaaaaaatctggtggactgcataataatgtctcattttggcttaaatttgaaatctggtttctgatgagagtttttctatgtattttgaccttttggtttgccttgaagtgtctttatgaacactagcctgttggatgaagtttgtaacttgtctgtagcttggccttgctgtgtgtttctcattctcttcacctaacattttcagtcatggcttgtgtaggtgtgttttgaagcactgagaaccttctagatagccgacacaggggattaatatttactgagtgcttactatgagccaggccaagcacttgacctgcattttcatataatcctcacatcaatcctctgcaataggtagacgttattatcattatccatcttacagatgtctgaacagagattggctgaaaccactcacctgaaggcacactgttgtgaggtggctggccagggctttaacagtgctttactttcctgataacaactcggccagttccttgaaagtctgcaaaagaatggacccagtgggagcaagattagtctattctggactttgaaggattgttgcctaaaggaggatttggactttagaatgaggatttaaaagatctcagtttcatggagcaaactcggcttaagaatgggaaaatctaacagattga

SEQ ID NO: 89161 - DNA, 1089 bp, Homo sapiens
gttgagtaaataaagaaaagtctgtttttgcagcgaaaatattggcctttggcacccactctcttgctaaagtctatttggtgtcaacacctttacgattgagttctaatatcctgctacctgatatgatattttagggaactcaaaattcagattatgtacatataatacacacatatacatttactttatggaagtgtcaaatgcatacaggaaaatatacatagaagtggacagcctgctaaatgttcctaaatggaacatactagttaatcagcactgaatcaagacagagttttaccagtacctccttccaattttaaccgtccctcagtggtaactatttatttgacttccaacagcatgatttttttgctcatttatactttgtgaaaccatattctcttttgtgtctggcatcttccactcagtacgcagaatctttcttatatttatatcatatgtatttgtaattgtcacaaaattaggaaagacggacactatagaaatatattggaggtaaggagggtgaagttggtttaaaatggaaagattaatcattttttgcagctaaaggccactcgcacatttatggtgtcaagccactaaataccttttgtgggttttcttacaatatcttttgccatagttctggtagtttggcaatatcacttcagccaaatgccaaatacatttggaattctgttaagttatagtctctcttgtccttccttttattagaacgagagtggagacaaagaactaaatatctttctgacctgaagtttttaatcagaagatttaggtgttaacagactctaatcttttcagcgatgcttcttaataccttctctgagcttactagtgacccagttttcaacaaggctttacccagttttttgtttttaattttggaaagggtacattgaggggtttctacttccacacactgtgtgtatccgggtaccatttacctttttttatatttgtatatcttttttaaagatctgagagtctgccaggagggatgcagattgtccacatttgtcccagcatctttctttctggaggccttttctgtttataatg

SEQ ID NO: 89162 - DNA, 1037 bp, Homo sapiens
tgcgcgaaagaaaaacctactctccctggtctgtcagcaccagttttgccgtagctgcttggagcagcactgctcagttctcgttaaggatggtgtgggtgtgggagtcgcttgcatggctcaggactgtcccactccatacaccagaggactttgtgtttccattgcttcccaatgaagaattgagagagaaatacaggtgctacctcttcagggactatgtgaagagtcattactagctccagctgtgccctggtgcagactgcctcatggttgttcgggtacaggagcctagagctcaccgagtatagtgcaatcggtgcaacgaggtcttctgtttcaagtgtcatcaaatatatcacgcacccacagaccgcatcaccatccgaaaatggctcaagaagtgtgcagacaactctgaaacagccgactacagtagtgctcacactaaagactgtcccgaatacaacatctgcattgagaagaatggaggctgcaatcacatgcaatgctccaaatgtaaacacgacttctgctggacatatctaggagattggaaggcacatggcagtgaataatatgagtgcagtacttacaaggagaatcctgacattgtgaaccagcgccaacaagcccaggcgagggaagccctcaaaaagtacttattctactttgagaggtgggaaaaccacaacaaaagcttgcagctagaggcacagacataccagcagattcatgagaagattcaggagagggtcatgaacaatctggggacatggattgactggcagtacctacagagtgcagccaagctcttggccaggtgttgatacaccctgcagtacatcaacccatatacatattacatggagtctggacccaggaatgagctgtttgaataccagcaggctgagcaggaggctgaaattgaaaacctctcatggaaagtggaacatgcagacagctatgacagaggggacttggagaaccagatgcatgtagccgagcagtggaggagaaccctgctgaaggatttc

SEQ ID NO: 89163 - DNA, 1050 bp, Homo sapiens
atccaaggaggtctacagagaaattaaagtctgccttatttgttacatttgggtataatgacaacagccaatttatagtgcaataaaatgtaattaattcaagtccttattatagactatttgaagcacaacctaatggaaaattgtagagaccttgctttaacattatctccagttaattaagtgttcatgtggtgcttggaaactgttgttttcctgaacatctaaagtgtgtagactgcattcttgctattattttattcttgtaatgtgaccttttcactgtgcaaagggagatttctagccaggcattgactattacaatttcattttggtggagtttagttttaggttttattgtatataaaatcctgcactgaatctgtgtctcctctgttacctacttttgccagtgaaatttaagttttaaaatactttcagaatgtatttttactactgcaagtttttggtctttaaaatgtcaagtagcatctctctctttctctctgtctctttctgtttctctctccagttttttttttttttttaatttccatatgggctaaagaatccaaatattttaaaaatctgtctctcttttcttctctcataaagtgaattattccttttttttgttttatgtaagtgtatatattcttagtttttcttgaaatcattgtaatgttaactttgttgtttcaaatatcttggtgattgcttcattatctcttcaacaaaaaaaacctttaattttgccattgaaactgtagaactatgccatgcttttattagaagcagtgctctgtgttaacaacaagaatggtgtaattagaattgggatgtggatatttactgtatgacaacacatttacagttctgtaatgcaaggatgcagtttaaaaatgtgaagtagtgatggtttttgaaataagctttaaaatatagggatcttgaaggctccctggggtaactattttataacttagataaaatggctagtcatatctgtgtgtttgtaaagttatttttttaatattttaagattacaat

SEQ ID NO: 89164 - DNA, 1105 bp, Homo sapiens
agaaacttatacttttacaatttttgaaaattgcagagtgggtgagtacctccttaaacaatatatggcaaattaactgtgtttcaattcatacatttagtttcactatgtccgttgagaagcagcgtatcccagcagcaagaataagggactctgggtggaattttactctgtgtttcactagctgtgtgatgcttggcaaatttcctaatcttggcaagcctaatttcttcatctgtaaaatgggttatcagtatgccagattgttatgaagatgaagtgaagctcaatacacagcgaatgccaagcacagtgcctgacaaataggagttaataaatgttatgctgtcatcctatggatggatggatgtaagagaacatagcccaaaaagaataagtctttcactaattggagatgtagtcttaaagatatgtacggatgttctctaggattaaatgtgattgccagtattctgggcacgattatgaaagtcactgagaataatacaaacattttctcagccctgtgaaaatggtctgttttaactaaaagtcagaatgcagttttggagaccttgtctagaaatgtctaagtgaaccatgcagttttagagaaaactgactcctatgatcaatctaagcacaagcttacaaacagagaaaagttatagaataatcagaattgtttagtctgaaaatacatggagggatagtatcaacatttataaaatcatacattaaatacaataaatatgaatatgatcacccaattcgaaaatgctagtatgccagaatatttgaaaggaagtgatactgtatggagaggtctgcaaatttataaaagccatgactttgccatgtaataatgtggtccagaacttttttgaggtgggtgaaaaggaatgaaataaagggaacatagaacatgtgaatgttttggagattaaaaaggacttttcttctctaggcactactgtgggacaagtgtgtgctactgacaaagatgagcctgacacgatgcacacacgcctgaagtactccatcattgggcaggtgccaccatcacccaccctattttctatgcatccaactacaggcgtgatca

SEQ ID NO: 89165 - DNA, 1072 bp, Homo sapiens
agtaataattattaacatttactttagagaaaagataaagacatttaacatgcctctaaaaaattgagaaatagtactgaaactgttttttttagtttaaagatactgtttttggatttttattcttaaatatttcactctgtattgtatttttttatcaattaaattatttcacataattctgtaagaaaagatcaatccaatgatagcataaaatgtgatcactgtttagcaatagatgtaaagaatttagtaatattttcatttagcaaatgccaattttcatctgctagattctgtataacttcaggtgtatttaggtgttactctatagcttatttctgttgataaagaaaaaaattgttttggttttggtttaaagattcaaacactggagctcacatatgtttacttcagagcaaatgtctcttctttaagagaatgttaagtaggtattagaagtgatgtaagtatttaagcacaacttaattcaccatatagttttatgtgtcctttcaaaaatttacaagtgtcagtataatgaattttaagtttttggctctccccacgtgcatacattactgttaaaactatatcctatgttttactttaaaaatgattgctgtgcatattttctacagttaacctgaaagagtgctttacagctgcaaatctaattcattcaagtgatcctgacttccaaattttggaggatggttcagtctatacaacaaatactattctattgtcctcggagaagagaagttttaccatattactttccaacactgagaaccaagaaaagaagaaaatatttgtctttttggagcatcaaacaaaggtatacaaggctacataaatgaagaaatgatatcttttcttcagacgtaatcaacattaccagggaagatatgaaatcagaaaggatatggtatagtttggcttaaagacgaatgaaaaccatgaggcaacttcacagtgtttagaaggaaaagggctgtgtcacatggttcattcgggttgtcattccttttcatttgggacgtaaaaggagaaattgggataaggtaca

SEQ ID NO: 89166 - DNA, 1037 bp, Homo sapiens
agttatttggagacatttacatttttaagagaaaatacaaaacacaaaattttcctctgataaaaagattgatataagcttcagatcctcattctgcccagaggtaatgagaaagagtgaaaaggcaaaggaggaaggtaatggaaaaaacacagaaagagaagaatagataggcagagagggaaaaaaatgaaacagcaggaaggaaaaatgagggaacaagagacagtagaaagccgggaaagagtaggctgggtccagaaagacaggaagaagggcacaccctgaaaggtgattagaagccagcccctcccacccagcccaaggcagagcagagggagagtccgccttctagaatacagtcatttcctggtttggagttggatgcactaaatagctgcctcttctgattccttaagtttcagacactgaaacttgcccatatactactgtctgaattgatgtcactgaccctgatcttaaatttcctcccaggaccccccaactctattcttctatgtaaccctcagaggattgatatctagctcatattttgctcaggcttttaatccactgagttcacttcaactcaacaaatatttatgcattatctgctatgaacagactaggcactgggggtacaaagagaatcccacccttgggggaatcataggctaacaagagagattaacttttaagcaaacatttccgtataaccttcaagaaaactacccaggtgctgtgggcatgcagacacagagcacaggctagtatgcgagctcagagctgggtacctggagaagacggatcctgagcttagtgctagggaagcagctaggaaaggggtgggggagtcctgttccagcggtggtggggggacaaccaccagcagtctggtatgtcacacacataaagaacataaagtcatgccagggaaggacaggaaattagactgaaaatgtcattgaccaagcattggaaaaccacgtgtcactcaaaatagctggaagtttatcttacagtatttgggaagacat

SEQ ID NO: 89167 - DNA, 1056 bp, Homo sapiens
aaaagtaggatgcttgcctctcatttgataaccaaagattagtgggcagagaggcacggttagaatggatctcacattgagttttggtatcaatactggtaagtgccaaggtctgacctagtatccaagcagacaaagagtgatattgtgtttgaagaaagactgcagggcaggggagaaagggaggggttgtttgagatgaggactcttgggatatttctaggtgggatgtgtgttacagtcacatgtcaggctcccacaagatttgtagaatctagacaaaggttctagctcaattttgaggtaatgtcaaccatactgttgtccaaacaccagataatgttttgaacaagattgttaatagacagtgtcctttatttctatggattacctagtttgggcattcataatccaaatgagttctacaaacagtattatattgttcaactgactctttcttaaaattcattttttcccactttttctctgtcttagaaagcatttgcctgtgcggaggaagacgatggccaggaagcaaatgactgcttgttgatctatgataatgaaggcgcagatgccactggttctcctgtgggctccgtgggttgttgcagttttattgctgatgacctggatgacagcttcttggactcacttggacccaaatttaaaaaacttgcagagataagccttggtgttgatggtgaaggcaaagaagttcagccaccctctaaagacagcggttatgggattgaatcctgtggccatcccatagaagtccagcagacaggatttgttaagtgccagactttgtcaggaagtcaaggagcttctgctttgtccacctctgggtctgtccagccagctgtttccatccctgaccctctgcagcatggtaactatttagtaacggagacttactcggcttctggttccctcgtgcaaccttccactgcaggctttgatccacttctcacacaaaatgtgatagtgacagaaagggtgatctgtcccatttccagtgttcctggcaacctagctggcccaacgcagcta

SEQ ID NO: 89168 - DNA, 1057 bp, Homo sapiens
aataaagtggtcaggtgcagtggctcaagcctgtaatcccagcactttgggaggcctaggtggtgaatcacctgaggtcaggagttcaagaccagcccaaccaacgtggtgaaaccccatctctactaaatacaaaaaattagctgagcgtgacggagcatgtctgtaatcccagctacttgggaggctgaggcaggagaatcgcttgaacctgggaggtgaaggttgcagtgagccgaggtggtgccagtgcactccagcctgggcaacaagagtgaaactccgtctcaaaaaaaagaataaagtgacagtatcagaaaaagaatgtaaaagtcctaaaaatcgtttctataaggaatatattcctattgcttctttaagcagaaacatgtttaagtttcagaggaaaaggtttaggttagaaactgtaactttccattctataaaaaaatctttatcaaaagaaaagaaaaaaaagaggtgtaagtatccaggatactcctggaattgagtgtggtcaggaggaagacagacagggtgaatgaagctggaggagctcagggcccagttgagaatagacagtttgttacattggccatggagaaatgggagaggatcgtccttcccctcaatcctggagaaagacccatggtcctattccatggaagtcaaggcatggatgacagcaccaacatttggagtcaggatcttgaatttcttatggactctccagttagatggaccaagagacgcttctgccttaggtggtgagagaggagcgctggccaacgtgggggtggaggaggcctctaataagagagcgggaagagttatgttgactttcccagttagaactcacaggataataaagcccagcagactccaagccctgttgtctagcacagagaagccagcacgtccttaatgaacagtcccctcattctgggggagcaaaaataggcagccctgagatcacagcctcagacgtcaacatcccgaaagagtgagagtcccagtgccgtgagtcacagtgtctcactgagctttccccacatgt

SEQ ID NO: 89169 - DNA, 1047 bp, Homo sapiens
gagagatttctttttgaccatgatgtaaggaatagttacgcttctcctgatttgtttgtatcttaatagatatcaggatcatgtacctgctcatgttactttctttgtattggctactaatactattataaacaaatctgtgcccttatacagcaatttttcaggactctaccctcagccttgccttcatcttgtttttactattgttatatcccattcacgcttatgtcctcatccagttaaatgttatattgtggtcaactgtatgtgattttgataagcacctgaaatcttttttggaacaagctaaaattataaataaaataacaggtaaatatgcttaaagttgaatttcatcttagacatctttatttctaatgccagatactcttgtgatgaaaatcaatgcaacagatgcagatgagcccaataccctgaattcgaaaatttcctatagaatcgtatctctggagcctgcttatcctccagtgttctacctaaataaagatacaggagagatttatacaaccagtgttaccttggacagagaggtaagttaatatgttatgttgcccatctttaaactctctatcctttccagtttctcctctctttttcttttctaattttcttattttgttctgtattccttatccataggataactcttggaattactctcttttagggatgtgctgtccaatatgggccatgtgactattgagcacttaaaatgtgactggcccaaattgtaatgtgctgtatgcacgttgaatgtgtaatatatgcaccagatttgaaaaacttaatatgaaaaatgcaaaatatgaccttaatgttttttgtgatcattgcatgttaaaataatattttagatatcatagattaaataaaatatacttgtttaaaattgttatcatgtgtttctttttaaaatgtggctactagaagatttaaaattacataaaaacagcaccattctagggcctctcctatcagggttctgtttactagaggttcctaaaacatttctcagtttgcagttct

SEQ ID NO: 89170 - DNA, 1022 bp, Homo sapiens
aggccaggagttcaagaccaacctgggcaacacagcaagaccttgtctctacaaaaaaaaatttttttttcaattagccaggcatggtggcacatgtttgtagtccccactactggggaggcttagacagggggattgcttaagcctaggagttcaaggttccagcgagttgccatcacaccactgcattccagactgtttgtcataatttactgttttattgattattcatgtgtatcagctgtttacagatatttgatataacatgtaagcagctatgctacttgaatgatgtctagcttttacaacagagaacagaagatttcttaaatgagattaagcaaacacattgtgaaatgtaatccctatttctaagactctgcctttattatcagtatgaatgttggtaaaccatagacagcaacttatgtctaagctttaaaatttcagacatgaaattcaaaactaattgtgaaaatcaaaatgtattattatttactggtagcagtattaagaggcagaaaaatttagttcaagtgtataattggaaatagcactaaaaataaatattgctataaattagccactcattcctgtgtgcctcgaagccacttaatagaaaataaattaacaatttgattgagcaaaccaagatactcatatgtttggttggtactggtatttttatgttaaactcattggtattcattaactaattacatacatttcttttttttctttttttttttttttttgagactgagtcttgctctgtcactcaggctggagtgcagtggcacgatctcggcttactgcaacctctgcctcccgggttcaagcagttctgcttcagcctcccaaatagctggaattacaggtgcccaccaccacacccagataatttttgtatttttagtagagatggggttttaacctgttggtcaggctggtcttgaactcctgacctcaggtggtccatccaactcggcttcccgaagtgctaggattataggtgtgagcca

SEQ ID NO: 89171 - DNA, 1050 bp, Homo sapiens
gtgctgggattacaggcgtgagccaccgcacctggcccctgcgatcattgatttttaaagttgatgtttgtaaatgttgctaacgcccccaataaacaacagaacataagactgctcttctccaccagtgcttattgtataactaagttattccccaaaagtttaacccaactttaagggacactaaatcaaatgccataggacagactgcagagcaacttaaaaacttgagttagtggttagtgggctcaagagaatcacccttaattttatgtcttgggtatgttgcaggaataagaaaggtccaatttaagtgtgacatgcagtaaagagaggggcttttaggatggttttgcaaaattaaaaacattcaaaacaaatgcctgtaataagaacatatttaaagagaagaaaagtaagcttgaaagagctgtagatgttagaggtttccaattcatgcagaattcaaaattaattttatgtttgttttatgacagatatgtaaaattagaagatagagataattggatctctgtggattctgtcacatctgaaattaaacttgcaaaacttcctgattttgaatctagatatgttcaaaatggcacatacactgtaaagattgtggccatatcagaaggtaagttattaaatagatctttttcttgattatatgtatttagatttttattttccaacatcagaaaccattgatttgattgtgtataaaaacctaatctcggccgggagcagtggctcatgcctgtaatcccagcactttgggaggccaaggcaggtggatcacgaggtcaagagatcgagaccattctggccaacatggtgaaaccccgtctctactaaaaatacaaaaattagctgggcatggtggcatgcatctgtagtcccagctactcaagagactgaggcaggagaattgcttgaacccaggaggtagaggagcggagatcgcgccagacaaagggagactccaactcaaaaaaaaaaaaacaaaaacaaaaacctaatctcaccccagcacagttgcttgtg

SEQ ID NO: 89172 - DNA, 1456 bp, Homo sapiens
tctctctcactgacacacattcacacacattctcttacattactatagtacagttaacaaatgtagaactttaatattgacatagtccatatttcagtttagccaactatcacactatcttttacagcaattttgtttttctcaggatcctgcattccatttagttgtcctgacactttagtctcctttaatctgaaacagtcccctctgcctttctattttttccctgatattaattttttttaagaatacagtccagttgtgtcgtaggatctctctcaatttgtgtttccctgatggttccttgtaattaaattcacattactgcattttgaacaggaatatagagtcttgttttaaaatgaatttatattgctaattatttgtctgttttgtgtttgttttgttttgttttcattttagaaagcggcctcttacactgaggaagatgaaaatcacacagccaaagattgccttctggtttattctcaggaagaaactgaatcgctgaatgcttctattggttgttgcagttttattgaaggagagctagatgaccgcttcttagatgatttgggacttaaattcaagacactagctgaagtttgcctgggtcaaaaaatagatataaataaggaaattgagcagagacaaaaacctgccacagaaacaagtatgaacacagcttcacattcactctgtgagcaaactatggttaattcagagaatacctactcctctggcagtagcttcccagttccaaaatctttgcaagaagccaatgcagagaaagtaactcaggaaatagtcactgaaagatctgtgtcttctaggcaggcgcaaaaggtagctacacctcttcctgacccaatggcttctagaaatgtgatagcaacagaaacttcctatgtcacagggtccactatgccaccaaccactgtgatcctgggtcctagccagccacagagccttattgtgacagagagggtgtatgctccagcttctaccttggtagatcagccttatgctaatgaaggtacagttgtggtcactgaaagagtaatacagcctcatgggggtggatcgaatcctctggaaggcactcagcatcttcaagatgtaccttacgtcatggtgagggaaagagagagcttccttgcccccagctcaggtgtgcagcctactctggccatgcctaatatagcagtaggacagaatgtgacagtgacagaaagagttctagcacctgcttccactctgcaatccagttaccagattcccactgaaaattctatgacggctaggaacaccacggtgtctggagctggagtccctggccctctgccagattttggtttagaggaatctggtcattctaattctaccataaccacatcttccaccagagttaccaagcatagcactgtacagcattcttactcctaaacagcagtca

SEQ ID NO: 89173 - DNA, 4336 bp, Homo sapiens
tgaataaatgaaaggtaaataaaaatgcattgaaccccaaaaaagctgctgaagggaattttcataatggaagggaagtattttttgctgaagggaatctttacaaaaggaagcatttttgatgcttgtttttaagagatatacgtatatatacattaataaatacacatatttacgttaaagagcccggttaactatttatgtaaaagtatttacgtaacataaagcataatgttttatttattaaagatgtctaattgtaaaagtgcaaaataattttttcaggtggcatttcttgagtagtaaaattgctaatttagaataatggtttagagattcttaaattatgcacaagaaccagaaattgtaaagggcattaagtgctttaattataagatgaccttgaacacagtccttatcagttttcctttttgaacatgttttgttgcttttttgttttttcctctaaaactataggtataaattactaaggtattccaaggagcgtcagtacatcgatggactgaacaatttaatatataggccaaaaatactggttgataggttgtatacaaacatatctgtaaacctcatgccagagttagctccaatcgaagactattaaaagaagtggctgtcgtggcaaggtagaccacaatgctggatcataaacttggagcgcgctcttagtggaggtcagtgattggctgtgtcacagtgcccttttctctgagaagagccagcagtccacagtgtttacagagtgggactatatacagtcacccttctctcacccgtcctccctgctctgagacacacccctgtggcgagcaccgcagaaacgggaagccactacttaagatcggaagttaagagagctccctccgaagagaaaatttttatactaaaatctataatttaattcaagagaatgcttttatttccgtttaaacatattttgtatatatgtgatataaattaatgtgtgcaaattgtttaaaaattagatgtgttgcagttttgcatgtaatcggttatacctttattggacttttatagacattttttatttgcatgaaaaaaactcactaaatttacatcactaaacaaaggttaacccttgtgtgaaatgaaggaactgtcaataattgacagccaactaatacagtaaactgttatactagttttgagctttagacctcagccttttgtgtggaagaagtcacagctttcttaggctttaaaggaaaagaaggaaggacttaaatagcttttcttcctaccgggattacctatgtttttccttgcttgcaatctcatctgattttgctagaaatcacaaccatattgtttatgcatattgcatgagtattaccaagaaaaatcttaaaagttgtgatgtgacatgatataaaggatctctttatgttaaatgtctttccatgtacctctggtgtgtcagggattttgtgcctcaaaaaatgtttccaaggttgtgtgtttatactgtgtattttttttaaattcacggtgaacagcacttttattatttccagttcagaagagccaaaaaaaagtatcttcatttaaaaagaaatcaagtcagtttttttaaaagaatgatctatggaagaaaacccaatagtacttataatatacaaatgaattatactattagataagaattaaatattctatttttataaagataaatacttagtagataaaaacaaattttaagtttagttttcagacatagaatttcacttttggaggggacccttgaatgttagtttcattcaaactatattttgtttttttcacttttaagagattatatctctggtgttaattactaaaattttctttctaaaagtataatttaatagaattatcttaaaatacatgatcagtattcagtgcgctgatattataatgtcttctatatgtagtatctaaaagcataatttaatagcattgtcttaaaatacgtgatgagttatttggtgcactgatgccataatgtcttctatatgtaatatcttacatgtttgcatgagtgtcagggctttgtccagttatcttcatatgactgttctctgaaaaaaggtcttactacctgatatcaagtacatatcttaattttggatgaatttttccacagtaaagccgaacagtattcttttttgaaaattagcaattataaagattgtttaaaatatcttgatattttcacaaattttaaacaaaaaattaaatatctataaagtgaatgttcaacaacaatgatgagcaatagaaatctatatatgagaaacgtttggataatatttgcctcaaggattgtttacctaaaacagaactatggttatttatctcagattgtaagttttattttgaagtgtcatttttatggcaatattgataacacaaatgaccacaaactaaatcataaaataattgaatccttacactttgagaaaatggatagcttctgtgttatgataccaaacaaaatattttcatatttatttcttagaactatttccaaaatatttatatttcagtttttttatggtactcgaaaaatcaaaccttctgaaaattatgatatttgtacttcatttgtgtattagttcattttctgtttctattacatagtttttaaagtcaatgaaagagattgagaatgttaacatttgttgatcaatgtggagctgtccacattcggtatcttttcatttttatatatattttacagtttcaagaaaacttagtactactagtatctgccttattttcttaagtctgatgttaatttttgtttcaggagtgagatataaacattttgctttttttcagttttgaaatatagtttgtcatcctgtgaaaaccacctcgtttgctttttgtttgtttgttttgcttttttagtgtagacctaaaattatttttgcctataaacagtgaacttaatatgtttctgtgagagtgacagagctgtgcccgtttatcttcattgtattaattattacataaagattaacaaatacattgcaaatgcaaattataggatgtttggaggatttattaatgagcatgtattgattgcctattccatatccagtgcaatgctaggtatgtctatggaaggagtattattacttcatttctaaacaaatgaagtcaagcaaattgagatctttctgaaattatgaagacatcttctgataacttatctgttgtatttcctagtctcaaagtcaagaaacccgtatatgtggacctagggctaataggaggtccctatggcactaactgggaaaattacatggtgcttttcaactacagaaagaagtaatgactaatgggcctgtctgtagagaagaaaaggagaagagtacacatttgctggaactatatataattcacagtggagatagttaattctttgctaaaactagggttttatgagtattttttaaatctacatttaagtttttgtttttgtgaaaagttattcagtaagaaaactttataatattaagtagatacagttatgtattaaaaatttccttatatacccttttgccagccaagatactgatattttaaaacaaaatggaaaaatgtccaatacaatattctctttctggaggcttcctacaagtgaaagcagattttgtcattttatttggcctttgcttgtctttgatatatttctttatgtgtttttcaaatacatactgttgtagatttattgtcttgtatttgcaagtatgccggttgagagaactaaaatggttatagtattgtttatcagaaagaggaagtgtacttaagattattttatttatttagatgaaaggcttctacataaatgcactgaaataaatgctagtaatttcttgtatcccacttctttttttgcttctcatggaaatgtttgtacttttttatcattgtcttttatgaaatataatgttctaaagactttgtgtgaagatgtaattattttcctctcaggaacttttttgggttacctgggatttttgtttgtttgttatcctaaattttaaatgaattattgatgaatatcttggttgacaatagggttgcaatataagcataaggtaaccacagcttaaatacaggtggagatcaccttattccttttatctcaaaaagtagtatttaagtatttttcattagtacaacaattagtaatctattatatcaagataaatatttaagaattcattttagcataaattttctttttcctgcacaacttcaataaactaagctggtgtgttatgctcaatttactacttgt

SEQ ID NO: 89174 - DNA, 1111 bp, Homo sapiens
atttgaagtagagcagaaatacaaattatttaaatgtgctgatgtaccaatggactagatactgttttcttctatgttattaaattataaaataatatagtaagtaaatttaaacagtgtatttgaaaatcctgaagtatatttattatttgtctatttcatttgggtctaattattgtaatcatttgatcatgatgcaacaagtttgaaaaataatagaaaaaagtcagatgggggccgggcgcggtggctcacacctgcaatcccagcaccttgggaggctgaggtgggtggatcacgaggtcagtagttcgagaccagcctggccaacatggtgaaaccccatctctactaaaaataccaaaaaaaagaaaaaaaaaaaaaaagatgatgaagtgtgagtacatttctatttttttctctcggtctgctccatgaagactggcacacaaccttttaaccgtgcgatgcttttcaatgtgggcttcaaagaggccatgaaagacagtgtctgggactgtgtaatcttccacgatgtggatcatctacctgaaaatgaccggaactattacggatgtggagaaatgccacgtcattttgctgcaaagctggataaatacatgtatatgtaagtagtgtgcactattcctgatattgtacgatataattgcacagtcatagcattgaaatggtagcagcgttatgtccctaaatctgagagaactcaagaaccccaagaatatcatctttaactccatcgtgtcctcctggggagccaggacacagagtggcttttcgttcccctgggtgcttccttacacagaggtttgaatgtggtgtggtgggaaagagagcctggtttctgtggtcaagcacacacagatttaaacttgggttctcacacttacagttccaggacttataggttagtcacttgcatctctgaaggtgtattccttgttcactgggataatagattccatccatagagctgctgtgagatcacatgtgctctgtgcctgctgtgtggtaggtgcataactcatcttgactcctgcctgctctcccccagtgatggtttggagggccacaaagccctctcttctgctgt

SEQ ID NO: 89175 - DNA, 1050 bp, Homo sapiens
taaagtgatgttttagaaaccgaaagaaggtctgataacacttgaagaccagttctccatgccagcttgtaccacttttggtattgttacctcatatttcacatttaaatgtatgtgataggtggtagttttatattaatgtatgctgacctaatgtaagtctctcctccgcttaaaaccccccactgccttctggaggttcttaagtagaggagcaactttatcgctggtgtgttcctctcgacgtccacctgcttgtgtctcttcctgccaggatctcagggctttcataggcaaaggatgagggatactgggaattctaggaaaaatgaccaatgattatgaatcagaaacctatgaacattctcagcaatactgggaaatttttttttcctggaattttttacccagccaaattgacaaatgtgagagtagactaatggcattttcagtccttaattggctaaaagtgtattctccatgggtctttacttagcaagctcttgaagaatgtgcctcaggaaattgagaaagccaaggaaaaggcgtaggtgatttagggaatgaagacgacccaggtgatatgcacacatggtctggagagggcaagggagagttgggcttgagagatggagaaagaattgatagatgatttgatgtgtttgaatgattacatcaattattaataggtgtagggcatatttcttgggccttcagtacaaagtaataatataatagttatatagaaaactgtagttattcccagtttgcaaaagaaaacagttcactcagcactgaagaaatattaaatatttacatagtcctaataatgtaaagtcttgatttaaccaaaaattatgataaaactatattgggagaatagaggtaggggcaggaggtgtggtggtttaactcctccactaccatgataagaagtcaagagacagtgtcttaaagtgaaagaagcaagaaatatcagaactctcatttcctcaaaatatgtagataaataccggaataaatgggaagagttgaaatgtattgctcttg

SEQ ID NO: 89176 - DNA, 2297 bp, Homo sapiens
ttggcctggcatggtggctcacacctgtaatcccagcactttgggaggctgatgtgggtggatcacatggtcaggagttcaagaccagcctggccaagatggtgaaacctcgtctctactaaaaatacaaaaattagccgggcatggtggcaggcacctgtaatcccagctacttgggaagctgaggcagggaagtgcttgaacctgggagatggaggttgcagtgagccaagattgcgccactgcgcttcagcctgggcggcagagcgagactgtatctcaaaaaataaaaataaaaataaaaataaattgaaaaaaagaatttaattttctacattatttctaaacatggatagagtgatgttttggaaacctaaaaaagatctgataacacttaaagaccagttctccatagcagcttgtatcacttttggtattgtcacctcatatttaagtgtatgtgatagatggtaattttctgttaatgtatactgacctttccaattgctttacatcattgccagcacttggtatggtttgtctttttaattttagccatttagtgggtctgtggtagtatcttatttccctgatgattaatgttgatgatcttttcatgcacttatttgcttcccacataccttctatggtgaagtttctgttcagatctttttctcatattttaattgggttgtctttgtttttactgagttgtaagaattatttatgtattttaaatacaagtcttttgtaagacataagttttgcaaatatagtctatggcttgcctttttattcttttgactgttttttgaaaagttttaaattttgatgaagtccaatgtattgatttttgtttttatagcttgggctttttgtattatatttgagaaattgttctgtatgattttctctttcttccagaaacttaatagttttagctcttacacttaggctaatcattgagttaatctttagatatgatatgagctaagagtgaagtttcgtttagttgtttcatcaccacttgttgcaaagactgttttcgccattgaattgctttagcatctttgttgaaaatcacttaatatatacacgtcatatgtatgcaggtctttttctggtctctgtgttccattgactctgcttgtcagtttctactaaaaggtctgctaggctttatttccttagttttgaataggtaagtaacagtataaatgatagacaaagttacctggcttgtattattagatacttttatcttctctcttttggtagaaaatactcaaaaaagtttttttttgagacagagtctgcctctgtcgcccaggctggagtgcgatagcacgatctcagctcactgcaacttctgcctcccaggttcaagcgattctcctgtctcagcctctcgagtagctggaattacaggcacccaccatcatgcctggcttatttttggaaaatactcaaatttttattcctaaaatggttatagtttctccagttcctttattctaaatctgcctttttgttttgttttgttttttgttttgtttctcactctcagctttttacctctgctttttctccgtggaaatgcttggtatttaatataacataccatacttctgtgtgtataaatcattctttaagttttgtgccttatgtactttttaatgtaacaatctgtactgtgaaatctgacttgttttacctaacaagtggaaattctcatctactttcatggagctgtagttgtagatttctagatcagttttactgatctaggaaagtgctagtttcctttgtgtaaacttcaattccccataatgtgtggagaggtgagagagctgtctctggttttttttttttttgtttgtttgtttgttttgtgatggagtctcgctctgtcgccaggctggagtgcagtggcgtgatctcggctcactgcaacctctgcctcctgggttcaagtgattctcgtgcctcagcctcccgagtaactgggattacaggcatgtgccaccacacccagctaatttttgtatttttagtagagacagggttggccaggatggtctcgatctcctgaccttgtgatccaccctcctcggcctcccaaagtgctgggactacaggcatgagtcactgcagcctgtctctgtttttaaaggcatatggtcctgagaattcagcaccagttatttggtgtatgtgatgaaacaatctttgcaaggcaactaaggtctgcgtttttattttcaaaccttttaagtcttaatctcaggcttgatcaa

SEQ ID NO: 89177 - DNA, 1041 bp, Homo sapiens
tccctgagtcaatttttggtcttctccagtctgccctccatattgccaccaaagtagtctttgtagtcaccacatctgatttatcactctcaatttctcatgatgttcataggttaaaggccacaatctttagaaaacgcttcagagccccttctacctctcagctttataagaccatagcagcatgcagcaagggctttttgcgtgtttgcttgctgttgtatctctgatgagaaaattcataaggacgtggctttaaaaccatcagaagttttcaaggattgatttttatccttacctctaggatgtggtagatatatttatttacatacatgactattttgttttaaaggtggcagttctcattcctttccgtaatcgccatgaacatcttccaatttttttcttacatctgattccaatgctccagaagcagcggctggaatttgcgttttatgtcattgaacaggtgagaatacttttcatagtggtcactaagtatactagaatctaaactcttagatatggttagattaaacatatttaggattaataaggtaagtctgattcttagtttagtttttttgagacagagtcttgctgtgttgcccaggctggaatgcagtggcgcgatctcggctcactgcaagctccgccccccaggttcacgccattctcctgcctcagcctcccaagtagctgggactacaggcacccgccaccacgcccggctaattttttatatttttagtagatacagggtttcaccgtgttagccaggatggtcttgatctcctgatctcgtgatccacccccctcggcctcctaaagtgctaggattacaggtatgagccactgtgcccggccaaattcttagttttatacttgggtgaaattacattttggattgggcccatatatttcttttataataattgtaatttggtcaaatgacttaatcagcaatcatgtttcactttagtatgacagcctcgttatattttaatgatattctaaatataggattgtcaatctatggtt

SEQ ID NO: 89178 - DNA, 1661 bp, Homo sapiens
attctcatattggaacagtggagagagagggaaataagaaataactagatttatgttaaacatctgtcatcaacttgattcttaatatttgaggccccttttttaaatgagaaaaataccaatgcagttagttgatggcaaattaattagaactgagatctttcaaaactagtaattttggctggccaacctgttgagaccccgtctctactaaaaataaaaaaattagccgggcgtggtggtgcaggcttgtaatcccagctactcgggaggctgaggcaggagaattgcttgaacccgggaggcagaggttgcagtgagccaagatcgcgcccactgcgctccagactgggcaacacaaacaaacaaaaaaccactagtaatttcagcaattcctaggtattcttgaatgctgcaggtttaagtagaagatctgcgcaggttggacaccttctggggcaagcttgtatctaaagaagaacatgagaatgctatgcaggtcattaaaagtgaagtgtacctgtgacattgactttccattcagatttcagatggagggcttgatgaacaactttggtctataacttccaggcttaaagaaccaggcagctgcttgatgctcttgtctacccagaggcctggagtttcatttatagtccaatgtacctcaaagatgagtcttggcctccctgtttcagaactacttgaggcatatggtgaaaatgctgatttttggccaggtgtggtagttcaaacccgtaatcccagtgctttgaaagactgtggcagaaggatcacttgagcccaggagtttgaggctgcagtgaggtgtgatcacaccactgtactccagcctgggctatagaatgagacccccatctctaaaagaaaaaaaatgcagattcttgaactcagtcctcaaacattctgattctattggtgggaaggaacaagaacttgcatttttaaccaagtgcctccagtttgagaactgctcctggaggtactggaaatgaggaggaataggaagatgaaactaaaaacactgaaggagaatgagggcttactagcttctgcttactcagtggcagataactagattcaccttaaggttaccaagcctaaagccatgtcatttagggacagtgtagctggtggtgtgctgaaaatttgaaagcaggacagaaacttggtgggagaaattgatgtgatacacatttttcttgatgttctcctcatggtgtatataggagaaaataagcaagggaaaaaatggtgcatatgttcagcaagatttgtggttttaaagtaggagcaaactgaatggaataattttgcttgatcaagaggtggtgaggagagattcaggaggatgaagtgttgttttatcagaagataatgaccagatattctcggtctccactggaggtgtatcagcaagagagtggctcaaacagcaaattagggcacatagaagaatgtcctgaaacaggctattaagccttaaaataaatgatcacagaacactgagatcttttctagacaaaaaaattgtaaactatggaggacattcttccacaaacacaagaactgatgtgccagatgaacttttaagatattgtttagctttattttaataaaagctttgccttagatttatc

SEQ ID NO: 89179 - DNA, 1790 bp, Homo sapiens
tcaggcatggggatagtgatggacagaggaagccctctctattgagggaaagaaataaagcctgtctcttgccagcacatatgcgttggagatggaaattaaactgcaaatgatgctggagaaaactgctgacaataatgatgattacagctgttgaagcaataaagctggaaaaaagacaaaaaatgtggtttaacagtgcagaaagaataccagcttcagttacttatatgaactgcttattatttagcctaattactatcattttagcaatcatgcatactattaaatgtatcagatttatttgtgtaaattttatttgattacaatgttagattctgttctttgtcagctgagtcatgatagtctgtacttatgtttactgatcaatcttacattttacttactctttctctgcaagttcataggtttctctttcttttagatgaatctgacctttctaagattagctagtttgtgtatcttgtcacgctgaaggctgagtgtttggttataaaagactgcttatgttgtcagtagaacaggcaggcattagaagattgcaattctttttctaacttattctgggaagcaggtatttcgatgtaaaatactctagcatgcctgcgtggaggctacagacagctctgcctggttaggatgaagtggggacaggaagagaggccattgtgaaaactcctaaaatatagaatagcaggagcaaagaggctctctagagaggaactgagtgtttttatatgaaattgtggccacatgaaactcagaagactcgaaatgggaaacctcaacatttgttggtttgtattttatgagatgaggtcagagagaagaatttggctggagggcgctccagagcaatttgtacctatttggaagttaacggatgacattaaaactgctaaaagatgatctgtagtttcaatagccttttacatcctgttctaacagtgaagtcattgaagatagcattgctttgaagggatgttagtgatcatgcagctattttaattcagggggagataaagaggcttcttgattcttagttctcttttggggttaacggaagtggttttccattcaagattcattcctgtttcaatggtatacattagaaaagctactagtaagaacacctccagtaatgtcatatatttgttaatttggagaatgagtgcctgttagaccaggaatacctcagaagtggtttttcagttttgtatgccaaggggcctgatatatggtaagtgctcagaatcagtactttgaattatgtttgcaaattccctctcttaagaaatgtcagtaggtaacagtaatagtagctaacatttgttggttgtacctaatgcctgacacggcatatgatccttcacacagatgatttcttggaatggatacaaccaccttgggaggcagacatcactgtcctttttacagaggaggaggctgaggcacagagaggttaaatcattttcccaatagacagaagctaggaatcagttcccagtcaatctgactgcttatttcattgttaagtactgtgccattgtgtcccctgtgttgaaaatgttaaaattaaaaatggtattaaaatatttgaatagttgttaaattgcagtgttaagttataatgacatgcaaacattttccaaataatactaaattattcaatatattacccaaaagcaaaacggtttttaaaaagaatttgattttctttggccgatttaccaaacatagaagggtgaccatatatattatcattgaaa

SEQ ID NO: 89180 - DNA, 1021 bp, Homo sapiens
ttaagtgtgattcagatgatctacacttgttaaaaatgcagctgggggctgggcgcggtggctcacgcctgtaatcccagcactttgggaggccgaggtgggtggatcacaagctcaggagattgagaccatcctgtctaacacggtgaaaccccgtctctactaaaaatacaaaaaattagccgggtatgatggcaggagcctgtagtcccagctactcgggggtgaggcaggagaatggtgtgaacccgggaggcggagcttgtagtgagccgagatggcgccactgcactccagcctgggtgacagagcgagactccgtctcaaaaaaaatgcagctgggatacctgttaaaaatgaagcctctgagctaaaccctagactgcaaaagtcagggttcttggttgcaaaccacagaatatactttatctgatttaagagaaaaaagaattcatgaaaatatattagagagcccagagacaacctgggtggctagagaattaggttgagaaattgagcagccagaacaaggctcagaccgctttgaagcatctcctgctgccacttgtcagggcttaaacctcctaccagcattgctcaggtctggagaccagaagtgccacttcttggttcctgtaaagctagaagcttttgccaccacttcgggtgcatttggtcatatgaccactcctacctgttagaggggtttggagagtgggttctagctttttcctttgaaaggcaggacccaatggtgggtagttcaagccgttgaaatgtgttcagttaaagccagtggccataaacgtgacccatgagcttcaactgacacagaaactttgacaatgtggccagtcagctgcattttaaacaagcacagctggtaattcttaggcacacatcaaaattagcaaaccactttatacagaggccagtgtggatatagcagagaggacttcaagtcttcatggaattgaagagggacttcatgggaggggagtgggagaaggtgaaagagaaa

SEQ ID NO: 89181 - DNA, 2810 bp, Homo sapiens
ataattagaagggatttgtgtaagaattagatctacttagatgaaaaccattcaagtacaagtaatatttacttatagtcactaaaagtgaagttaaggcttaacactggtgtatttgattattctgttgtaaacttctttgatttttacttagtatagcaatggaaacactggcactggatttctgtaaagataaagtgaatttttcaaactagaatacagataaaatgtgtttcatacatttcagcagtgtttcatattcaatagtggccaattacactataaagcctattttaatatgtatattttatatgaagagtatgagtgaatacttctttcttgtttgttagtatttatagattttccaaagggcaaatccacattcagctttattgcatttatgtaagattctttgtgctaacaaagtaaaatagaagtttcaccttgtctaaggctaaaaattaataagtgcttagtgtggatgttttgattttaatttttatgggtgaggtagaaatggaaaatgtcaattgcatactctgcattagactgaaaatagacttacctttagttttcctatcttttaattcttattcaaatagaatacgtttgcagtgacctttatatattctgttcttactatttgtggaatagttccctttatggtttaaccctgatagtttctatagttgctaaccttatgaatataacaaaagctccaaggacttcttgagatggatttaaataattcaaatgaaaatcagcaaagaaggaaaagataagcaaacaaacgtcagcaaagctcaaataatgctaatgtaacaaactgtcatgcatatgtttattgtaaaaaaaaaaaatgagatgggagccattttagagtcaacaagtcattgatgaacagccgctgtgcagcggtccctgtgttgttcatagaagcaggtacgggagagacaagactgaacgtggtcatgtgtgtggcagcttggagcaggtaacacacttggagaaaggcatgctatgaaaagattatgaggccgggcgtggtggctcatgcctgtttcctagcagtttgggaggctgaggcaggtgggttacttgaggtcaggagttcaagaccagcctggccaacatggtgaaacctgtctctaccaaaaacacacacacaaaaattagccaagtgcagtggtgcgtgcctgtagtcccagctacttgggaggctgaggtggagtatcgcttgaaccttggaggcggaggttgcagtgagccgagatcgcaccactgcactccagcccaggcaacagagcgagactttgtctcaaaaaaaaaaaaaaaaaaaaaaaaagaaaaaaggttatgaatgtgacaaaagggagacagcagtttattttggaagggaaaggacgatgtcagagagaggtgtcatcagaactgggtcttacaagatagctgagagagaacagcatcaccacaagggaggctctgtgtattcccggactggagagtggtcggctctgcccagagagggtgtgttaagtggcgtgtatgggaaatgaagctggctagaagggtcttgtgtaaaggactgaggaatctgagggccttgtgggttccatcattcctaggcatccatgaggtgagcttcagagggagaagagcctgtgagcttacatgcagacagttgatttatgagcctgtatgcatttctctcaggtgacagtgcatgattttcaaagggtctaggggcaaaaaaaaaaaaagcaaaaataaacaaaaaacaccactgctttagggaaatggagaaccatcgaaggctttaggcaggtgaatgatggactaggattgtattttaggaagattattcacatgagaagctgaacaatgggtgagaatggagaaatactgggatcagcaggagaccaatgaggagcttgctgcaggaagccgacgggcaacaacaagggcaagtgccaaggctgtggcgttggagagaggagaaggcacaaaaaagaacctacagggtgccattggccagatgtggcgaccagttgaggggtgagggttaatttccaggtttctgacttggtgaccatgaactgaagtgtgatacagagtaaccgtcgcatttggaggatggggaagttagtgggttccgtttgggccgttttgtttgaagttcaagagggttaacttggggtctgcctttagtaagagatccggactgaacatcagaggaagtgagaggggaagaaggctgagagtgggtccctgagaaaatccgtacttgtgaggtgagtggcggttaacagaagaaggggagacaggaacctagagaagccagagggtggtgtctggggggcgaggcaggaacacatcccagagagacaagactgctgtgtcttgtcacacacctccagacagcagggagagtgaggaactgtgaaagggccactgaatttggtgcagaaaacgaatggagaacacagcaagcacgaattcagtaaaatgattgggagagaagcaaagtagactcttgagaagtgcgtcagaagtgtatgtagactgtaggtgaaatgagagaagtttggtggcaaagggaaggagattggggtaaaggatctggaggaggtggaggtaagggaagagctctttaggaagagatggacttgagcatgttgtaggcatcatggaaagaaaggatggagagaagaggccgggcgccgtggctcacgcctgtaatcccagcactttgagaggccgaggcgggcagataatgaggtcaggagatcgagaccatcctggctaacaca

SEQ ID NO: 89182 - DNA, 2540 bp, Homo sapiens
tgtcttattgaagtttaaaaatgacagtatgaagtaggcatagatggcaagctacatcgtgtcctgccctgtatcacacagctacagtgtgttggagcaaggatttgaactcaggcatttgactttggtgccctgtatgcagtttaatttgctgactctaaagataatggacctaatgtaataatagctccagggctcccccggggctgcagcccacaggctgggaatgactaacttaaaggtttagaatgagctgtattacaaaagtaagttgagtgggtaaatctcagtttctacagtgtgaggtggtaagaaaacattactcccacccctctgctctgtggatgctagtagcagcacgcagcggtttggaacacccctggctgtgccatagtggaggggattccctggtgtactttcacactccctgtagatcgggctcagccaggggagggacgggagcaggtgttctcacatggttgcaagtgggactgccatgtctgtgtgcaaggataagggtgtgctgctctctagatgtctcttgggaaatcatgctgagaggtctgttccccgcagcagtttgctgttctctagttccttaaagataattgattttaagtacttctgtagattgtatattgtagttttctcccagtgatagtgacgtatttcattccagggagaaagcaaaaggccttttttttttttttgtaactcttttctctctttccaagattatcccgaaggcaataattcaagtgattatcttgttcaaacaacaacgtatctcccggaaaacttcacatactcaccatacctcccctgtccagaaaagctgccttatatgcgtaagtcgtcatctaattttgacttaactgtttacttgtgttacaatacagtcataaaaaccacatgatttgagtgcagcaggagcaggtcatgtgcacctgggtgcaaatgtttatattatgcagcatgttatttgaacttttatttatttatttattttttggcaaagcgcattttgaagggggatgattgaaaagctgaagaaaaatacaaagggggaaaatgacaaatacccatattgttcccaaccagttttaaaaactaatacttcggcttacctatgtccaagttcttttaaaacagtgcttaagagagcaattaatgtgtagtctccttttgaatatgttataatgttcctgattaagccagtcctttttgaccaccatccccagtgctggctccccattccttcctcagaagtaacctcacctctactgagagtttgctgagtattctttccggttatgaaaattgttttctacatagatagatgtctgtatagaaaatagatattgtttcaaaggagaaattatgtaaattggtctataaagtacatttcattcttgtaacttgcttttttacatacttttttgagaactacccatgttgttacatatagatctaatttttttcccttaactattactgtgtggtacgtctttgtataaatgtatcacatctcatttacctgtttccccactgatgaacatttaggtggtttcaacatttttgctatcacaaaatagcaaaaaaaatatatatatatattttggtataaagaacaacagagtgtgagttttcctgtgcgtatatgcatgtgtacttgagggttgatggctagtggtggaattgctgggtaggttggctcaggttttccagattttgtcaattgctctcaaaagcagctataccaatttatatccctaacagcaaagcatgaatgtaccactttgatattgatggacttttaaattcttgctaatctgaaagataaatggtttctcgttgtttcgattttcacttccctcattcctggtgggtttgagtaagttttcctatgtttgtgtttttaaattttctctcctgtgacttgctgcatcatgggctttatcagttcctggttggttattgtgtgttggtattgatctgtagaaattctttatattctggcagtggcctgttgtctgctatgtgttttgtaagtatcttttcacattcccaggcttcttgttttgtcttttattttatggaagtttaaaattatgaccttttcaaattttttaataactttacttaggtgttttgcttttttttggtcttaaaccttttcttacccagaggccatacagataaatacctttatttccttctaatgattttactattttgtttttaacctttgtgtgtaatatgtggtagtgataaagctactgtactttaaatatatatatttttaattatgaagataatacattatcattattttaaaaaaaacactatactgtactgtcaacactcagaagccacacggctattattttagcttttttttgtgtgtgtatcttctacccctgccccatgatttttaagcctactttgtacatataggtttgtatcttggatttgatataaagatttaaataaacatctttttgaattgcttatttatccatattctgatgtattttgta

SEQ ID NO: 89183 - DNA, 1047 bp, Homo sapiens
tgatttatcaatttaaactactcttgttatggaagaaagacatttagtattatagtctcaccccaatttttcctatccttatccccaatataattatgtcacaatttaaattcaaatcggtattgttgatgttgttaagagaatgtagataatggtttgttttcctgagtctagttgtgattgttcgttttgtagatctgtttatttttgttgatgttacttgttaactctttttccccccaatttgcagagccgtcttaatctatcgctgattttcccttaggcacatgagttgaccacgctaagggggggtttccaaaattcccatgccattgtcttctctcttccagtgctgcttttgagaagtctgttgaccatcctgatggcagttactgttcatggaccagttttttctggagacttttgggatctttttgtatttttaaattttacaaagagcatcttggagctttgtttttcttctcttgctgggagcagtcctatcagtatggaatatcttacccttcatttctccaaaatatttttatattatttctttgataatttgtcttcctattattttcctttctttttggaactcctattatgtattatttctctctcgtttttcaattctttttctttcctttctatctttctgggagattgctctgactttactacaatgctttgatttgattttttaaattttggcaaacttatttttaagaattcttttttttttcttttcttactgttactgtctccctcaaataagaatgccttatcttcctttccaggaatattgaagataaataagtaactctaaggtgtaaatcaatgaacttgactagacactgtcacaaaactcataacaatagtaatcttaagcagttttggtgggagtgacagaaacccaattcatgcttattgcacttgctgctaccactagcaaggtaggagtccccatagagagagaagccctttttttaaaaacaaaaacaaaaagaaaaaaacaagaattttggtatatatgtagatatatat

SEQ ID NO: 89184 - DNA, 1032 bp, Homo sapiens
tttttaaaatgttacctggaagtagaagctccattagaattccaggaggttaaaatctaataggctgaaccaataatttaatgatggtagaattgatgtaaatagatttcactattgtggaagaatgtgaatgctcgtttatggcagggttgccacagtgtctgccagggtattattaggtgttactttaaaggattcagtggggttgtcagttgttgtaccctttatggtctcattttgaacagttaaaaataaagatttaatttgtgttagtaattcttccttgtgtcactgtaaacctacacattctactaagagaaagtctgtctttcagctgtagatgttctttcttaaatgtatgtcaaggtgggtgatagttttagacccttctaaaaattcaagactgtgacatattgatctcaatttaatatcacatgtgcttctataaaatccattctagtcatttgcctaatatgtttatgatgccacaaatcaaaacactcttgttttattttaattttttaaccttgaaggaatttttttagaagaactgcctcagcatagttgatgttttaattctacagtaaaagtctcattaactattctttagcatgaatgagtcttctgaatagtaggtcaattttagaagtttaaacattttaaaagcttctgtaggatttgtgctggttgaataagttgattgtaaaaatgttcactgaaagtttgttcaactgaaaggaaatagacatctttaaattggtgtatttgtgtgagtgctaaaaatttgtgcatatcagcttgttttccctggggtatgaataaggtatatgtgtggatgttgagcttgattaggaggaatgattacatgggcaagacaatctttccccatagtatcctgcaaccaaaaaaaaaaaaaaaggaaaatcctttcctcctctcaccaagtcatagtttcaataaagaccaaagaaccaatgcatacttagattaaagtttgcttacttttatgaaactttgaaaacttttcatagg

SEQ ID NO: 89185 - DNA, 1114 bp, Homo sapiens
gatgaagctggaaacgatcattctcagcaaactatcacaagatcagaaaaaccaaacactacgtgttctcataagtgggagttgaacaatgagaacacatggacacagggtggggaacatcacacactggggcctctcgggggttgggggactaggggagggataacattaggagaaatacctaatgtaggtgacgggttgatgggtgcagcaaaccaccatggcatgtgtaaacctatgtaacctgcacattctgcacatgtaccccagaacttaaagtataataataaaaaaaagacattacattttatactactactaataagcaagttttggatttgggttaacatagttttatgtttggaaagcagacaattggaaccattctcatgctggtttagtgtgtcttgcaaccctgtgacatagcactttcttccggttaacagccactttctgtttaaacacagcttcattccctaatgggttttggtctttagggattaaacccatgaggaccattaacctgaggaatgtaactcaattagctgtaaatgatttggaataaaggaatagattttctatttggagaaattggtgtgttgcttttcttaattttggtcttcatctaatgaatagtaaatgcactcttttggtaaataattcacctttgttagaggtaccataaaaaatcattttaaaggcctggtgcggtggctcacgcctgtgatcccaccactttgagaggctgaggcgggcggattgcctgagctcaggagttcgagaccagcctgggcaacatggagaaaccctgtctctacaaaaaatacaaaaaattaggtgggcatagtggcaggtgcctgcagttccagctacttgtgagactgaggtgggaggatcgcttgagcccaggaggtggaggttacggagagccaaggtggagctaccgcactccaacctggatgacagagtgagaccctgtctcaaaaaaaaaaaaaagatcatcatttttaacagttttgttacctacaagttgtataatttaaaaagttgtttccaggaaacataataatgcatataatgcttctacttagcatctcatttcttaggccagggt

SEQ ID NO: 89186 - DNA, 2088 bp, Homo sapiens
gggtcctaggtcatcctaaatttgttatttagtgtttttaattattagagacattgtaatttacttaagatcaataaaacttattaaactggatagcattataggttactcagtggaagtaatttcaaagcatttcctagcatttggctagaaaagtcatttttataatatctttacagtggtatatttaagtagctatatgaagtttgttactatgacatgatatcttgattgaatactatggcctgtttttatatatttgaggcaagtgttaatatgattttactgaaatcttgttacgtgtattgccttcctgataattaagttaattgctcagaaattatgacttctaattatagtgcaattttcagtttgactcataggaagagaaattggacattattttcatttgaatcaagagaccaaaggtagagaattaaaaggtgccttgtttactgatttgaaaatatgctttggaagtctttgaaattcatttcctacccagttcccttctctgattctcattttaggctcattttcctttcatgaatactaagttggaattctgaaaggtattttaattgtgaaaacacaagtaaattggaggtgattataaaacatattcaaatagttcacattttacttcattttgatagacttcttatatactgtacacttatatactctgacatcactaattttcaacaattttataatgtttcctgggcctgcttatttatggcttggtcttttagtctgtaatgtcattaagttagtttcctgattagatttttaagatctgtttaatttcctgcattcttccttccttgatttcttcatttcctcctgattccactttccccagtgtggttcataactctcttagggttcctgtcatgctttaaaaaagctatatagttattattttaagtgaattacacagtgcattagcagatgacaaggctgatagttatcttttgttagatagtgttttcatatcactaggttcagagtctactttttgaattatcaactagggttaaagtaggctgaactaatgatctggttgttggaaaagtccttctgatgttttagacagtttgtgcctttgcaggatcttggttctttacagaggaagccagatggccccttaacttttggcattgcttggtaaacggcagacactcaataaacatgtggataaacatgtttccaccctgaacatttttagtaagatcattggaaaagtcagttttcatttaaaaatgtttaaccttgatcagtattcaaacacaaagattctccagaaataacttaaaattgttaaactgcagagtggaaattgtaaagacaccttttacaaagaatttcttgtcagtttttagtatttgcatctgcaaagcttgagttgttagctaagatctgaaatagatctcctgtatgtgatcattgtatttgttgtttgataaagtggggctctgaacacagaattcttgcagactctgtcagcttataacttgaaaagtagaggtaaggatattatatgttagtaataatttgcactgcagatttccttgagttcatacatggttttgaattattgtcaccatggtcaaatagtactttgacataaaagaatttttttttttttaaacagcctggcacatccttgacatttgttattttttgtttttaatccaagtaataccttccttagtcctaggtgtagtatgaataatatttcatatataatctggcctaactttggggtttacaccattgttattgaagataacatattttcctttacccacatggatgagtaattcttggggatttattgaacaagaggctagatgtggaaagaagaaaaattttcagcatcagaaacagatacttagaagattatcataaattcttagaaattcttagaaagagatacctgattcacatatctgtagttattattgagtggtgcattaagattttcacttttgtccatattatttccagtgttccgtagataatatgggaaatcattttctcttctgtaacttttaaggatctcttctggctttctcctcctct

SEQ ID NO: 89187 - DNA, 2539 bp, Homo sapiens
gaaggcaagtcctggtataagggacgcacataggtccgcgccacatcctgacactgtttccacaggaagtgcgggataggaggggggattcattaatccaggtcggaaatacaccttgttcctcgaggattttggaaggaaattccacccgcgaagtccccttttggagatgcccttttcctttcaggtacagcatccttcattatgtacccccagggtacaatgtatccggggctcgcaacgcgtccctcaacccccagcagcgcggtcaccgcggggtccccgggcgggcgggggcggcggtgacgcaggaggcggtggggccccggtgcggcgggcgcggggagggggctgctgggcgcgggcctatcaggacgcgcggtgtttcgggcgcggggagggcggggacctccaggtttcctcggggcccggcgcagcgccgcctgccgagttccgagcgagcgcgcgaagcgcgcaggggtctcgagacgttcccgccggtcccggttttcctccgcggctcccccgccccttcacgtccgcctctttctccaaccagacgcggctccgacggcgctcggcctctgctcttccggctccccggctctgcccgcagcgcgcgtcgcccggttgctcttcgcctggtgtccgcgggcccggcgggggcgcctcaccccgggcgcgcggcggtaatgccgctgccgcccttgcggccaggcaggcagctggcggcggccggagtcggagcgcgttcgtcgctggccgggacgccgccctggcctgtgctcagctcccgcggcggccgcggggcgccggggcccggcgcggcatgaggaggcggctcggtgcaggcgagcgcccagctcctcggccccgagggcccccgcgggcccccgcgcgtggcgcgcgctggttgcggccccggcgcccacgctagccccgcgcaggcaggagacgccgcggcccggagtaggaggcggcgcagggcctgccgagcggacgcgggcggcccggaccttaagcacggggcttcgcggcgggaccccgccgggcgcgggcagcggagccgggcgtgctgcagttagctgcccctctccgcaggggcgccgcggcgcgcagcctgcgcctcctcccacctgcagcccctcctcccgccgctgcttggcggagaaaacgctcctcctcgcccttccccggctttcttccgtcctgccgtccccgggcccctagcccccagtcccctctcccccctccacctcttgtccctcggcctccgcgcctcccctcccccgactctctggcctcccattcattccgtccgctccctcccatttcctcttttccgctcgggccctctccccagagcctccccgcgcggaccccgctgcagtctcggggttctcagcacatttatggaagtttagggcctggacagtggccccgagtccggcctgagagcgcagcctgggctgctggcagggaagaggaagatgtctgtgctcaggcggatgatgcgggtttccaatcgctctctcctcgccttcatcttcttcttctccctctcttcgtcctgtctgtacttcatctatgtggccccaggcatcggtaagcaccgagacacaccctcgcttcccctggtcacaccacagccagcgcaggctgttatccgatgttacttctgggatttggaagctgttcaaacaggggcccgcagaaaagcgttttgttttaaatgttatttcagacgtgtcaaactgcttcagggcatggctttggtatgtgagttttgttaatgcatgcattttgttaatgcatgtttgttaataacgtaaaagattgcattaaatagacgtagcaaaattagtgtgatggcccgggatgccctagtcgctttcttgagtgttcatgacagctttatccatttaatgttaagtctttaagcctaaactgagtgcttaatcgtagttttattcaaacactctcgggtataataactggttgtaaaaatatggaggagccagcagcagggaatgtgattgagtccaacaatgtgtgttttctagggtcctaggtcgcttttttagaatggggtcagtggaccccattctttttgtgccatacttggggaattttaaggcgatgagttgtcttgtaaaaacaatgctccattattttagtctgcttgggtgttattttcaagggtacgttgcctttgctacctgttaggatgacttctgagaaaatagtgattaaaataaccgttatctaagggaacttgtagtttaaaatgttaaccggtttatcattttttggcctttggtgcaaaatacacttttgtaaaactgcttgaattaacttctttattaaatatccgaattcctcgtcccccatttgttgaaaaggagccaatgcggcgttaattctagtgaatgagaattatgaacttcacatgcatattaaaatatgtcatatttccaaaacttttctgagtttttcctggctattacgtatttaatgttcaattacttagtaacagtga

SEQ ID NO: 89188 - DNA, 1374 bp, Homo sapiens
tgatccacctgcctcagcctcccaaagtgctgggattacaggcgtgagccaccgcgcccagctgaaagggatatgttaatgtgactttgggaaaaaaattaaaaagaaaaaaatcctgcaacttacattttcctcctcccttagtccagaagcactggaaatccatggatcattcacatggcttggacaaacacagtataaacttcaacttaaaagccaggagattcacagtctgcagctgaaagcatgctttgttcatacaggtgtttataaccttggaactcctagggtatttgccaagttatcggaccaagttacagtgtttgaaacaagtcagcagaattccatgcctgccctgatcatcatcagtaatgtgtgacaacttggaaatttgtactgaaatccacaataatcagtttttgctggatgggttttacagcagtatttgatatacctaacttgttatggaggttgattgatatctgatccctgcaaaatactttgacttgtcattttgttgatgatgcaaagcacgttggactgagaatacttaacattctttttctgtatttctttaaaccctgagaataatttacatgctcataatacaggatatcagcatatttgtgcaccttattaagccccatcttaagaaaacacaaagtctaagtctgctgttacaacttgtcaatggtatacgaatattaggagatgattctgagaaaggaaaggccttgttggcagtactcctgttaagccattagtctctaaattccagctttactgtgaagttctatagagtgttaaatacaaattttcctgtcttgcttcacacagttccttaaaatcagttttgaactttggtcatagagtcttcatatttcagtatttggtggtccctatgacttatacataactttgtaaaaagaaaaaaaaattttttctgatgctttgaatatagttttgaaaggagttttgacttttttcccctcattcatctcagtatagagtgcgctatttcacaatacgatttttgtcattaaaattaccatattctttattatataacgttaactattgagttgatctgtttaaaatataaatctcaagttaattaaaaataagcttttcaaaaatgtattatatttataacaaatatactgtaaatagaataaagacatgctattcactgtatagcgtattagtatctgttgattagaaagtctggtttcaaaatatttttttattcagagaatgggcatttggacataagaaatttcaattcagccctgctgcagatagagaaatgggagcaaggttgtttcaatgaatatctcttgtcattggagaaggagggaagacagggtgtaggag

SEQ ID NO: 89189 - DNA, 2054 bp, Homo sapiens
aagagcactggtgaaggcagaaagaaacacatttttcattttgatgaacctggttgaataaatagaacttgccaagcactacagattaatgagaaaactatggggacagtgttttacaagaagttcgctcataaggagaaaatgtatatattcatatttaatacttatttaataattaacttgaagtttaacatctacatgatatatacatagcctgtaatacaggaaaccataaatataaagatgttattatgtggcataatattcattagttaagggaaatcctgtaattgagtccatttaaaattcttatctcatgctttcattgtttaagcctgaaagccaagttaatgctaataattctatttgcattctgcttcattggatattgccttggatttaaatgagaaatatttctgtcattttaaaatacaggttttcaacattttatttttattttcttggtgatacccattcattctccctagatacttggaaggtcaaagctaatgttatgggagcgtagtttaattattttggggtgacggctttaagattcagggtaacttgcagctgggtgcagtgtctcacacctgcaatcccagcattttgggaggctgaggcaggcaaatgcttgagctcagtagttcaagaccaccctgggtaacatggcaaaactggcaaaaccccgtctctacaaaaattaggcgggagtggtggcacgcacctgtaacctagctactcggaaggctgagatgggaacattgcttgggcccaggaggtagaggttgcagtgagctgagattgcaccactgcactccagcctggatgacagagtaagaccctgtatcaaaaaaaaaaaaagatttagggtaatttgtaccaaatcttttgaatgttcaagtggcctccctgtattcaactacattgacaagaattattgaataagtattttgggtatgtataagctatagaaataaaaattttggcaggatatatttaattaaaactgagttatacaaaataaattttgacaacataattaaaagcatttatgaacacaagtgattttcttttaacagataataagttcagcaagcccatgtgcagacttcttttatcgaagtttatcttctgaattgaaaaaaccacaagctcacttgcctgtgcatacagaaaaacagtcaacagaggatgctgtgagattgattcaaaaatgcagtgaggtagatttgaatattgtcatattatggaaggtatgtgctactaaattatttcagcaagcctcacttatagatactcgagtcttaagctaagcacaaacgtatattactatttatattttttatgcttatcttttctagtttcaatattgaaactttaacagttacatatttttttttggcctaaaaaaagaattcattcaaattagataacattcttctgtgttactgttatttctgtgtgttaccgagaatattgtagacatgataagctctgaaagcaggtggtattaaactgttcggggcatttccaaacattctacagagggaaaaatagcaccatgaacctctggaaatccactaccttggctccaaaaaccattaattttttgttattcatatttcatataatccatttaccttctcttctcttttattgttaatttttttgctgtagtatttttaaaatgacatatttcatctgtaaatgcttttatatgtacttttaacagatgaagacttttttgtttaatataactgcacagtattatctttcccaaccaaattaataattcttaattatctaattgatggtctgtgttcagttttttccagattatttaaatatactattttaccctgttaaaaaaaaatcagatccaaataaggttcacacatggcagaccagaatgagattatttagacattagtattccctaaagttaactgaactatactgcaaaggagtcttaattcttacgttacacccttttgtatcatatgcatgtactacctatttttaaaaattattctgcagtaaaattaaggatc

SEQ ID NO: 89190 - DNA, 1031 bp, Homo sapiens
aaatgcttatggactataccattttaagtagttatttaaaattaactttcttttgagactatcgtatgaagtaagtatagttcttgggatattttttttaaaaagcaagattatatgagggagcttttctattagggaaagtggtcacaatggaatatatagatgataaccctctgaattttggcataccgtatcatatcatatcatattctgagacccagataataaggtagatacataagactccattgtgattttaaagctattactctctagggcagtgatattccatcctaattatgtataagagttacgtagagggccagatgtggtggctcatgcctgtaatttcagcactttgggaggctgaggcaggaggattgcttgaggccaggagttcaagaccagactgggtgtcagagaccaaggcaagaccctgtctcttaaaagaaaaaaaaaaaaagagcctcctagaacagtggtattcaaagtttcaaaatgtgtccaatgtaaattatcagaaatcttgttaatatgcaaattctgattccacaggacttgggtagaacctgaggttctaaattgttacaagctcctaggtgaggttgacattattagcctgcagaccataattggacctagattttgtaaaaatacaggctttacctcccctacctctaaagctctggttgattatatcttgggtggactttgggagtatgcattttaagctatccctgaagataatctgaagtagtgacctgctttgaaaaatgctgaatctggggtgtaaaagttcatataattgtgtgctattagtgggatgatttcttctttctgctcgtctccttgataattctaaacatccttatatttttgtacttcttttatcatttgctttcatctgactcatcattatctttttaccatttgaggaaacagctatttagaaatatctccaagtttcaaaagctcagtaatttcaaaatatgcattactttcagagatactgtgcttcctgaatagttgaa

SEQ ID NO: 89191 - DNA, 1301 bp, Homo sapiens
cacttaagatcacttaaggtcaggagttcaagaccagcctgaccaatatggctgatgaagatggtgaatatgattgatttttggggggagatcaccaaagtacagcacattaaccctaaatatcctagaaagcagacaccttatgatgaagatgatgaatatggcgaaaccccatctctactaaaaatacaaaaattatagggtgtggtggtacatgcttgtaatcccagctactcagagactgaggcaggagaatcgcttgatctgggaggcagaggttgcagtggtgagctgagatcaccccactgcactcccacctgggtgacaaagcaagactctgtctcaaaaaaaaaagagagagaaagaagcacaatcagaacattaccatatgaagattatttttatgtgttatacagatgaatttgataagcagggcaaaaacttagacagggagactagtagtttccttccaaattggatagaaagaattgaactgaagttaggctaactatgtaattttacttaatgtattctatggatttttagagtataaatggtcctgagagtgatcagtttttaaaatctttatttggaattagataattataacatagagactctgtgcttaaatgtgcttttttttttttttttaacttcaggcacagaatattaagacacactgcaattatttgtaccagtcggtctttaaatgtacgggccactgtctgcagaagtaattctcttgaaaatgaagaaggcagaggaggcaatatgctagtctttgtggatgtggaaaataccaatactgtaagttggtttaaaactgaattttgtttttaattatatttgaagtgtttcccttgtgtttagtagtggtttttgttttcctttacaagacagcataagctagggattttaggaatgttcatgtagaatagtatgaaatcatcttaattcttcattagatttgtgattttatcccttagtctgtcttcaaataaaaagatcttctgatattaatatggtacacactgatatgctatatagttccattaattcattctaaaagatctcataaaatactttctaggtctcaccattgagatccattggtgttactaaattgtgaggttctgttaatatatcacattcaatattaacttggtaatcttcacttgcacatttctaacagtgccatttcctttatatagtaaatttctgaaatattgccattcctgtttatgcactctaatataaaaatgaacatttttttttcttttttctttgtagacaggttctca

SEQ ID NO: 89192 - DNA, 2940 bp, Homo sapiens
tatgggagattttaaaggaggtttaaagttaagtgaatattttcatttgtatgatgaagtgtttcttaaaataatatttttctataaattgcaaactctggattttttcatgactaagaaatgaagaaaatggactaagatggtgatggactaagatgctgaactggaatgtagggagttttttgtttcttgtgctaaataatgtcatggtgaaagtataatagcgtttatgaggatcaggtttatctccagtatgagccaattagctctgctttgctacatgaccagagaaatgtcattgctttgggggaaacaggcctttttcccttctctcccactgctgttattgtctacctgtctttctttatcatgcttagcccaccattatcttttctatgtaattgaccaattttgaaaaagaggctggtcagagcaaaagaagaaatttgctattattgtaagattaaattaaatgaccatttggccattgttgactatgagcagctaggtattttctctcagggttttattatcttggtggcggtatctttgatatgctcccgttttgaaacagagtctcgctctgtcacccaggctggagtgcagtggcgccatcttgactcactgcaacctccacctcccgggttcaagcggttctcctgcctcagcctcctgagtagcttggattacaggcatgtggatagtggcatctttgaatcgattgcttatccttctcagttgaattggactgaacaaaatgaaaaaaatatatattgagtgcctactacagcctgggtctactctagttgtggaaataaaaacactttgtgtagagctcagcatgtggtaaaaaccaagtaaatgcagactttaattagtgttatttttttgaagtattgatatataggagtgttaataatctgatactttgttcattggaatgtataatttatgaaatttattttttaggttacaagtgaacctgaaatgattggagctgaagttatttcagagttcttaattaatggcgaagaatcaaaagtggtaattattttatcatttctctgctttatgcctttctgaaagtaaggtgaaaacaaatttttaaataatctttattcagtttattttatattctagttttcttaagaactaaaatttggaagattaggacataggaattgctcaggaggaaattggtggtttgcagtggtctttgatttgttagtttcctgagaagcctgttgctttcttcttgatatgctttttatgaaaagttattattgagggtttaggcctataattgttaaatttagacattttcttttgaagaagatgcttttcataaattaattggcattttaaaagtttaggtcatgagtttatgtttttgcaacattatagaattaggtattgtgctatttaagatattatgaaaacataataagactgacttaaatatctccacaggcaagactaaagctctttccccatcacataggggagctgcatattctgggagttgtttataatcttggcactattcagggctctatgacagtagatggcattggtgctcttcccggatgtcacacaggtaaaggctatagcattggtaaacaattagaaaactttcttaaatcactccatagaataaaatggacaaaaatgatgtattttctaaataggtttaatgtatcgttaagtaaagacatttagccagatgtaagaatgacaaatttagattattttaacttctaacatcatctctagcgtcaaaagtaaacaacttgattcccttctgatatattttcttttgttaatttttagactgtatttttttctgtcactgatccaaatttagtaaattctaaccaaataaattctaaccattgattgtctgctgccaatataaaaaccatcttaatatgttcttttttttttgaatatttcctttttataaaacatggaacaaattaaagacctatgttttcacatcactggatattaaataccttaagttctatcttctgtcttgaaagagtagggctttagtgttaatctgatattcttggtgcactatacagtatgttctacacatttttgaagaggaaaactacacgatatgtgcatttaacatagttttctttgttttttaaactcagggaacccttcaagatttaacattaccatgtaattactgtgtgtagttatttgagttcaagttgaaaagatgctaggagagggagtttaccatgaaacttcctacttctggctcattttaatagatatgtcttattttacaacaaattaagttgaatagtccttgacaaacatgaatttagcatttacaaaagctgattattaacattgagaaagtgggaacacttggaaaatttgttggttcttttaactttcaattaaatatacttgccctgggtatctaggataattcagtacaccatttaagaaaaataagtgaaatgaatccatagaaactaaaaacattttactaaagaaaaaaatttgcactaaaattgagtaaggtattctgcattttagtactgtatttgtattttttggttgacaagaaccagacaaagtttatttataatttatataatttataatttaaattatttataatttaaaaatgctaatttattgcatttttaaagcaagataactggatattaacagctttttgaatctcctttcttttcccacttgtatgtaactaggatcttaatctagtacacaaatttatggttgtcagtaaaatataggtagttgttttatttaaggcaccaaatatatgcattaaaaaatactttatatgttattgtataatattaatgggaagagactgaattaactgttaaaatcctatcttctaagcagagttttcatgatttagtatagctcattattatgtaaaat

SEQ ID NO: 89193 - DNA, 1036 bp, Homo sapiens
tttgccaccaagaaaatatgtctgtataacaaaacataacttgtaccccctaaatctatacaaatatattttatataaatgcatatattttaaagctctcgatggctgttaaactttgtcattctaaacattcttatatttgaatttaatcaacgtttctccttgagatacgatttagtattttttttttaaattgtcatattcatagtagcattgtttgtagtagcaaaagagtgaaagaaatagaattcctaatagaggattaattgatatggttttgtatattcacataatggattcatgctgcagtacatgagaattcatgctaattctacatttcccacaacttgatgctgagtgaagagtcaattacagtataagtttcaaacataaaaactaattttatgcattttttagatatacttatgtggtaaaatcatggatgaaaatgatacactttaactttggaatacctctgggaagaagtgatgccagtgggggcgaaggagagtaataagattgggggtggtgcagagaggacatcgactctatctgtgatgttttttttttattaaaaatatttgggatcataggtgaaagttgacatttgttaaattttagtatacaaatatttgttatattagtctccatgccttttctgtatatttgaaatgttttatataaaaattgcttgtggacacgagggaaaatacattctttcagagtcaggaggaaaagaacatcagtattataagcaaaatccagataagctaggattaatgagaggatatttttcactcagaattagaaataggcaagagtgaatgtatatatatatatttttttatttctgtaccttatgtctatttaaaatatgttttatttgagggcaagtcttcataaacgtgttgttaacaaattttttttaggtgaaaaacaagcagctactcatgtaagtcttgatcaagaatatgattctgaatcctctcagcagtggcgagaacttgaggaacaagttgtttctgtggttaacaaa

SEQ ID NO: 89194 - DNA, 1028 bp, Homo sapiens
aaaatatatgtgtatttttaaaaatgcatatgtattaggcatgtaaacacatgcacatacatatataggaggggtgacatgacacaacactattaagctgtaaagaatagttactctggcaaatgacatgaagcatgggctaggaaagatgttcacttttttcttcaaacatgtattctttttaaaaaaattagtttgtattaataatttctaaaaagaaaacatttttctaaaaaataaaataggctcccaagctcccctaagtatttctgacacaaacccgtttttaagaaccactcattaattacatatttctgacttttttacttactagcttttggatcttaattactagagcaatcatctaatcatttagtttttgtcaggaggaggatgaaatagataatagctgccatttactgaatgctttctagatgatttcctcgagtctgtttcagctctagtataattctatgattgacgcagagacagtttatgctaatcaatggtctgtgaacacttttgatgtaactataatttgttgagattatcgcatttaaagtcaatgttttctgttttcaactttccctggggaaaataatggcagcagaacacatggaagggcatggtaagttcagcttgagaacagctaaaaacctggagaaagttttggtgaaaatgttgttgatatttaatcagcaaccttcagtactttctcagttatctgtaaagtgatgactctttcagtcaaaagatttgtcttaagggcagtgacgtaatgtagtatgtggttttgtagatgctgtactgtaagattcagttgaagtggaaacttacttgagttgtattctttattaatgtaataataggtgaaaagaaaatctttgaagtagaagcattgtgaactttttaatgaaatgcagtcgatttggccctctagaattatagcaaaagttgaggattcctttaaatgcagtaaaattttacagagaatgaaatagtagattagaatatttcataatctatgt

SEQ ID NO: 89195 - DNA, 1059 bp, Homo sapiens
ggaaccagttctagcttttttgcatgcaggagatatgactttgcattgtattcttactgccaaattacatgataatgaaaagttttgatgagttataagaagtctttgaagatttttttaaaaaacctttttggtaggtgcaaaacaaggacatagacttcttttcttctttttacagtcagccctatgtatctgcaggttctgcatctgcagattcaactaattgcagattaaaaatatttgggaaaaaaccaacaataaataataacaatacaaaaatttaaaatacaaataaaaaataaagtataacaatgatttacatagtatttacattgtagtaggtattataagtaatatagagattatttaaattatataagaggatgtgtatgggttaataggcaaatgctatacaattttatataaggaacttgacaaaccttggattttagtatcctggagggtcctggaaccatctccctgcaactatcctctaaaactgtaattggaatcttttgctgaacacatttactttgatgtgctaaggtattattgtgctattttatcttcttgtccttttttctataggaatatggtgttggctgaaagatgtgtgttgcttagtgctgaacttttaaaaagccaaagcaaatattcagaggctgcagctctcctaatacggttgaccagtgaggtactgaaactgtgtagtatttgctttaattagcattgttcttttttttttaaaaagatgtatcttttttcttgaaaggctttacaaaacataaaattagccagggaaatctgtctttgggaatttacaacatggctattttagttttttgttgagttaattttaaatgtaattttttataaattaagtttatttacatattttaagcctacatttcattattaactacagacatgtattgagcatactctgtgacttattacgttttgtcctttgaataagaatattgaaaacaatatgcatgtgcattgttcctaatataaaatgatattttattttttgttactcatattttgttatctgag

SEQ ID NO: 89196 - DNA, 1010 bp, Homo sapiens
tgcttcatcgttacatgaaacaaagaaaggaaatactggaataattcatggtgcatgtttaacacttactgatcatgatagaattcgacagtttatacaagagttcacatttcggggccttttgccacatatagagaaaacaattaggcaattaaacgatcaggtaaggtttgattttttggattagtattttaaaaatttaagtaaatagtaaatttaagaattattaaacgtatttgaagttttgttttattttcgttttaagataggccaatattaagacttcccaaaattactatcaatgatgaaattctgttcaactctagaagaggcttattcattttcaataggattttgccagcatattggacagttttctttaaatcagttttattaaaatgaacatttgctattaaagctttttagttaaaatttttttatgtaaaggaaaaatactaaattctttgtttgtcaacatatttaatctcttttttaaagctaatatcaagaaaaggtttgagtcgatctctattttctgcaactaaaaaatggtttagtggcagtaaagttccagaaaagagcattaatgacctgaaaaatacatctggcttgctgtgagtaaagtgttatcatttttgtttttcctctgtttaactctctgactagtgtttgattgtatatcctgcagaagataactatctctttaatttcttagtttcttattggtgaaaattcaggtggataagaagagtgactcaagtaaatcatattaattttttaaaaactaagtaattggacatctaaaaacaaatgggaaagtcacttttggtctgtttccttatttgtaaaacaatgaagttagactaggtattcattagtaaccattctatatctaaaatgtaatggcctgatgattctaagacaagggacacatttaataaattttgctttacacaaaaaaccattttaaggaaaaaatataattaatccattttggattttaatctttc

SEQ ID NO: 89197 - DNA, 1022 bp, Homo sapiens
ttcatatctgtgcctctcttctttccccgtctgactctagtagtccatctctcttgccattattccttacttaagaggcataagcatatgtatgtgcttatatgaacactcgtgtatatacatatcatatataagtagatatcctgagagataatttgaattaagaagaattaggatagtagcttgagtgtgaaaggggatttaagaatatagtaggtgtgagttggagtgatagaataagatccatggaagaagttatgaatttggaggacgagaaaatgctcactgtagcaaataaatgaggccaacagttagcagagtaaccatagttgttgatggatttgatagtatattaagtatgattaagtataactgctaatgctttttaaattttattttgataggaatcatatgaagatggcccttgtactataacttcaaataagaattctgataataacttgctttcattggatggattagataacgaagtcaaaggtcttgatatattttctctaagtttctcttttgattgaaaatatgcactgttgtcagatcatgctaacctttatagataaaagatgggggaaatttttcataatacagaaagatattgggcaggttagtttttcttctgaagattttactgagctacttgagtttgtttttgacacttaaaaatttgttttatatgagtagtgtatagatttcttttaaaatattttgtagaaagcaagggaagatgtgatgcacagcattaattatttaaaaatttacatgattttgagagctttatttctgactttatgatttttgtaatgataacaaattttttttgttatattttttcttacggcttagttgtactatttaaaagtcattctttatattatttaaaataaagtatttttctccatttcctggtttataccgattttcaaattactaatacaggtaccaaaacaaatattaactcaagctcattaattttggggctgggggatgttactgctgttttatct

SEQ ID NO: 89198 - DNA, 1025 bp, Homo sapiens
tttggttaattttaattttgatagagatagggtttccctatgttgcctaggatggtctctaactcctgacttgaagtgatcttcccaccttggccttccaaagtgctgggattatggccaccacgctgagtcaaaacacttgttttgtttcctgtagttccccccgcaatctagtttgaccaccagagctctctctttgaataacgtagaggagtgtcttgcagaattttattccacggaacacactttggtaactgctttaaggtggtatctaagctagctaaatttcaattgccatcatgatttttgttttcgcttttaggttattctgtcctaattttctagaaggataattcttatgtcctcttttatatttttccagtctaaatatgcctttttgggggattattttaatgttatttttgtactactttagtctctattattgcctaaggcctgctcctcttttacttcagatttttttccattttctgttttagagctgaatcaatttatgaagaaatgaaacagaaatatggaactcagggttgctatttacttaaaattaattctcgaacatctaatcgagcatcagatgaacagataccagatccttggagtcagtatctccagaaaaatagtattcaaaaccaggtatatgtaaaaaataaatgaagcaaaccacaaaaacgatacttcagtttttacgttttggtttaactagtataattattcatattaattgtgtggaatctggtcagttttgatctgtcagaggtgagctcttaggtcagtggtttaaaagctgtttttaactaactgcagtaatcccttatgtgcactcttttcaggtgtgtactatcagtgtgaattaatcattttcttttttttttttgagacagagtcttgctctgtcgcccaggctggagtgcagtggtgtgatctcagctcactgcaacctccgcctctcaggtttaagtgattcccctgcctcagcctcccaagtacatgggattacaggcaca

SEQ ID NO: 89199 - DNA, 1021 bp, Homo sapiens
ggaggctgaggcgggcgggttacctgaggtcaggagttcaagaccagcctggccaacatggtgaaaccccgtctttacaaaaaatataaaaaattagctgggtgcagtggcttgcgcctataatcccagctactctggaggctgaggcaggagaatcacttgaacctgggaggcggaggttgtgttgagtcgagatcacgccactgctctccagcctgggctacagagtgagactttgtctcagaaacaaacaaacaaacaaacaaaaacctcctgtttatctcagtaggacaatatttatcattgagtaataagcgataattaccttaataatatggtttacaaggtatgttggtagcgtcatctagtgaagctgaacctgtggaacagttttcaaagttgtcacaagaacagcatcgaattcagcacaacagtgattattcctaccccaagtggtttataccaaatacacttaaatactatgtacttttacatgatgtaagtgcaggagatgaacagaggtaagtttttattttagttttaaattttttccagttaaatgatttaacattaatttggagatagcttgtttacgttttggatttatttttgatacaagaatgtaaaagtttaatgtgaattttattaataaagcatttaactttatgttttatcctggcattatattcaacagtcaagttattttatgttagatttcttttttttttttttttttgagacgaggtcttgccctgtcacccaggctggagtgcagtggcacgatcttggctcactgcaacctccgcctcctgggttcaagcaattctcctgcctcagcctcctgagtagctggaattacaggtgcccgccaccatgcccagctaatttttttttttttttttttctgagatggagtctcactctgtcgcccaggctggagtgcagtggcacgatctcagctcactgcaagctccgcttcctgggttcacgccattctcctgcctcagcctcctgagtagct

SEQ ID NO: 89200 - DNA, 1144 bp, Homo sapiens
aaatcgtgatagtagttgctctcctaatcagactatatgtaatatatgggtcattctcatgaggcatttgctggagttaaaatatctgtatatttggcaccaggttagaatgctatttggttaagatgaatggctttgtcctcagcccttccagttgtttaatatagtattataatataagcagaaagaatatatttgctgttttcagtggttaagatgaaagcaaaaggaatataagatttgatatatcagcataaatcagcattggaatggagtccttttagtaaaactgtgatatagataatctgcttaaaacctagtgaaaccactaagttttacgtaagttcaaataaaaagaataattgtgatacaaaatacttgatgtggaacaagagagagttgactttttaagaatcacattatatacatttatacaaacaatgaaaatacacttgtttgtatttgattgtaaggtaaatgtacttcgaaatttcatttaagaggctttgttactgtcatattcaagtaatcaaattacaaagtaagatttaccagccatatcaccatttacattttgaactagataattctttattgtgggggctgtcttgtcttgtcttgtcttgtgagatgttttgcattattcctgacctctttgatgccagtagcataagccacctaccccagaactgataacgaaaaatatcttgagacgttgccagatgtttcctgggggtcaaaatcatgctcagttgagaacctctatgctaagtgttatttttgaaaaagatctacttatggcagtgtgactagtggcagggtcacagaacttgagttctaaagaaataatctttttactcatgtaggtaatatttagagcattaataggtaagtaggttgtgggaacactaggtttgggaataattcaattttatttttgcaaatatatatactcatgaatatatgaatatattcttgtgtgaatatattcttgtgaatggcttaaaaggtgtgtgtacatatatactcagtttattattattattattattttgagacggagtctcattctgtcacccaggctggagtgcagtggtgtgatttcagctcacttcaacccccacctcccgggttcaagcagttc

SEQ ID NO: 89201 - DNA, 1050 bp, Homo sapiens
ctcggtttgcgcccacccctaaggagggcgatgtggggaagctgagggcatggtgtggggaaggagggggacggaagacagcctcttaggaaattgctgcagggagaaacctggacccgtcggatgcaggaccacggggaaaacgcgggtcggaaggtgacacaggatttcgggaggagaaaaaataaacaagcgggtcctgtagcccccttgcgctttcagctcccgaagcccaggtgcggaactccagagaaggggatccaggcacgggtcccgcccagagccagggctcgccaactggggagggtgctcttggctggagaaccagcgctcgcccaggcacggaaaggaaacgagctccagctacaaggcaggggctcccgcaaagcgcagttaccccgctgaacacggtagaacgggctgcgcttccctctgccccagaaacccgggtccgttttgttttgctggagctgtgcacgtgttcccagaatgcccacagaggctcgtcttaagcaaacaaggatctgtgcaaagtgtctttccacccccacccctgctaccctttcccaacacagacacccagcccctcaaagggcaagtcaaactggagcttccgagtgactttccacagttgttagagtttaacaacctgctagggtggggcttggacgttagccgccaagcccctgaatgtactccttcaaaacccagccacaacgtaacaggaggtggcaggctacctgctttacgcacggtctctccaaaccggcggaaattacagagtaaaataactttctcaaaaccgcatagtacttagctaaaactcacagttggtgcaaagccgtggtcgtttctaagaagaatttaaaaacaaagtccctatataaaattggcacatccttaatgtgtgtttgaataactggtggagttggagctgtgaatttgtgctctctgtttactgtgtgtgtgtgtgtgtgtgtgtgtgtgtgtttgagagagagagagagagacgtagtctggctctgtcgcccaggctggagtgcggtggtg

SEQ ID NO: 89202 - DNA, 1024 bp, Homo sapiens
agtagctgggactacaggtgccgccaccacgcccggctaatttttttgtatatttagtagagacggggtttcaccgtgttagccaggatggtcttgatctcctgacctcgtgatctgcccgcctcggcctcccaaagtgctgggattacaggcgtgagccatggagcccggccgtagctgtattttcaaggcctgttgtttcagctttgttcttaaaactcgaggcttaaatttaccctcctttctattactgatgttgttgctcagctgtccagatgtagcttattaacataatatccacaggccagtctggaagccaagatgggctgtgtgagtcataaaatatattgattattttagggcaataacagcctaaagatatctccatttaaattgagtcattattagcattaaaactttaaagttgtgcaaaacataaacagtgggcgttttgaagattctttttggaacagaccgctttgctattcaatgatctgactggagattgttttctcggtttggactttgaatattataatttaccatttacaatatttttccttctactaaaggataatataaatttgcaaaatgttaaattttttgtttaatctttttctttgttaaagtgaataggaaactagcaactggaaaaatagtcataaaatagcattacaagggctgaacaaattgcctttcctctctttactgttctttgttttgacaaatctatgtccattgttctggctgtgggcagaatttccatattcctccttttggcaaacttacttggtccccttccactttataaatgttaaccagagtcctttctgcagtagagattgtgagcgttaataccatttgtacattctaaatgaattactcttttccattgaaattaagttggaaaacgaataaatgcaaatgaaccttctgtattttattatcccatattgaagctacattttcagacatgttgaactaggtggtttatgctgatttttgtttgtaaacctatttcaag

SEQ ID NO: 89203 - DNA, 1053 bp, Homo sapiens
ctcactgcaagctccgcctcccgggttcacgccattctcctgcctcagcctcccgagtagctgggactacaggcgcccgccactacgcccggctaattttttgtatttttagtagagacggggtttcaccgtgttagccgggatggtctcgatctcctgacctcgtgatccgcccgcctcggcctcccaaagtgctgggattacaggcgtgagccaccgcgcccggccgtatatgctttttagaagaaccaaattcaagaacttaacagttggatcttctaagtatcggagaatttgaaaaatagtagtattcttgataatgccttaatttttggtggtactggtgttacgaatgcatctatttagtcagttgatcccacagtatgaccttacttgaaagttaaaaggctggatcgcataagctttcattgagcccttttttaacagtgagtttattttgaatttgtttttatgtaggtttgcctcagtgaaatgagggcacatattcggacttgtcagaagtacatagataagtatggaccactacaagaacttgaggagacagcagcaaggtttgtttcaatacaatatagtttaatgctaaaattgataatgtttataaagaatttaatgggctggaaactttaacattcttatgaaaatatttacatatttatgtttatgttcttaactataatacctggtactggtaatcatttgttgatagcaatcattgttaaggaattttgcactgtctactttaaaaatttccaggggtaaccaaccacagactggagagattggggcaacttcctcaaacaagtttgtgttaacacagatccaaaaatagaatgcagaactgttacatttctgctaggctttgttttctaatagattcctgaagtagattgtgtttgggattatccatcttctgtcaccactgctcatttcaccagctcattccttatcattttgcttgtttctctttagaatatagacagcagcatctcagtatacaagagaacaggctgggcaggcatcctgaatcctttg

SEQ ID NO: 89204 - DNA, 1464 bp, Homo sapiens
tctgaatatttctaattatttttctttattgtaggattttaatataattgaggaagctcttatccgaagagtcttagaccggtcacttcttgaatatgtgaatcactcgaacaccacataattttattaaaacgaagggaaaagggaccactgaattgcaccatttaagatgctgcttgaacaaatgggagggaagttgtcaatgattgatgggcaaaaatgtacaacacagttatgtgtttgtccatgtttattgttatagtgcatttaaaaactgctttaattttaatggtttaaatctgttttacatccttgagattcttacacatctaacaacaaaaaaaattatctacatcagtcattgttacatggaaaagacaggtggtaggcaagtaggtggaggatctcggtttgcaaattagataatactctgtgtataatgctacatatcaataactaccatcatggttaggcacgataactaatctttgttctgtgtaaaaaaatatggagagtgaaacaaagtgcagacattcaaagaaataagaaatctgctccaatgctcttgttctaatctctaataggttaacgttaataatcttgtatgggagttggaaaggaaaattttggaagtcaagaaagtccatttaggccggacgcggtggcttacgcttgtaatcccagcactttgggaggctgaagcaggcggatcacaaggtcaggagttcgagaccagcctggccaacactggtctctgtgaaactccgtctctactaaaaatacaaaaattagctggacgtgttggcgggcatctgtaataccagctacttgggaggctgaggcagaagaatcacttgaacccgggaggcagaggttacagtgagctgagatcgcaccagtacactccagcctgggtaacagagctagactccatctcaaaaaaaaaaaaaaaaaaaatccatttaaccaaattgtcttacataatactgtaacaaaacaaattttgtgttagaaaagtatacttaattctttgactttttataactgcatacataagaattcaatatttttcaaatatttatagcttatttagaaatatttctataatataagcaatttcttaaaaaccatcagatgatacttacagtataagtattcacatccagactttttagtagaaaaccctaagggctttgatatcttttttgattgtaacattttaaaaattatgaaataaaagtactgaaaaccagacacaaaatttatagctgaatgccttattataaggaaatactcttttaggactcagccagtcaccccacgtgtcctttttgtgtcctgtcacaattacaaccccacaaaagtaactgctagactgatttaaatggtaatcactttgttgcatttgattactgctgccacacctaaatgcatatatctatattttaatattatcaatttaaa

SEQ ID NO: 89205 - DNA, 1011 bp, Homo sapiens
tcttagttcttcaactatatatttaacacttgcccccagttttgttttgttttgttttgaggaggaatcttgctctgttgcccaggctggagtgcagtggtgtgatcttggctcactgcaacctccgcctcccgggttcaagtgattctcctgcctcagcctctcgagtagctgggattacaagtgggcaccaccacacccggctaattgttgtatttttagtagagatgggttttgccatgttggccaggctggttttgaactcctgacctcaagtgatccacctgtgttggcctcctaaagtactgggattacaggtgtgtgccaccgcgccaggcaattgcccccagtttttatttgatggctctgactgtttctcatatctgactctttaattatgaatccagggcatagattagtatctccatcttgtaaggatgcaaagaagccatgaaaataagtaatatcaactcctgaggataaaacgttacttgactagagttagctttttaattgtaatcatttataaacttctttgttccttacatataagcatagtcataaccatggtacccaaaattttctataagttattgtaactccttaaaggtcttgctacagttcttttatccagtacaaataattgggaaaatgtaaagctgaatgaaatctagtgagcctcatatcctcccttttagatattgattttaagtttgcttttcacagctgctaaaaagtaacaactgatttttagttccacaacctctctttcttcaatttagatggatcatacaataaagcaaaatctggctggttacagtggctcacacctataatcccagcactttgggaggctgaggtggagggtctcatgagcccaggagttcaagaccaacctgggcaatatagtgagactctttctatttaaacaaaaacaaaaacaaacaaacaaacaaacaaaaagctgggcatgatgcacacctttagtttcagctactaaggaggctgagg

SEQ ID NO: 89206 - DNA, 1024 bp, Homo sapiens
aaaagggaggccttgggcgaagacgggggctgagggcggggcgcgagcccgcgcctggagcccggtgagggcgtggcctagagcgtgaggccgcgtcctggggcggggtgaggggcgagcggggcgggcccacggcatgctgcgagcccagcctcccgccaagcaccgtcccccatccagccccctgtgggaggagccgtgggaggggtcgcctcttgcccggcgcgtgcggcagtagcgtctctgcgttcggccccgccctacccagggccccgcccccttcctggcgcgcgctgtatcctgatgcgatccccctcccccctccgggttcatgtagggagtcgggccccgggccgccaccgtcacctcggccgctgccgctgtcgccatcgccttgtttccccatcccccgccatggccgaggacctctctgcggccacgtcctacaccgaagatgatttctactgccccgtctgtcaggaggtgctcaaaacgcccgtgcggaccacggcctgtcagcacgtgtgagtagacgccccctccccctcgcggagccgggttgtcgcttaggcccggcctccggcccgggaccccgggctgccgcctggcgggaaccgagcccgccgcggcctgcccgagcgtcgctgccccgcgaggtcccgttccccgcccctcagagtcccggggcggccttttcctcagcctcggggcccgctccccgcgtccagccccctcagcccaagctcccgctctcccgctctcccgctctcccgctctcccgctctccctggctttcgcgcccccggggcagtggccaggccgttccctgcggcgtcttcaggccccggaggcccctgtcgtctccgccaggcccgggaggaattgcagggatcttggagcctttttgtttcttagcaacccgggtgaaggctggggtgtcgagtgtcaaaagcggccggcggtgctcgcgcgggcccgctcgccccgcgacctgccctgctttcaagtttcctctttcagaacc

SEQ ID NO: 89207 - DNA, 1026 bp, Homo sapiens
tgtgctcttttgtagtagacctgtttatgtcttgtggaacaacatgtcgatatacatcagtttgagacaaaagcttatgttactcatccttttattttgtaaggggaggaaatggagatccagtgtgcgttaatttgttggcctaagattacacagctactaaatggcagagccaggatccggtttttcctttgtaccatgcttcctctagtaatattattaatatgtagcattaatatttattcatcatatattatgttaagaagttgtaaagcagacttgagtgtaattgttcaaatattcccatctagtccagttatcagtcttactctctgataaatacatatacagttactaaacttctgagatttatgtacatatgagtagcctaacttatttaatatgaatacatatttataatcacttgtttgtatttaattatagagatgaagagagtaattttttttgtaattaatgtgtcacaatgtttggtttagtttctgtagaaaatgtttcctgactgcaatgagggaaagcggagcacattgtcccctatgtcgtggaaatgtgactagaagagagagagcatgtcctgaacgggccttagaccttgaaaatataatgaggaagttttctggtagctgcagatgctgtgcaaaacaggtagagtaaatgtgacatctctcttctttggaagccaagtttctactctgaaattcttatttgaattttcttggttggtgttttttttttttttgaaaagatgaaaggtatttagactgggaattggatagaaaaggccaaaaaaagctgtggtcatagatcttactagattataaacttactgagaaatgagactgaaaaaaaaatcactgaatttcataatacttagcgtggcatttttctaaaagtaatttctcattgattacttgctaaagtaactaaattagcaagctggcatttagctcatttaaaccccattctggtacaaattcaccccttaagtttttctcatggtagcatcat

SEQ ID NO: 89208 - DNA, 1051 bp, Homo sapiens
gattgggaacctctgtaatgcatcatttcctgaatacatatgttcaaaatgagagaatctttgaatagtctaataattataacttttttaaaaaatgtatagtgattcctcaaaaaataggagagcgttatttttgtgttattctgaattaagtatgtttcacttaaaattgttttatagttcttctggtcatcctacttttaagtgtcccctgtgtcaagaatcaaattttaccagacagcgtttactggatcactgtaacagtaatcacctatttcagatagttcctgtggtaagtacatacgtttgagacagtcttctgcttagaataaaacatgctgttctatttatttcacttcatgtatgcaagagaaagtagttgatttatatttggttggggcattatcagtaaggtagatttttgtcaacaaaggattgatgactgtgaagcaaaatgagatatttaaaattgcagtaactctcattataaaaagggagatgcatagtgtgaggtaatatagcacagtctggagaagagtgaagtaatgaaagatgaaccgggaactcattcctgcgcagtagcacaacctgtctattgaggcctcagttacttgctctgtagatggcagacaagtagatctagtcaggtagattgctgtaggtgaaaatacctgtaagtaagaataaagtcagtaggtatttttattgttttcttgcagcatatagtatgtgaatgcataaagcaaggaaggaaaagacttagactttgtatttgatgcctacatattttttgacattttgagggtatgtaagaaaatggtgagagctttttgataatgagggagatagagcagaattcaggattccaacatataatgatcctagaagtgtttcataggtaagttatttcagctgtgaatggaacaggagaaactgagctgggagagagatttccctttcagctgaacattttgatatataaataattgtcttcagaaaggagaataggaaggaaaatgttatcaataagaactgtagatatttctaagct

SEQ ID NO: 89209 - DNA, 1158 bp, Homo sapiens
tagacaaatacagtgccaaagatgttccaggaaatctcgctcatatttaagattttacttagttttatattggattaccaaatttttattcatttctgcataatattcgatatatcataaactttggctagagtttaattactgaaggttttttgtgtgttatttcagttatttatccattcagtttttaagatgtacttcatttaaacgtaaggatatggctgggtgtggtggcacatgcctttaatcccagcactttgggaggccaaggcgggaggattgcttgagctcaggaatttgagacccagcctggacaacagtgagactgtgtctctagttttaagaaaagaaaagaaaaactaaggatacaatttaaagtaaattttccagtttacttcatttttattttacttacaaatgaaataaaactaataataattatatggttattgtatggatcaaatgagataatatattggatatgttgcaggcagccagttagtgataactgtcattacagttggtattattaaaagctagatgtggtttttctgttgaaacatttgtgtaataagagatttaaggaatagaatgtctaagatttctcactgtgttagattaatgtcatttatctaaggtaattgattgggaaatgatctagtcatggaacttggcctttaaaaatgcttctcacgtagatatttttggtaacatatccctgtgttattttaatactgtcaattgtataatatttcattgtttttattattttttgtttaaaacaatctgtttcttatagacatgtcctatttgtgtgtctcttccttggggagatcctagccagattaccagaaatttcgttagtcatctaaatcagagacatcaatttgattatggagaatttgtggtaagtgaattcttcaagattaagaaagtactgtttaaatattaaagttaaaataacttttttgtaatcgacttaaattttgtggcaagctgttgtatcttactggatggatttagagcaagttcttaggtttttaataatactggtgaactttagcttgtagaaatggtaaggtaaaaattgagtttactctccacctcctgtactagagagagaattaataagagtaacagcaagcacccagattaaca

SEQ ID NO: 89210 - DNA, 2316 bp, Homo sapiens
gtctaatgttttgggcaaagtattagagtagttgaatatgtttttcctgttgacatgaatgttattgtttttagaatcttcagctagatgaagaaacccaataccaaactgctgttgaagaatcttttcaagtaaacatctgaaggctgtagacatctctgcatctttgtacctgcaagtgccatctttaagggggaaactacatgaagtcaccgttacagtaacttgatgtgtatattaataaaagtaattcagtcattttagtttttgattgaaaataaaggtagggcttctaaaaacttcatcatcttgataagttaaaaaatgaaagttatgacattagctttaaaggtgtaaaaaagatgtttcactaatgtaacggtgaaagagaatccctgttgtactttatctttttgtaatattatttttgaatttttcattattatgttgcttttgaaatttgatgcattcctcccatttactttattattgtacacatttaacacacagtagcaaattttgaacgatgtgattgatataacctaacaaatctgagccagttattattagagttgcagaatagaaacttgaagtgctaaatggaataatccaaaggaaattttttaaatgcaggttctagctgaaaaattcaactataagaaaattgtatttatataacatttactatttttgaagactagtgagatttctgtaataattttaattctttaaaaagtgaaagcttgttgtaaagatattttctttttgttattagaaggaaatacaaagagaaaaatttctttctttcatgggcatttgataatttcagtctttgactgatttgtaagcctagaatatactaagctgaataacagctctttggcctcagaattttcagtagccagtatttctgattaactaagttgaaactcttattagaaactttcagttggtgatattgtattctagaagatataaatgagaggtttggcttcatctcagtttagaaatttattcaaagctaaagatgtatatatacatatacttttgtgtgtatatatacacatatgtgtgtatgcagtttgtcaggttatatatagaatttctattaaggattttttaaatggacaagcaatagggggttgaagtgtttatctgatttgtttaaaattttgtatatcaccaaatttttaaaaagtgatagtcacagtgctaagttatctagttggctactattacaccttaaaaattgagtttacacacacacaattacctgtttatatggtgctcatttgttattctcaaatataatgtgtgaccgtgatatagtgagaaagattctaccaaccactgtttcactactttttagttaaaattgggtatgttcttaatattcattagtgagaatcacaaagtattttgtagaaggcccaaatcacagaataaaggactaagagtggatttgctgacattccatactaatatacattgtttatgctttctttaaaataactagaagaacataaaagaaagagaatctcagaagtagtttgctgctaatatatacatatattgtataaaaaggtatattttggttttgttaaaacccttgttgacttttctacactgaacattttttttaacttgatttaataaaaatgttaattttggaagtgcagttttgtaaaaacctttttcagtcaaacagtaaagactttatttatggattgtaataacaaccacaagaaaagccatacatcttaatgaacatacgcctttgttctgtcattttaaagagtggtgtttactatgtgtgtgcttgagcattttctttcagttacatgggtgtaatttaaaaaacagctcctttttaagacttttgaccatagtgttttccagtttaaagcaataactttcatagtttctttcaaagtttaatacatccaatatgtcaagttaaaccattctgggatttgcaaagtttaatacatccaatatgtcaagttaaaccattctgggatttgcaaagtttaatacatccaatatgtcaagttaaaccattctgggatttgggaacttctttaaaggaaaattgtagtagaggtcatcttgatggaattgtgttttaaagttttgtgaatgagttaaatatcattgatagtcttgtgtgtctcacatatcagctttttcataaggaaaatactttatttgcttttatctgagaatttctcagtatgaaaatgattgtttaaaatttcccctctttttgtcagtgcattgggaatagggatagactttacagatttatggaaatta

SEQ ID NO: 89211 - DNA, 1008 bp, Homo sapiens
tatgttttcctttcagtttcatcattgtgtaacaagttttcttttgatgagattataaatgtgtattttgaaaatcattccatttttactgctgaatgaaatgcagattgctgcacagtaacttgagacatgaatgagtgtcacaggcaccgtcagtacttacaaagttttataacgtggtatttctcttatgcttcttcatcagtttagactcatccttctacagtttggactaatcttttctatcaggtagtttgtatcacaaaccaacccaaggttttaaatgaagtttcaaatggctagtggaaaaccttcagttgttattttaaaataacaattattatattggggtgatattctatgaataggaactagaacattgcaaacaagagatacagatgaatacatgttaaagtgtaattaggaataaatccttgataattttattctgtaggtgcactggcattcctctatgagtgtatgcctgtgtgtggttatagtgtgaaacatgcaaagcacttgttaatgtcaaaaatgatggtaaccatccatccagttcattcccacattttgttaaacgctccaaatgattctagtatttagatatgtaagctgtatttgaataaaattgtactttacacttttgtgacaatttattatagcttacaatgagccttctttcacattatatactgtaaccctcacaatacccatgcaaagcaggtactgaccatatcttatggatagtctgagtacctggaaggtgaactgaattacccttagttagtagaactggtaacataacccagacagtcctatgagctttttaattcaatcacactaagacatttctcaggtttacttagttgttttttttttttttcctttggacatgtagtctgagtttcattgaccatttgtggagaatctattttcagaaaaaaaattaatcacaaaatgtacccattgtttttcttaaatatttgtattgtctttgaaggcagaatt

SEQ ID NO: 89212 - DNA, 1496 bp, Homo sapiens
tttatgaagttgcagtgaactgcccattcagctaaattgcagtgtttattcttgtctcatgtcgaaatacaacaatcttatgggaaatattatgacagtccgttccaactgttctcagacacatgcataaacagtctctgctcacattccacagccacctgcatgttatccatacagctccctgagaagtccagggatgggaggtggggtgtggaaggatggagggtccttcattttctaaacactttgtataagtcactactcatcgtgcctagcaagtataagattaacattttgaataacaaactggaaaacaaataatccttcaaagaacctagcgaactgttcaaaggaaattttaatttcagtctaccagaaaagttaaatctgttgttggacgtagggggctttcagaaacatgcctcttatatcaatttccactatctttcaagttacctaaaggcaccaggctgcttgagcaagaagaataaaaggcctagagtgcaaattatgtgaagtagagtttttagattgtgggattgtaataatacgggattctcatggttacatcatgttaaatcacactgttcagtctttaaaacttggtgttttaaaatttgtctcattgtgatagccagaaacaaggaataaacgtgatttcagtttaaactatatacaaatatcttctgtaattttgctgctctaatttttaggctataaattttgtaatagagcttatcagatcgcaaatttcctttgtttacaatctcatgtagtagggctcagataatttcttagctataaaccttttctcccactctcatattgtttcatttaaaatatttaagctaagcctaaaaattgaaatcagttaagaatttggagagtttatcttaaatggaaatggtgtattcttttcaaagaattttgtaaccatctttacagtttctttgcttggaaaacttgggttgttaactaccagttaacaatggcattactttccaaaacgttatctaatgggcccaatgtgtacctcaagataaacacagtatgttatgtctaaaaatttccttgtctgttgatttaaatggttctgaaatgtctgtaataaagaaattttcaaagttgcttttcttgcagttgttcctcagtagtcagacctagtgcatagttttctaaggacttgtttcccatcctcacttaggagtagggaatttggagggagtcccgatactgcaagcccattctgtattaataagagatggaagactgtggctattgtgcatagtcagaagatgcgggtaactaggtaacttgatggcatacagagaatccagggcctgtgtggtcaggagatagtgcagaagatgaaatagataaactggtgagggaaaaaaaaaaaaaaaaaaaaccctggtccaaagatagttgtctcaactgatcgttcaccatcagttacagatcagactccttgttctactctttcccactctcac

SEQ ID NO: 89213 - DNA, 1843 bp, Homo sapiens
ggaggaaggcaagcccagccatcagcctctcactcgctctctgagcgagaagaacagatgtgatcagtttagaggttctgtccgatccaaatgtgcgacttctcctcttcccatccctgggactctgggagcagcagtgaagtcttcagatactgccctacctccacctccagtgcctcccaaatctgaagccgtaagtcatttctgtttttgaatgcggtgccagtctttctgtctctctgctcagtcatccactaatttattttcttaaaactccccaactgaagattgcagagtgagcaaatttgtttagtttggagtgagatacacatgctagcttgattattttgaccatttaggaattagagttttactctatgtctgatgagaacctcttggagagtttttaacaggagagttttaaacatgacttttgctgctgcccggagaatggataatagggaggagagagtagaaggtgggaagcagagaagaggcgactgcattaaggtaggtgcgaggtggtaaggccctaaaccgtggcagctggtagtggctggcagagagagacggctgcttcagactgtttcataggtaaacccaacaatatttacttgtgagttggatgtcaggcatgaagaaaagagagcaatcaaagaaaactcctagatttttagcctgggcaacagaatggatattagtgtcatttactgtgatggggaagactgaaggaggagtaaatttatttggtggtgggaggggaagcagaggaaaatcaagaggcagtagcctcacttataactctttcctatatccctgaagttacactgagatcaaagcatagcggatgtgctaatgtattatacacacacacacacacacacacacacacacacacacactccagaaccaggtgccagggtagttctatttaacaccttaaacataactcattcagagcttgattctaatgtaaaactaaaattttggtacagttctgtttagaacaagagaaagggccctctattttgaccatgttcttcaattggcagccactctgaacctttgctactcatttttgatcactgaatttcattatccctgagggagaaagggctagaggtattaagtgtaattctattaatttatttgacagtatctattacagtggctttcttttttctatctctagaagaatcctttttaaaagaattacatgaatcccaatatatagaagagttcaaatcaaaacctacctgaccaaagcacagattgtggggaaggggtcttccttgggtccctgcccactctttgcccctaccgggtgatcttaggacacctttctggaaccctggggctatgcagaaccgggtttttaaaaactatggaattactaggctagatgctagaaatacaatcatcaagaaaacctggactctatcccctcgtacgtctcagttttacagggaaggtaacagatgaaaagcaatgactgttaatacaagttaaaaggtgataaacaataggaaaacaagagagagataatgtgtggagaattcagaagagacagagaaacttctagtcgcgggatgaatgagaggagcctccatggagattatgacattttaaatgagtttagaaaatgtacctgaattggaagagtagagagatgagaaagaaggacattccggacagagcagcatgagcaacgagctggaagctggggcagctttaagcatgtaagagggaaaacaagaagttctgtggggcagttgaatagggctggatagggtgcaggaagggcagtggtggctgaaaggctggtgccagggcatggacagcc

SEQ ID NO: 89214 - DNA, 1052 bp, Homo sapiens
gatctgaaaatataagatgaagacacaaaaacaatatagttacagtgggaaaatagaaaggtcgctaagataaatggcctgaaaataaatgcaaatataggtatatatttgaatgtattttatgaacttagtatataatactttatatatttttaatttatgatataaaagtatataatattagtatacagtaaaagtgacactgcaaattagtgatgaaagggatgactctttaggaagtgcactcaacactcagttaacttacacacacacacaaaaaaaaacctaccttaaataagccaccagagtaaatacagttacattccctgttgggctagtggttaggattcaaaaaatagagatacatagcaaagtattaaaagaaaacactggtaattataccagcgtttctcaacctcagcaccactgatatttttgcactggctaattctttgctgtggggagctgtcctgggcattatagcatattgagcagcttccctggcctctacccactagatgcaaacagcagcttccccagtcatggcaatcaaagctgtctccaaacattgccccctagtgggtatagtcacccctggttcagaatcatgaatctatatcatctcagctagaagcatagcacccaagaatgaaatcacaaaggaaaattttgaaaatattgactacattttaaaaaaaacaactttaatagttaagctataaaattgcaattcaaacaacaaatggaagaatacatagcacaaatgacattttcatttacacaaaaagtaatcagtaagagatctaaataattagataaatactgaaaaatgaatataccaataaatatatttaaaatatattcagcatgcatgctttacctctcatgctggtaagcatgaaataaacttcagtgtgagtgtagggagacataatttcataaagtgataaaagtataaataagtataacattgatgaaaacacagtgggcagtgcatattagacctttcaaatatatgcatattagccaggtgtggtggctcacacctgtag

SEQ ID NO: 89215 - DNA, 1047 bp, Homo sapiens
aatgacttcagagttggaagcatgggatacagattgtgctcacatatgttacacatttttatgtatgagagtaggagtaagttatttaagaagtacacacatacacgaaaatgtagacaaaactgttgaatgtgcccagatagtgacatttagtaaggagaactttgatctgtttaatctgtacgtgtactgtttgatatgagtctcaaaaactggtggacattatctttcagttcatttcctgtgcagtacttcactagacttatcatttcttaattctggaaggtgtatgtttataaagataaattaggaaaaatatagtaaatattgatttaaagggatagaaacacattttttgtttccggatccctgtctgcatcttatccctgtctccatctttattcaaatgggtgactcgccaagtttttcacaaagttctaataaaaaggaagtatagcagtgcagctgagagttttgcagactagactattctaaaattgtatattttgaattatttccatatgttcacatcctttgggatataattgtaatgatatttcaggctctattctggcattaagttttattctgggataacatagtcaataaaaatttgaacgatattcagtacagagaaggataatacttagaagtagtggtttgggcttcaacacagtaggagatgaaaacttagaaatctatgtgaaaatacagaggtgtgaaaggcaatgtgaaacacttaaaaaaagtaaaatgttttgttaataaaagtaatagtaacgatggcctccatttattgagagcctaccatgtgccaagcactgtgagcatttgtttacatacgttcacttagcctgcaaaatagatggtgatgttccattttataggtgaggaacctaaggctcaaaaaactaaaagcattttgtctgaagtcactacactgtaaaggcaagattgaaactcagcttgtagtttagctgatagtattgtatctgtcagtttccaaaggccatggttcttttcatccatctatacccagtatcagta

SEQ ID NO: 89216 - DNA, 1744 bp, Homo sapiens
cacaggtgttcccagctgtgatcttcttaatctggtcctgaggaaagaaaaggtaaatcagagaaatgagggaaaagtcctcactggcctaccctaaaccccctgtcccctctttctgttccactttatctcaattcattaccctcatccacctcctcccaagttcccgtttcatttgtcatccccaagcccttggctctgtccctcacctcccaaaactgtggccctcttataggctactctccatcccctctcatggcatccacaccccacaaatccccaggagtgactgtgaaaagattctgagcttacaatgaaaggaacaggattccctgctcaggccagcgaggcaggatgctcttgccgccccaggtgtcgctggccacgggatgcattttccccagtgttctgagttactcctggccttgtcttagtactgtgttttaaatccagttttgtgggctgatctgacaacttaacctcaaattttattcttgtttccctgggaaaatattaaaattttgcagaactgactaataaatgaacttttggaataccatatgtttgtaaatgggtggctgcctgttttctgataatggtgtatcctgtagtggctcagaatgcctttgtttgggtttggaggtgaagagaaagaaaggatgtttggtttgttttaacactgagaatttttggctctaaaagtactttgtaatcattttaatttttattattctttcatttaaattgggacatttgtaccaaaaatgtctttcagattcatgtaattccttatatctatcaacagttgtgtacctatgctgaagaaaaaattactttacacaggcatttctctatggcatggaaactaataattcttttcaaagaatatgctgagaatttgaaagtagggtagccggtcaggcctaaaccttggtatcaagtcatgctgtgtaaaagatggcttttcacataattgttttagtgatgtgttctgtctgtgtaagtaaaaaaaaaaaaaagagagagggtattgcttgagagatatttacttttccatttttctgtatattttttagaatatttattaaccaggttatcaggacactgtgtgtgtagcatcatcctagaagtaattatccacatacttctcttggttaaacttaactacatgaagtgtgtcctcaggaacttagctgaactgtgtgaaacccattcagttcacacaggcccttgaatgtgcactttaaagcttttcatggaaaatgtctgaacctttattaatatattgtttatatctgaattaagttagggccaagaactgtaattatttttctcctgcttgcatcaatagttttacataggccttctctgctgataaatttgagtcagattaatgagtaataaatctaaagataaccttttaaaaccattggagagccaagaaagtgaacatataattatgatttaaaaggatatgtgactaaggcactcagatgtgtttcatctggtgcctgggtgttcatttctagttttaacgcaattgaatgaaaattacttcctaattccatcaaaatagcatcattggctactttagactttttagagttgatgttaggaaatacaccagtacaccatacaaaattagaaattgaggaatcagaaggaccagaagttcaaccaaaggactaagaaatagtaagttcctagaaaaattcaagtcaactttttctacataacattttgc

SEQ ID NO: 89217 - DNA, 1451 bp, Homo sapiens
ttctaaatttgatggcactctattggaaccatgtctgcacttcagtatataagataccttatacatatatctgctactttcctgaaagttcttgaatataatatttcatttatctttgcattcttcacagtacctttgtggtatgccaggtacacggtagatacctaaatggttgaacagttgaatacacaaacaggtgttaacttactatatgtcttatttcccatggaaagttcttctcaaggcacatattatacagaacagtgttatttttagaatcactcaggcattttcattttacctttcatcctctacttttctgtcttcctttgttatcgtgttatacatacttctccagaggtacctgtgtaaaactaatgcaaattttaattgcttttgttggagctatattgttttgctaagaaagggtctagcataaggtctagcacacttgattactatcagtgcagcttaagctacaggtagaacattctcataggggcacatgctgacaaggagagcaaaacttgcagagaaggtggggagttcagttgttcatccaagaacatataaacgtatatctagaaaaccaacctgcaaattaaaggaagcactctaattattgtccagggcaagaagtggagtgagatgtaatgactgaacgcaatgtagaaagctggctagctgcccagaaaaggaatttatgactgtgtgacctcattttgcctttagcagagtgtcacttttctaatatctacttgaatgttcctcatgcctttgaagaccatgtgtgaaatatctgataggagatatgttgtgtgaatgctgggttcatggtctttggtggaagctgaaacatttcacatccgagaactcaaccaagtcatgtctcagtttatgaaagctgctgaatcacacatcagattttaagcattcaaagctcccagggagtgtattggcaaagtgaaatctgtaagaacattgtcatcattaatgaacactatgttggcatggtttacttaggtggataccagtgtgttcattttgccaggaattctcatctattgttttataagaccttaaagactgatttataaaataattctgagacttctggtacattgacaccattggcagtagatctggtccactctaaagcaggtgatggaaaattaccaggttcatatctctctggcggttgaaaagaaaccaggatggcacctagtgaccaaccttagagatatccttatagaaatgcttgtgggcggctggagcggagcatgtgtcagctgtcgcctttggcattgtattcttccagatgccttattttcaggtggttttgcttgggaaagtatccatgaagacctggaaaatttgtttcactatttcttgtcagagtcttcttaggaaaatgtgaaggaagagaaaatgtaggtctgggtctctctgat

SEQ ID NO: 89218 - DNA, 1032 bp, Homo sapiens
aaagttcatctttcactgggtcgttttgttccagtgttaaatgtttgtggcaacaacacagtgaagggtgaattcaggaagaaatgatgttgttttcaccatgtggtagaagcttccagctcatggcttcttatggaaacctgattgctcccagctgtggctggtttctagcgactgacccagttgatggtagtgatttaattattaaaggggggtaaagtttggataggtgtatgtaaaacttggaaataaaggaacttttaaaaaaattattttcttaaaataagagctttatgagagatatggaaagggagaatatgagcaaatacattgcagaattatttggtgtcatactatgtggcttttctagattgctctataaatgctagtaaagctctaaaaattttagagtcctttgattgctattttcacatttcagcctgtttactcagaatccttgcaaattatttactgaatctacaaacagaaagtatagtattaaaaaaaaacccacaaaaattgtagcacaaaacagggatggggttcaaaactcctaggctactgttttccatttctttatacttacatttaggtactcagtggaaagttggttacttgaaagggctaacgccagttcaaatataatttaacctatgagataatatgattaacatcaggtggaaagtttaaacaagctgcctgtgaccacactgttaatggagtgtttatagcatgggtgggaaagtgcttgtctcacttcataatttgatttccatattggatttgtacctctaagaagtagtgtgaccttttaaaaggttcttttttaggaatttctttgagctttttctatttgtggaaaacagacttcatgggttccaaaactgattgcagtgctagcaaaacttcctgaattgaagtcactctgctccatttcttaggcttggaatcacttgcctttgtgagtcactatccagggaagtcttgtgctggctttctgttaaccctgacccatttctgtagttgttgagt

SEQ ID NO: 89219 - DNA, 1067 bp, Homo sapiens
ttgtagaaagcattacatctgttagattgtaactcaggcaagtggggcagttttcacaggggcagagaatgaaacaaaccccctaccctacccattctgtcatcagaatggttcctactagtagtgagatacatgctacttttagcaagtccaaattctgtttctgtctttgtggaaaactggaaagaaaggtaaattgctacattgcttcatcctatatacttttacctaatctgctgtattcatctatgaggaaattacgttttagtctttcccgcaaaagcgctgtgaaaagctctgtcaaatcagtcttcccaaaagagtgccctcattttatcacttcctcaaacccctttagagactgcatcctgctgctagattctttgacttgttgttgaatgctttccagaggctggttctggtctacttctccaaactgatcttttctattccgaagagtgaacctcccactcttgctacattagtcgtctaactgtttcctgaacatactagacacttttccatttacacagtctctagctagctggagttacctccctcagctcatcatttcatcaggagggttcagccgtcctccgcagccccacatggtctcctgatgtgtcccattcatttagcacacgtcctcagtcttcattcaattaccttttcctgtgtacacactcaccagttggactgtacagtccttaacaagttataccaattctaaaaaacacctgaagcctttggatctgtactcaaaagaaaattctttgtggctatgggtgtttgacttagggatctcaaacttggttatacattggattcacctggagaactttaaaaagactgatgtggggtcctacctccagaagttaattggtctggagtgttggctggatatcagaattttaaaagctcccccatggttaaaatatacagccagtgttgggaacccattgttctagaatgagcatccacaatgtgagataagatttcctcaaacacacacaaatatttgtaaatattttggtgtttggaacttctttttaaaagaaccatccagc

SEQ ID NO: 89220 - DNA, 1098 bp, Homo sapiens
gtgtggaatacccttttttaaaaaaaaaaaaaaaacaattcagaggtaaactttatctcatcttgggatgaactgtcaacttctgcattagtcaagttttaactaatgaaattttattgcaaagtatggagaaagcagattatgaattctaagtttctcatataaaattgtatttcctaggagagtgcgtagaagggctgcgggaaaatgactatctgctgattcattcctgccgccagtggaccaccatcactgcccacagcttggaggagggtcactatgtcattgggccaaagatagagattccggtacattatgcaggtaagactcctccaagggccaagatgaggcagcgagagaaaggggatgtgaatagctaaacttttcctctaagaattgtctgtaaactagaaagtagaatgacttagagaatcaaacatttgtgtgtggttattgatcagtgaaagctcagattcattttgttagaagtatttctaattaatgcatgtagttaaatgaggattcttattaggtatttataagatagaaattttacaaataaaacacctctattgtcttggaattaaaatcaatacatgtagccaacctcagaacttcagggggtcatgtctctgaggaatcctgtatacagtttgaacattgcttttgtgaatgactttgtgaagatttcacaagattccgtctcacaaattaacattgtggtctgggtttaaaagtattggattggtagttcatatacctggatatgtctctcctttcaataggcatttagattacaggcaactgagatgccctcactactttagttaaatgagtgtaatacctgccttctcacctcactttgaacccgactcaatgcaatagtgccatataactgatttttattgagtatattctgtgtgccagtactgttctaggaggttgggatacatctagtggcttaaataagctttaaatagtgatagcttataaatgccattaaaaaaaaaaacttatgttaccatatgctttttccggcacttataatacattatataaaggatcttagccttttctctagtattgttcaatattttc

SEQ ID NO: 89221 - DNA, 1022 bp, Homo sapiens
cacttgaggaggcagtctgtccattctcatatctcagactccgtgctgggagaaccactacactcttcaaagctgtcagacagggacatttaagtctgcagaggtttctgctgccttttgttcggctatgccctgcccccataggtggtgctctacatttctcattcctcttgcgtagcactcatcatggcttctctaatgtaaaattacatatgaacccacctcactctcaagaatgacttcttgaatgtagggactaagtcttctttatatttttgcccattccctcattgccttttgcataaaagataaaaaatgtttgttggataatgaatgaatgtttgttggacttgttaaaaataaatgtgtgaactgtcccctgttctatataatcctgatcttcttacccattacttcccccacccagcatctctcaccttcgaatgaatttgtaatttaattacttagttttgttattggtattggctgtcttctccctgttgaatagtaagtgccctagggcagcgatcttgggtttgttcacccgtatgcgcctagcactcagaacagtgcttgttatattggttgagtgaatgaatgaaacttgaagccaaaggtcagtttttcccctttctttggattattgtcagtgtttttcaaggtaagagacattgtggcattggaagagcaggagagagatggagagagaccccaaagtcagcttctgccacttactatgctgtgcagctttgagcaagtttctcaactcctctgaaggtcatttcctaacttttaaaggttaatataacttgaattacaatatttatagaaggattacgttttagagggaaaaaagcataccataaaatcagtagcttatgtgtcctgatcactgctaatacctgctagaactggtgctacacactttccattcactgtgtgtctccacatccactctgtgcagcagggcctgttgtattaataactatttcacaggtgaaagaaggaggttcgtgcccaag

SEQ ID NO: 89222 - DNA, 1014 bp, Homo sapiens
ggggtcccttcactaatcttacccatgagggctctaccctctacttacttcccagatgccccacttccttataccatcaccctggaagtcaggatttcaacatgcactttgggagaaaacaagcattcagcttattatccatggagggagactatcttggtggcccgacctaatcaggcaagccctttgaatggaagagatttccctagttggtcacagaagagaaagtcagagatatttgaagcctgagagggatttagcatgagacaggttttctggtgctgagaaggggatggggccactgggcaaggacctgagaataggaatcaagagcagtttccagtgaatacccagcaaaaggacagggacttcagtcttaacaactgcaactgaattcttccaacaagaatgagcttagaagaggaccctgaattccagatgagaatgcagccagctgacgccttgatttcagcctgagtggagagcccagccttggagtgctagacgtctgactatatttaagctgctaagtttgtggtaacttgttacacagcattacaaaactaacacgttatccttctcttcatttctgtctacttacgctgattattggtcttgagtcttgcagtgttagcatctctcaagcttacaatatgttttccatctgtggccttaagagccactgttgcgttaaatgaaagagaaccctactcgtttctttccccttgtctctttttgaaacccccagttcgatcttattggttctattgtattatgatacttggtatggatttcaacctctggggcaggtaggaaaggccttagcctctcagttgagaggttacttgttaaatatcatcatgcttaaagtgatttgaggatacaggtttctttcccttttactttactgagttaattcttggtgattttatgtcatgctcacgttatcctttggagtgggtctgttattcccatttcatatgtagcaaacaagcaaaagaacagtatgtggct

SEQ ID NO: 89223 - DNA, 1052 bp, Homo sapiens
agcgcagatactgaggaaggaactccagctgctgcataagtgagaacagtctgaggtgccgcaagattgttggattctctgtaatgaagacagagccacggcagagaacgttcatgtttatgaaaccaatgcagttaagtactatgtggctctcttgcatccagctttgggattctatttttttttttttttcatttttgaagagaagggggtctcactgtgttgcccaggctggtctcaaactcctggactcaagctgtccgcctgccttggcctcctaaaacattggaatacaggcatgagccactgcgtcagccgggattctgttctttgcaaattaaatggaaacgttttttacaaacttcccatgggtatatggtttcccagtggtggtcattgggatggatgagtgccccagggtggcaattcagggtcaggaatagtgaatccataaagtgggggagtcagtgcccagcagcagttgaaaccattagatgcatcccgggaggtagagatgtgtaggagtttaaatcatagtgcccatttccctcaatatcagtggccagcagggtttttttttttcctatttttaaatattttctggtccctaatatagtcattttggcaaaaaaacaaaaagacttccctttcttctttccccttcctgtctagggttgaaaagtacagtcaaaggagcaaagaaaggaagtctcaagacctcagcatgacagatagagtaataattttgaaactatttaaagctatgataattatgctcagttaactttaaaaagccaagtgaaattgttgaaaattatttcaaactttattcttaaagactaataggttttggctgcattcatttctcaattaaatttatctgagtttaagattctgtttatctccagagcctgtggagtgtgttcttttggcctagtggcactgtaaatgaagcaggctatactgttacgtggctcttccactcaccttaggcgaggtgacaactgctttcgtatcataatatctcaaagtataaatgggtttcggttgct

SEQ ID NO: 89224 - DNA, 1064 bp, Homo sapiens
ttttaatgtcagtaaaagaatataatttttaagaacaggaaaataatcatgctttgcctgttggccaggccattagtcaaacatcctattttctctttcagactctagaattaaagaaagaggccgggcatggtgactcaagccagtaatcccagcactttgggaggctgaggcgggtggatcacgaggtcaggagaccgagactatcctgggctaacacggtgaaaccccatctctactaaaaataccaaaaactagctgggcgtggtggcgtgtgcttgtaatcccagctactcgggaggctgaggcgggagaattgctcgaacctgggaggcagaggttgcagtgagctgagatcacaccactgcactccagcctgggcgacagatcaagattccgtctcaaaaacaaacaatcaaacaaacaaaaagaattaaaactggagaaaattcagagaagagtagtagaaatagtcaaaggcttataaaaaataaggcccataaatgaggaaagggtaaaggagttgtgaatctttaatttgaagaaaagtttaagagaccacttaactgtctgaatatgcaaaaaattgtcaagaaaagaaggctgaacaactgttttctttctcacaaagaactgaagaaagagaaacagttcaagagctacttagattagatgaaaagaagtatttcttgcaaaagagaaatccatatgagtcatgcttactgttcaacatatctttgtttggctgtgttcttaggaggtagggtacaagccttcactgaacatttgttgacttagagtcttggacacaatattagcactcagcctcaaaattagcatttttatctcgcactattctttatttcttggttcttctatgcacattactctctcttttgtgtctccaccccctgtttctctcttctaagttataaggtagtacagagcacaaaacaaattcttgtggccactaagagactttccaggaactgatcaattagcagactatggaggaaaatcttttcccacaatgtttatgaaaatacttggaatcactgtttacc

SEQ ID NO: 89225 - DNA, 1043 bp, Homo sapiens
gccaaaccattcatgagaaaccacccccatcatccagtcacctcccaccaggccccacctccaacactggggatcacaattcaatgtgagactggggcaaggacacagatccaaaccctatcaatggttaaagggtaaactagacagaactcccaaaagttgtctcttacaataccatgtttaagtttctagcttataagaattaaagcctctaatggtatgtggccttcaggaaggttacaaaatttatcaaacttgcaaatacaagtttttcgaccatttttattcataagcttgtcaaactgttttaacaattttcctccaggtggctggctgctccacatcttaaagatcactgcatttttaatggcattatattttttaaaaagatgatttccttttcctcttacataatctaccaccatttttagaactctccatataatatactttccctccatatatagtcatattttttcatgcacttttacttaaatttcataggacccctttttttccctttattcatgctattgtgtgttggaagttttttgagacctaagaaattttaattttcagatttagaaaatacagctttaatatacccacaaatgatgtggcattttttgaaaggtcacattttttatggttagaaggaaaattggaaatattcatgagtcattttagttgtctgagcttaatgccagtttttctctccaaggttagatgcttaatttaaacccagagtatcacttatcttcacgtgtctgattttgatttttatgatgtgacagaatataatgatacagtcccttggaggaaaaattttaatgagcatttgtgggtgataagcatgttgctgccatcagcttttctgtcgatgcttctgatagtggtgatactgcaccagacctcagctccctcaaacatcaccattgcaatcatttcaagattgaactctcaatttccatgtcaaactcagggaggcagacattcctggttctctctccagctctgtcatttattaacagaatgatttgggg

SEQ ID NO: 89226 - DNA, 1044 bp, Homo sapiens
ttagaaagatttaggcttggttattgggtattaacaatagtgattctgggaggtggacattacccagaatgctgaagttgttctttgaactatttctatttgattcttatgatagaaataatcctaagtggcttttgatcctttttggatcccttgccaaaggatcatggactccaaaattattaaaatgatttagaatatcactgggaaaatgtaggagaaataaaaacctaatagtgtagaatgacatatagttttaagttgttattgatataaaagcggtccaacagtgaatcaaaatttgagacagggcatttccctttaattgatggagataataaaagttaatatggacgatagagactctgaaacttaccttgcccgttccccctcccccataaaaggaaggtgtcattgcaagtctttattttagagagttattttttgagaggagagggtagtacataaagaaacataaattcattctgtaaaggtttttgaaactgtaaattttgctaaggctttgcagatgatacaaaaaaaaaaacttgaactactgaatgagaaaaggagaatagaggactatcagggaattcaggggcaagaatgcagcaaaggactaaaacaaggaaccgaaaagatggaagatgattccacatactcattcttgagccaatcaactgtgtctggagagttgaagcatttagtattaaatgttgtgtctggggcccctcctctgggggtaagagtgacatttaatggttgtattagtctgttcttgcatttctataaagaaatacttgagactaagtaatttatttaaaaaagaggtctaattggttcacggatctgcagcaatatgggaagcatggtagcatcagtttctggggaggcctcaggaaacttacaatcatggcagaaggcaaagggtagtgaggtacctcacatggctggagcaggaggaagagagagaggggagaggtgctacacacttttaaacaaccagatctcacgagaactcactcactgttccaaccacagggg

SEQ ID NO: 89227 - DNA, 1742 bp, Homo sapiens
atttctaaactctttaaaacatttttcttttatttgtgctcttctttcttttggattgctttcggtttattctgttcttttttttccagttgcttaaagtggaagtttagattgatttgagccctttctacttttataatgtaagcatttaatgttataactttctttctaatcactgcattagtagtatcccataagacactaaaaatcccaaaagacattgttagaatttttctttgcaccatcatatttattttaaagaaattaagaaaagaatagtctgtggtatttacccagatatttactatttctattattcttccttcattcctgatgtttccagtttccttctgttgccatttctctctgtttgaataatttttaaattattttattttagggcagatctgctgacaacagatatttctcttagattttcttcacctgagaatgtctatttcaccttcatttgtcaagaatattttcactgggtatagaattctgggttgacagttcttttaggacttgaaaaatgttccagttccttttgacctccatgatttttgatttttgatgaaaaatcaacagtcaattgaatcccatttttttctataggtagttgttttaatcaggttgctttcaggattttttcctttgtctcgtgttcaccggtttcattgtgatgtgtaagggcatggatttctttaagctcacccaatttggtatttgctgacatttttgagtctgtaaatttatatctttcactagatttctagagtttttagccattattcctttatttatttgtttatttttgagacggagttttgctgtgttgcctaggctggagtgcagtggcgtgatctcggctcactgcaacctccacctcctgggttccagcgattctcctgcctcagccttcccagtaactgggattacagttgtgcaccaccacacctggctaatttttgtgtttttagtagagacggggttttaccacattggccaggctggtcttgaactccaggcctcgtgatccgcctgcctcggcctcccaaagtgctgggattacaggcgtgagccaccatgcctggcctttcattatattcttttttaataccatactctcttttccttctggaccgttatagcatgaatattagaccatttggtattattcgatagtatcctgaggatctgttcatttttttcccttagtcatgttttaatgtttttcatattgggtaatttctattgatttatcttcagatttactgacttttctctgtatatcagatctgacatctgtgtgcaccactcagtaaccagtcttggtcttgggtagtggtctgtactgcagttcaattcttaaagcatttgacgagttgtttatggtcagatccaggcatgcaaagctttcctacaaagggattcatactcaaatttataggatcactctgttgaactcctttctctctgtgatatccctgacattttctagctctctgaaacccccttcctagtcttctggccaaaaaaatcaaagctttagcttttcctctctgccctgcactccccacaattgcatttacagggccaagtggcaagagtacaaagagatttaaaaagcaacagttatttgccccatactcttggaaccacagtttctctagtcagagaggattctcctcgttcagggttttagggacctacctagctgttgccgccactgtcattacttg

SEQ ID NO: 89228 - DNA, 1115 bp, Homo sapiens
tgggttatcttttcactttcttgatggtatcctttgaagcacaaaaattttaattttaaagaagtctaatttagttttctcttctgttgcatatgtttttgattttacacataagaaaccattgccaaatccaaggtcacaaagatttactgctagctttcttctaagagttttatggttttaactcatacatttgggtatttgatccattttgagctgatttttatatagattattttttaatgagagttatctgtgtttcttagctgttttatcttcggtgtgtttctagtgtttgaatccacatgaaattacatgaaaagttttaagaaaaacacccatttcattcttctttgtattatttttggtcatttggtggaatccacttactgacatagagttattaattttaattttctttaacctaatgctattgtgagttgaagaatacacatgttcccttttacagtagcaaatacaagtcagtgtagtgctgaaggctcttgctctgttaacctgaacagttggtctctgttctagaacaatatcttcattttctgagaacatttgtttgggatctttcaatgaaagcatctctcttcccatcagcctcttatctgcacaatgaacaaagctactgagtagagggcaaaagcttaagacatgcaggtgacttgggaactgccacatcccatatgctgtaagtgctgaaagttaacatacatattaaagttgagttctggcaacttcacaatatattctcttcctcaaataatatgctataaagttttattataaagtcatcttcttttaaattttttattaaaacaagatgttttttcatcctttagtatgcttaatttagcatttggtgatactgctctttttataaatagcatgttttaaatttaaaagtgttaagatctcttaaaatgtactttgtatttcaaagagcttctgctaccctgaaatatcacatgccgagtaaaaagctgaaatggaatttttgcactgaattcacataaatttgtttctgttctttggttattttggtgtacttagcttatcaggttcttaaataatttgctataaatagctgagtttcacattttatg

SEQ ID NO: 89229 - DNA, 1560 bp, Homo sapiens
ctatttatgacttactatagtgattctaaacttttttaggtggaaataatttattacactgtagtaagatgattgaacattacagtcctgcgaaacaaactaaatcatatttacacatagaactttgactagttaaactgggagtctttagcttcaaccagtcagcttgattatctttcgtcagaagacttctggtttatattcattaattcatgaacttgaaatattactatagcaatagttttgacaagactattgatgccattcattttattttctctctctttttaaaataacaatgtgaatggggttctaggggggagtatatacccctattggaagagcagactgctggtaagcatttctggtgtactgttttacacatagatcataggtatactgcttacaaatctgttcttttatcttcatgaaagatgcccagataatagctctttagccttttttttgcaggggcggggggtttagtgaaagcaatatatcttttaataattctgtaatttaccctttttactaatatgtgtatattttcccacctgcattcattagtttatatagatgctgatgtctttccaaaatgagaaatcaaagagcaggtttgtgttggggagtggaaaagtaagatgatgaggtcaggggttggatgtgctgactttgagttgctgatgggacttccaggtggagatgtaccccagttggttgttttctctctcattcacctgtgcacatccatgggcacaggtgttctgggatctcaggtcatggacagatccatactgatggttgggaagggaggcaggatacgctacaagaaggaagtattgcctatgctgagtcttgaagaacagataggaattaagccagatgaagagggcctgctttattttcctgtatctctcaaacatgtctgttaatcttacaaagtcatacccacttaaatgttcgtgccttaggaacatatgcattcaatctagaatttgctgaaccagcccataggaaaagggatatagagagtttttcacttgctagcactaggttaattcatcggggcaggttggaaacaactggggtgagacctggcattgttgggtgtttggggttcccagggacggcttagttcagctggttttactgtgatcctttctgttttttggaagtattaaccctcttgaggattatttctcatatgaagactatacttaaaccagaatagaatgtgaaatttctagtgactcccaaatatgcagtggaattgctgctgtattttgatatctggcatgatcatagaatcatcccgttgaaaccagaggccttttcttcctagcaccctagccatgcacttaaacataggtggcaactgaggttcacagagccattggcatttaagcaagcctgggggcaaaagcagagcaggacttgagccccttaactctgagcccatgctatttgcatatagtaaattacttttaaaaacattttattaacatgttttattgaagaataattcacatactataaaattcacccttttaaaaagtgtac

SEQ ID NO: 89230 - DNA, 1385 bp, Homo sapiens
ctgtagaaataaaaccaattttgtgaacatgcctatgatgtgcaaagcggatggggaagtataaggtccctatcatcaagaaattttaaaatttggtacttttagtactaaagttacatcatttcttacaactctttctgtaaatttggaagatttaacaaggaccagatctataccaatcctgagaggtaactattcatcattattgctttcctgtaaaataaatagttttctagacttcaccactacattgttatgatgcgataagaaaatgttgcattaatattaatatgactatatatcttcttttaaaagccttacttttctataaagggaatttatttataatatgaggagaaggagtgtatgcccataggactgtgactcagaaatttatttgacgaatggttttgttaataagcttttaaatatgcgaaagtaaaaattcaaaagtagagaatttagttgaatgttttgatatgtaaataagttagccagtttcttatttaaaggtatatatattaaattccaaccagaaaaatagtcttaaatttggtaatattttattcagaaatttggctcaaaacatggaggaatagtgtagtaaatgtaaatgaattatcagaaacccacgcacagcttcctactgaatgtaaattaggtggtgattattgccttgaaagggttgtaactgctgtttgtgcacacttgtagtagaaacagtgtatatagttttaaaagcagcaaagttgcatgtaattagtgctctctatggatacaggacaatcagggccattgatggcctgtggcagttgagcctgctgggatgatgtatacagtaaacgttctttaataagatactgctgctcagttactgtttggaggttgtgcctgatgacactcaccacggctggatttttctgtttccactctgcactcacagagagttttatgatcccagtgtcttgaagttttaatccccacatttatttacctagaataattataggaattgcaaggggatttgagaaaaagtgttgatggaagcaataataatcagctcaggaagcctcatacaagacatattgatgaactcacaattagaacaaaataggaaatagagaaatattggtactacatttgtcaacttctgttttttgtttgctttggaagttgttattcttttgaaccacagtcagatacggatttcatttccaatttcctcttgtccctgtgtgtgaacttgggaaattaataaacttttctgaatttgtttctctctatggagaatcccagcatcctggtttggtcaggatagtccagcttgcatttcttatgccctcttagattctcagaagtgtcttggattgggcaatacattgtat

SEQ ID NO: 89231 - DNA, 1018 bp, Homo sapiens
gttttattccttccctttttatatttgtctttttaagctgtccaagagcagagagcagggatcctgtcttgtctttgcactgttcatttcacacagttcacatgatctggtgtgatgttccaacagatggatcaaaaattttgtctgaatgactcatctacagagttgttgggatacttcagcctatccctaaagtatttacaagcttccccgactaatacacacacaggtgcacacactctgttctttacaatctgactttttagcaggttctgggcaaggaaagaagtgatgattccagcagcctcttcctgctcaaggaatttagagttctttctcagtctctgacttttccaactgtctcaagcctggaagagacccagaatatgagaatatgtcctacttttaagacttagtgaattatatttgcatatattagcctgatggaaagaggttgaaaaatactctgaggcttgtgaagccaattcagcattaaaattttgctgggaaatcattgagatttggctatactacttaatcagaaggtgttaatttgtctggatgtattgtaagaatatatttcagaatggaaattaacatatttcattgattctaaggtgtacattttcatatctctgaaatcagcatgtgtcttatagttaatggcatgacatagttttatcagcagcattgtgtcttggtggttgtcaaacaatgattgtcttgcaagtgatggcattctaaattgtatgaattgtggtagtgccatggagtatctttgggtccagtaattcaatgtgtaaagcaaacataagaaacaaggactttttgtgaatgtcccaatacagggtgggagataatctaaactgaaaatcaagtagtattccctgaaccatccatccctaatggagaaagtgttagcttactcatttaacaacaggtaagatgaggtcactattatatacaaccatagtgtaattttttctcatattacgttttccaactttaaagaataact

SEQ ID NO: 89232 - DNA, 1015 bp, Homo sapiens
tgactaagaagagaaattaaaagtccagtttaattctctctggacatagatccaggggttgatgggtaataaagtacatatcaccaacagggcacatgtatacatatgtaacaaacctgcacgttgtgcacgtgtaccctagaacttaaaagtataataaaaaataataattaaaaaagtacatatcactctgccaatttagcacctgaggactctataaatagttgtatttatcagtgttgtggtggcagttgctaaaagtgaaacaacaagatagctttaagagaatcttttagtgccacaccaaagaagcttcaaattaactttatagtagatcaggtagactgtgaattttactcacccctcccccatcttctgtttcttttttttccccttgactcaattgggaagatacttacctgagtagattgtgtacagttgaataatgtgtgttatcagaggagagtttcttgctaagcagaggccatggagttgggagggaggaaatgtatgaactaagtataaatactatttgtagtcttcattcccctctgattataaacatatatattatgaagaatttgaatacctaaaactatttaaaaacttaggtattctgaagtcttgatataaccaccaacattttgattcattctctgttctttctacacacacacacacacacacacacacacacacactctctctctctctctctctccccccctacacacacaatctctctcccccaccccccacacacaattttacataatagtggcattttagctactttttaacaaactttcttccttcatgacagaccccattcctccaaaccagcccacctacataatccaaatgtaatccactctaacagtccagtgcatgttcttcatatcttcttcatactcacagaatcctacatcgctattacatatacatacagagacatgcagaattctgtcattgttccataaaaatgggattatatgacaaatacttttcagcctct

SEQ ID NO: 89233 - DNA, 1027 bp, Homo sapiens
tacaaatggcttataggtatatgaaaaaaatggtcaacatccgtcattaatcaggaatggcaaatcaaaatcgcagtgagatcgatgttactctagatagaatggcaaaaagacaaaagtgttggcaaggatgtggagaaaagggaacctttacatactgttggtgggaatgtaagagtgtaaatttcaattaataaagccattatggaaaacagtatggaggttcctccaaaaattcaaaatagaattaccttgtgattcagcagtcccactactaggtgtatatccaaaggaaataagtgtcaactgaaatgagtatccacattgtctgtaaaaatcttaagacattcagttcatttctgaaaggaaaactggtttgactgttgtgatcaactgcattatagtttaaagagggagtattttagtctctttcactcattggctgccttactgaaatagcaagttcttgtagaccagcttgtaaactcgtttatttttgtttgagattcctgaggtatctgtcttttcacttactgagctgccggttctaggaagactcataaactccccatgcatcttcagcaggactctcaatcttaacaacaccagctatgatatgccatgggaaaagtaacttttatttctggtttatgtattgtttttgtaaaatataaaatacctgctaaaatattattatttatttatttattttttgagacagagtcttgctctgtccctcagactggagtgcagtggtgcgatcattgctcactgcagccttgaactcccaggctcaagtgatcctgccacctcagcttcccgagtaactgggactacaggcacttgccaccacacctgcctaatttttgtattttttatggaaatggggttttgctgtgtgcccagactggtcttgaactcctgagatagagccatttgcctgctttggcctcccaaagtgctggaattacaggtatgagccaccacccctggcaggatgaattatttcagacctttccacatgaaa

SEQ ID NO: 89234 - DNA, 1062 bp, Homo sapiens
ctaaaagatttggtgaaactctgtccctaagcacatttttcagttaaatgctaaaacttttcattctaagtttaaatgcttgcaggggatgtaatttctcagcatattgtaactattcatattttaaagtattacatcattctaaaaactctagtaaaatatatatttgatttctaatatcatttgtttaaaaattcatgagattcaagaatcaatcttttgaaagttaaacattttacaccttttctttatctctttaaattcttactccatttctcttccgctgtatagaattctgtctcagtgtaatatatttttatgcttgaaagtattctattgatcactctgccatactctctgtaaccaaaaaaaaaagtatatagattgaaatctagtatttcgtatttattttgatcataagactttcaatatttaatgatttctggttgtttttaaaacaaagaattggaaattacctgacttaacagaaatagttgttacctaaatagtggagactttaaccctgcaacacgaatcaatatttttgttcctttgtttgtttctctacccaaggtcttttcaccctcaggcaatgcatcttagaaagatgtagagaaggtaatacaagtgcattacttttgtaaagtgagtgaagaaccattgtgaaggggagatggtgaacgacaggttccttccatcacagtgaaggtcatcacaggatggatgtccaacgcaagcgtggacccaagcccattaatttttaaacaagagtacgtttggaaatttcaaatgtagaaactgattcctttacagttgtgatgatgagacccttgggaagtgttagctttgccccaaacatgtaccccagtttaaagaatgctggtctagcacaataaaagatgtgttaatggccctgtttgctgaaaggaaaaggaagaccaaggctgcatggaaaggcagggagagggaagaaaaagagtaggagactgctaagtaggtagaacaggagcagtgaccgtctctccttcctggctgtgcataggaatcagatcagattctaag

SEQ ID NO: 89235 - DNA, 1003 bp, Homo sapiens
gtgtgtttggtcttctcttgttttcatcataacttcagtgggctttggcgtcatgcgattttagactgtttgcagaaagaagcctgccctgctgtggggcagctgtggaagtacacgggcccaggctggcaggcaggcagagctgtgactacacaggccaggtcagaagaacactaagcagaaagatgtcatttcgagtcacaggcactagggttactccttgtttcctggggtagaagagtgggtaacgtgagatgtatacatacacaaaggagtttttattctgtttcttatctgtggggtttgattagacatttgtatatctgatgtgaaaaatagatgcaggaaagttcgtgaaggctggaaaacaatcttggcttgcttgctatcctcgtttgattgttggtagtagtagggtgcattgggaataagctggaagttttaaaactagtaatgaagtgcagatcacagtagctgttgaagcggtggggtgggggcgggggggggggacgcacaggtggtgtgttgaggcgtttctgcttcgagtgggggtgggaaaatgttgtgtgctttaaatagcatctgcagacctgaactggtgtgtgtgtttgtattcacagcgtttcatttcctcctccaaaattgtgtatattggcagattgtgagtccttaccttttcctaccttctctcatctctgcacactgccacatttgctagctaggcagagagcattgctgcatgtggtgtaaaagccactcaaaagcttcattaaactgaaagtttaaaggggtggaatatctcactttccgacatgactttcagttttatttcccacttttctatccctgccattcataaaaaggatctgaatcagcagtgtactcatcccacacttctttctaaaatgaggacgtgggtagcaagtcttaacactgtgtcctttcaagctgtggaatggattttgatcactatatgtaattccaattcttcattgtaaatttc

SEQ ID NO: 89236 - DNA, 1051 bp, Homo sapiens
tcctttttcggactccgcccgcctgcacccaggtgaaataaacagctttgttgctcacaccaaagcctgtttggtgatctcttcacacggacacgtgaaacaattatgtttctaacacattaatttgggggacatattcaaaccataacaataaaacgtttatgaaaatcaatgttaagggcacagccctgcacaagactgctcttatttcagatgccagttgcaagtttgggggtctctggggccacccttacttctgaccaactagctacatattcaaaggttcgtatggctaccctcaggtttaataattcactagaaagactcatagaatgccccaaagtgctatacttatgattataattttaacatagcaaaaaaatacaactcagaaccagattaaaaaaatgcatagcttccagttatcttctccctgtggattccttcatcatgttactgcttccagctctggtgtgtgacaatattcagagtgttgctaaccaggaaagttcacccaagctttgatatctaaaatttttattgaagtttcattgcatagcataattgaattgttggccatgtggttaactcaatttccagccccttctgttggggagatcagtctgataccatgtggctcaaagccccaaccctttaatcatggccttggtctttctggtgtggccagtcctcatcttgagttaactctttagcacaaactatctaggggcccattatgagtcatctgactatcaggtgtggtctgaggaacccattatgaataacaaagaccctccaatcactggaggtattttaagggtttagaggttacttcccaagagctggcacaaaggtcatacctctctttgggtaaatttactacacagatgtggtattctttactacacagatgttttaatttaaaaacttttagatttttaacatttttggaatatttttatgacttgcataatatacagattaaacttaattttttccccaatgagtagctagttgtttcaatactgttacaggtagataggcatgagcg

SEQ ID NO: 89237 - DNA, 1030 bp, Homo sapiens
agtttgaaagcttcatatcctaaaggctgtattgtctcagaatgtgaattaaatacccataattcctaagaagcatgtgagtgtagtggggttagggcttttaactaaaattggtttgaccagatattgatatttcggcatattaggaagtaaaatgtatatggatgtataattttaaaaggcaataattgtagctctaaattttagcttctaaatattagtttgcaatcaaaacacaaaatttgttccaaaatctactccaggaaatatatatgtactttatattttataaacatcattcaagtatatgaactcattctaataatgtttatacatatgtactttgatattttaaatgttagtttaatgctgtttgatttctttaaaaagtgatctgatattccaatcacttgcatgtttactacagaattctgttagctggacagaatttcccaacacatatttctttgacatatctaactgagaaaaggatgtcattgtagaggctgtatcagagatagaaacacatatgtacattcttattttgccatgtgagaaatgcagtcctgtgagtaacttaaatacttataatttcaaatcagttcttccctggtttattattcttttgttgcttttaaacgaatgggatggagctgctcttgaacttggtgggtttttttgtttttttttttttgatcattcaagtgcaaccatcaagttgtctgtaatatttaaaagctaaggcttcatggtgttatttgtaaaataacaccacataagtatttgggctttggtttctgtaaaatatagtattggttactctatgaataaaagcataatttcaattcaagagacttttgcctgaagccttataagacagatgcatctgattaactttggtgaaactggactagccctttattgtaatgtagatgttttcagggttgagagggtatttttaaaaggcatgcaaagaggtctttttttaattatttttttattttttttaagagagagcgagcgagactca

SEQ ID NO: 89238 - DNA, 1050 bp, Homo sapiens
aattttgcccagattccatgtaattgctgaatttcttaagacagcattgcaaaaattgactgaacatgcagcattttaaactgtagcaacctcagcaaatctacagctttcttttcttttggatagctgaatggctatgaccatgtagaatttttgtaagtgtattaaatacatatatatatatttccatatacatatgatctgtgtttgtgaatatatgtttcttgtgtatgtatacatgcacaatcataatcatatgaacctagggccagcagaatgatcttaaaaataattacattagctgataattagctgttatggtttctagacactgtactctccattttacgtgggatatattatttaattctcatgcaaatgctttgaagtatgtacttatatccccatttttcaaaggaaaaaactaagacccaagtcaggtaacttgcccaagatcacccagcaagtaaatcttagagatgatgtttgaatccagaaccgtagtttcagattctgccctcttcacaaatactgcctttcagcatgtgctatgtaatagtatagacgaatttttgatgctatccaagaaaatctacatacttgagttgttatatagcatatggaaagcaatacagcatagttattaaaaatagcatttctgaacacaggctgcttatgttcagtaccagcccatactgataacacacactcaaatatatgtcattgttattttattagaaatatgttgtgattcagtaggactttagtagtctatacattaaccagcgtagactcttagaaataagtagatttaaaaaattcctaaaaccaaatagctttataatcataagtggagtaaaaaaaataatttacaacaaactgtcttacaaaatatgccaggcataatttctcaagtctgaaggcctgtactttctacccctgcctaaagcatgttgctacagagagggctacatgtttacagggctctttgatgtcatagcactgttgattgcagtgtaattgtaagctggacaatctggaagctataat

SEQ ID NO: 89239 - DNA, 1018 bp, Homo sapiens
tttacacatttggtagttccagtgtagtttgtttttagaagcttttgatcctgattaacgttttctggcaacaattagtggaaacatcacacttgcagtttaaactaccagaacacattataccatttgatattgtgaatggtaaacttagaaaaggagaaaatttattaaacgctctttttaaaaagtcctctgcattgtataaaacattaggaatttggtaagctcatgtttttgtctttcagtatcaagcaaagaaagtaatgaatatgaatattgaaactgtataatcaaaagatgtaatacttttcttaacctatatttgtaggaacagacacaaaggtctaaattatgcctttcttatatatatttctttcttatatttattccaatacaggtcttaaatgaatttccatccagaaaggaaaatgcattatctttagttgtgctatttacaaatgatgatttattcagttctgcaatctgtagcctcagatttcatattgttcttgctgtgcatactactaattgattactgtacagtgattataatgaatattcatggactgactcataaacagtaactgtttttgttatttttctgactgtggttttggtcataaatcctttatgctacatcagagtgaaagaaataataccccatgaggagtcctgtatacctttccacctggcctaactttatgcctaaggcacctatattaggccttgatctggaatctgctacagacccagttatttatcatgatactttgtatctatgacacaaagacaaatcatcatagtggtcactgagatggaagcacatttttgcttctatagtggacattgctgttgatagcccatgcatttttcttttcattaaagtactttgggagatcctgtagcataggatttgggggtcaaatagatcccgagaatgaatatcagcaatgtggcttattagctgacttagtgattctttgtggagttgtgaagaataaatcatctatgacaagtc

SEQ ID NO: 89240 - DNA, 1055 bp, Homo sapiens
agatacaggcaatgaaagaacaatgcctctgttgtactggatttccagcagggaatgatgctgtttgggttaagacacaggtaaggcagaggagctttgagaataccatggctcaggaaggaagaaatgtgagaaagctagagaggtacaggagactacagaggagaagggaaaggcaaaatctggattctgagtaatcagaagttgtcgtctgctttggtggctcctatagttccctttgtcttcatcagtgacctgagaattcacagggttttcaccagtaatgtcactgggcaagtgtgccaggccgaccacccaataagaggacaaggaagagagagtggaaggatcagcagaactgtcaccactctgattctgtggtgtgggagctggggatgtggggtggggaatctctctctagaggtttgttctctgctgtgttactcccatctgtgatggctttttctccatgagcttaaatggtgatggttttcttccaactattagggaatacattgataatgttagtgattcatagagtgtctgaaataatctctgcaaatgttatgtgtagttggttatctggagaagtaacaagcttttatcaaccataataactaaatttgtatggtgatttactgtttgcaaaatattcaattatgttatatttgaatctcccacaatcctaggaggttgatgacaccatcaattcctttataaggatgaaggaaatcaagctcaattactttcctagaggcactgggtttgatagcaaagcacaaattttaatttactggtttactaatgcatcctgcttcattcaacacctcttcacctttaaaagtaaaaattgtctcagtgatagctatttacctttagaaaatggctattacaaataaagaactcttacatttactcagattgttcagattaaattctccctttaaacatactttcaaggtagtttatgtacacagtaggtatttaataagtgttaactgcttgattattgtctctttgtactcctccagagcaatcattctgattctcacaca

SEQ ID NO: 89241 - DNA, 1030 bp, Homo sapiens
aatatacaggaattttaaaagagctttattgtgatataattgataatgaactaaactatttaaattgtacaaattaataggttttgacatatatatatacatacacacacacacacacacacacacatatcctaagccatctttagaatcaagatagtgaacatattcatcaccaccaaaaatttcctcaagctccttggtaatgcctcccacctgtccctcccccatcccaagcaaccacaaatgaattttcagtcactatagattagtttgcattttctagagtttatgtaaatggaatcagacagtacatacttttttggtctggtttctttcactcagtataattgttttgtgacttatctacattgtgtgtatcaacaatgtgttcatctttcttactttatttattgtttatccattcatctttgattaacattgaggttctttctggtttttgactattacgaataaagctactatgaacattcatgtgaaaatgtttcaacagatacatattttctttccttttgagtaaatgtctatgggaattttaaatgatccatgaaagaaaaaggactttataaatataagaattaaaagttcaccatggaaaatcattatatttgacaacattaacattttaaattactgcaactcaaaaaaaaatgttcttaaccaaacttcaggttaaatgatagtcaaagaaactgtataagtaatagctaacaatgataagaacttgccataagcaaagcatcggcaactctgtctgatctatcagttgatcttcacaacagtcctaaaaggttaaacactatagtgccacatcctgtgtacttaaccactgttcagtggtgcctccctgtgtggagaaggagtatatattatacatagacggtatatttgtcaaaaaaagtttaatatccaatcgtaggaaattatgtgaaacataatagaaataatttatatattgtatatctctgaaataaatatgtgagaccatatgtcaataacctaaatataattt

SEQ ID NO: 89242 - DNA, 1022 bp, Homo sapiens
agaatggccagcctgttctctggttagtctggagctaattccttcaagaatcacaggtcagaagtgttgcattgtggccccttgttcagtcttggcaaaaactgagggaacatggcaaagtgggaagaatatagaccttggagtcagatttgggttcaaatatagtaattttcatggctctgggacctctctgtgtccatatgtcctcatttggataacccagttgtcagctgggacttcctagccccttgagggctcacataaagttggctcaaaccaattcgaacccttttcaccacctttgggaatactggagttactgtcccctaacctgttattcctctcaccctaatatctatgcacattgtgttctcttttccccctttatcaaattgcaagtgaaactctgtcccctcactggtgaccaccaaagagctcactcatgttggtgtgtccagtaacttcactgaaggtttggggttggcaaggactggtgtggggaggctcacagcctttgatgtctctccagaaacctctatctgcttttttcacccttcacatatgcctccagatagtttcctaggaacacaaatattttccctcttactatgcagagaaatttagctctcttctgttcttgttccaagttttcatactcaaatgcatcaagatgcccagaacaaagggtcttccaatggcctcctctgaaagcaaagctataaatagaaaaaaagggttatctgttatcttttgaaaatggtgataatttctaccttgctatttttcaagatttgtggccgggcgcggtggctcacgcctgtaatcccagcactttgggaggccgaggcgggtggatcatgaggtcaggagatcgagaccatcctggctaacaaggtgaaaccccgtctctattaaaaatacaaaaaattagccgggcgcggtggcgggcgcctgtagtcccagctactcgggaggctgaggcaggagaatggcgtgaacccgggaagcggagcttgcagtga

SEQ ID NO: 89243 - DNA, 1085 bp, Homo sapiens
tatgcttcggtatctctgccactacagtataagcaccttgaggacaagcactgtggcttgatcactgtagtgcactcagaggacagcgtggtcctggcttgatcactgtgatgcgctcataggacagtgtgatcctggcttgatcactgtggggcactcaaagtgtagtagggttcctggagtatgaaaggcactcagtaaaggcttgttttgtttccattcgtttatttttaattgtcagataattatagtgtatatttatggggtacaatgtaatgtgttgatccgtgtatacattgtaggaagagtcagtcaagctaattaacatatccatcacctcaccaacttattttttgtggtgaacatgctgtttgttgagtgagtgctcagaattgaaaggcattgtgtgctgtggaggtgcagaggacaggcaccaaacccaggcagttgtagaaagttggggaagatttcagaggaagatagacaaactgagatttgaagggtgacagcaagttagcttggcatagggagaggacaatcctgtcaaaaaagagcatggacagagtcctagatttgagaaagagcaggggccatagccataggcaaaaaaccatgcagctacaccttttgttaactatgcctgagaatcaaggcagaagtcagtgtggtagacatacgtgtgcatctatatatgtgcacatgagaggaaactttggtttttgaaagtttaattagatgcaataaaaagtcaaatccgtcagcctctaaaactcttgatatttagcccaaagccctctacatgattaaacatatccattaactttctcattattttctttttcctcaagctgaagtttattttttctatcacattttaattctctgttttaactgttggcattttagtagtatattttaaatagttccactgcagacaatagtatggttaaggaaagatatttgaatctaaccaccttgcatgaagttgttatatacaggaactgttgcaagttccaaacactcaacttagaaatgaacatttagaaaattacctgtttataaattgaggttttgagtgtataagg

SEQ ID NO: 89244 - DNA, 1045 bp, Homo sapiens
ggtggacacaacagggatgacattgtgtttcttgatccaagaatatggtttacaacctaatctccaatgttgattacatgtgtgtgctctttttccctagaacctgaggaacttgtccttgaataggacagacctgttcaagtcttaaagttatatttatattctaataaaaataaaattaggggtaaggatcatatctacagttgttttatttgtaaacattgtaaatttctttctgcacacatggcataccttatgtgtcctttttccccgcactaggggctcaagatctggatcgcatccgactctccacctacagaacagcatgcaagcttaggtttgttcagaagaaatgcaattgtaagtatgccagttgtttggactaattaccatcatgaatcctatagtttacatttggtactaagtttattaaactagattctgttacaaatattgctaatattgttatatatgtttacacaacaataaaaggggtattatgaggcacaaatggtagagatgactcctaagtagtcttgaaatctgaaaatgcttaaatactaaagcatatgaaccgtttagttcatactaaaaggatgaacctctggatacatatacaatataattctgaccttggaatggtttaaatctggatggatgtttttcttcttttctctaaccttggtatcataaatgcagtgccatcaaaatggtttccaacatcattctcagcaaactatcgcaaggacaaaaaaccaaacaccacatgttctcactcataggtgggaactgaacaatgagaacacacaggaaggggaacatcacactccggggcctgttgtggtgtgggaggaagggggagggatagcattaggagatatacctaatgtaaatgacgagttaatgggtgcagcacaccaacatggcacatgtatacatatgtaacaaacctgcacattgtgcacatgtaccctaaaacttaaagtgtaataataataaaataaaataaaaatggtttccaagaactttataaaatatcaaacat

SEQ ID NO: 89245 - DNA, 1029 bp, Homo sapiens
ggtaactaggtacatggtgtttctaataaccagcagaaggactgcaggaggaacagcaggttagtactacggtgagtctgagtattatggaagagctctgtaaagataatgagttctcttttgaacatacttagtttggcatgaggtatctaagtgaaggtttcagataaatgattacataaatctggtgctgaggcttagaaataaatatgaaagagtcactagcatagggttcagtcaattttgcattctggctggttgtatttgaggtattacactaaaaatgacagcgacagtgataaataacaaatgatccctctctgaaacctagtaaggaacaaaaccacgattatttatatcttatttttcttatatataaggcatatgaatcttattcatataaattatttattccatgtactaaagctttgccaatacaagctttacttacctttcagacacattattattttaaataactcttttgaccattcttaagattagcaactatcaaataaatgaattactaatatgatacagtttctgattccaaagtataagaataaacagttgattccagctggaaaatcatttagctgaaacattatactttttatcatatcccctttatatcacatttgtgaaggacagatttgttatacttcctgaatcaatgaggatttggcagcacttgtgtcatttgggtagaaagaaagtgttcaaacagagcttttactttttttttaagacagagtctccctctgtcgcccaggctggagtgcagtggcacaatgttggctcactgcaacctccacctcccgggttcaagcgattcttatgtctcagccacctaagtagctgggattacagacgtgcaccaccacacctagctaatttttgtattttcagtagagacaggatatcaccatgttggccaggctggtctcaaactcctgacctccagtgatctgcccacctcagcctcccaaagtgctaggattacagacgtaagccaccgtgctcggccag

SEQ ID NO: 89246 - DNA, 1044 bp, Homo sapiens
agccaccatgcctggcctaaaactatatttttaattgtacattacagtaattgaacggtaactctagagaaagcaccctctcaacagtgcaacatcttttaaagccacctataatgaaagaataggtacaatggggacagtgtggcaaaaataaaatcacttcccaaagattttcagtcagaaagctgaaaaatcatttttcctaccttttgtgtatttgcctgccagagaattctgttctgccttccacctcacagatgtgctccagatccacagaaaagttggtccataggagaaaaatggcaattgaattttatgtatttgctttctttgttttgatagaaataattccctcctccttgtctgcatatctcatgactcctgccttcccaaatacataggttcacattctcaatatgaaatcttataaactacatattttacagcagccacctcagcagagaagtgctcctgacatctctttcaccatcgatgcgaataagcagcaaaggcagctgattgctgagctagaaaacaagaacaggtgagactttgtagacgtgctggcttgtttgatcaatgtgcgcattccttaataaactatggtcgtgctttaaagtttcagggctttacaccctgtatggctactcaagggaagacatctacactcagtgatgctcacttccaaaaagctggtctttagatctttagaacttcagaagctccatgagaaaacggcgtgtgcatgtatgtgtatagttctgagatatcaatgcaattaatgttgcccctctagacggtctcacttccctttttctgagatacttaattttgttcaagagcttctagtacaggaggaccctcctgggtactaggtagaaggtgtctctaccacccagaaacaggtaggaggctcaccagagaggccccctggaaggaccctgagctaaagaggcatctggagagacaccaccatcacccagttactctccaaacatccaaagatctccacctgcagcccatcagcaggttcttcctctattc

SEQ ID NO: 89247 - DNA, 1801 bp, Homo sapiens
ttattccttttccctccatcagtgtcctctttaacaattggtattgggaatactttatctttactcaacaaaattgacttttcagtaattagatatgtacagtgtagaattcaattcttgttgatctatcttgggtaagacaagactagatagttcataacctgctgctgtttctggcctgttaatctcatttgataaccaaaaataaactctttctgcttccctttccaaatataccaaatgaaaaggactgaacctatctttcccctcagtgaatgacaggaagctttgaaaactgccccctatgtttctattgcttctgtcaccattagctatgactctttccctatgggatagaagtctattcaccaccagccatgttggtatcaacctagcctaacagagtactgccttttattgagatgtacacataccaggacagagaggtggattgtgttgaaaaatggttgtacatgcagagaaaagagatgggcctgtagtctcaaataaccaagtagacttggagtgatagtcactgaggtggcagaggcctggacctgccgtcaaaggtgtgttgatgtttccccatcttgcgttccttcacactgtgtacatgctcttattggaaccctgggtaatctaactgttattgattcaatctttctgtaggaagaagaactgaagcagggagtaagttatgtcccctactgcaggtcttaactaacagtggaggggcctgccgacctgcggttttctcattgcttttgctctaatgtatgttcatgcttcagtttggaaagagaaaaaagtcatactaatttgcttctttttcaatgtagtgcttgaattgagatatataaatttagcattttttataactatcactactatccacatcaaaagaagaactatgacatcttttagaaaagggaacgaattgtcatttattggaaacattttagatccccagaggtataagtttcaaaccagtcttagcttttcaagttgttgatcagacccttctcttaacagagagataccacagtcactagagataccctgaggttcatgtcatcccaaaacccacagcactcagaagctaacctctacacccactcacactgtgagtattcagttcggtttcattttactgaaaacctgtgaaacctctttttataaaaatcaggcaattaaatcccttttcatcacacaattattgagccttgttccccatggctcaccaaaatgtgctcaattttgtgagagaaagactgtactccataactgactattcacgtcccatctttttggctcttccccaaagcagaatccttactgttggttgacagtaatctctttttaaaaagtaactctcagctttttccttagcaccagagcctttcggctccgggagacgagagggtcattacatacttttttttttttctggaaataggggcattgtgactttatagcctaaactggagctgtctgaacctgtggtcaggctcaagagccagcagggggagcagcaaactcaaaaaaaaaaacaaattaaattaaattaaattaaattaaatagaagcaaaataaaagcagctttaatttcaagtgcatgtaccacgctatgtatgacaatatatcccactcactagcattatttaaaagtttcacattatttccatggatcaattagaaccacaacctgtccaatttcaacgtatctttcatttcttctgtatgctcttttctattattcattatgtgtgtttgtgtgtaacaaagaatgtttggaaaatgc

SEQ ID NO: 89248 - DNA, 1111 bp, Homo sapiens
gggatcaattttatctctgccattctcttgctcagaaaccttgggtaatccagttatctcctcttagcctcagtttgctaatatataaaatgggaataataatacttcatatggttattaagaggattacatgaagtattaggggttaaagtgctttatggactgcaaattgctattcaaatataagatattaccacttgtaccactgtactaggaaaatgaaacaaaacagtgtatgtaaaagtgctttgtacattgaattacttacaaaagtggagttatattattattgtgaacttctcaccatggaagacaatctgagttcccagggatgagacggtaacccacactgatagccaagagaatcctacttcttaataaccactctgtccaacttcccttctctagtccccactcccggctgtgtttggtcccttgataaagaggacagagacaagaggctcaggagccttgctaaggcctctgccttaaaaagggtgtacaagaggaattgccaaagtaggaagagctcagggcatctgaccagcgtctgtctccattgagggactttttgccagccatggccagcaaggctcccgcagcccagggcactcagagcccctgggctcagccccagccctgcccctctgactccgtctccagataaagcaattattttcacctctctgagtactgggctccacaacttcacatttagagtaagaatgcatacttcccagggtcatggagagaaatcagtgagagtgtatgtgaaaaccctttgaacatcataaggcacaacgcaaatgtgaaattatttattattggcatgggaaggtcaaggatgcagtggtagctcagaagcagaaggtttcaaggtaatggggctgagctgccagagtttgctggggaaaactagacccctccttgagcaggccgagggaagcaggctgcaaaaacatcacaaccgggcaaagttctcttccttgggcctggacagaccattacaaggtactgttgagagtgaaagaatgggaccctcagcccattgggcaccccatgggttattttctgtgctctgttctgttttgcttcatttttaattctgggt

SEQ ID NO: 89249 - DNA, 1040 bp, Homo sapiens
aatattagatttttattcattttaatgaattaaaaatgtaaccttctatgagtaaaatgaagggaatttctactaatgacttaagattcaactggagtttttaccatcgctggtaaatcttaagctccctctccctctcctttcttttccgtgcctcatgacttccaagaaaaggacagggaagaagctgggagactataacaggcctgtgtatctccactcaaaacatactccctggaggagatgtcaaagtggttttccttgaatgctctgtgagcatacggttgttggatggattggaacgctactctcactcaatagactctctctctctctgtgtctttgtgcatggcttcccgccaaataattcaccagcttgactgcatcacagacttgacgtgtcacctttctcgtttgtgtcctttgtcacccacaggtcagcttgcaaggttgaatgcaatatccttttatcacactcctctcaagtaagtaccatcttatttaggaggaatcatggccactgtacactgaattctgataacctgtaatgcgaattcacaatcacttctcttagtcatttctttctatgtgataaaataccctccttaactgctgatatcgaagagtcgtctcagtctgtggagggtttcattataaaccagtggagatttgccagacatccttgggaggtgacttcttactctattagctaggaaaattggcacaaagcttctaaacctagagacgttccagtaatcctctgtggctatgaaacttaccaataagtttgtcacatcaccaatccatgacaatatcggagtttgtagccgctctagcacttgaaaaggaaaagtcagtacctctagagatgggccagcttgttagtcatactatacctcgggctcaagagatcaaatgtgtgtgccttaacgagtgaaagcaaaatcatgcattaataaagagaacaaaagagcccaaacagaggaaaaattctgcagccttatgtttttggaatacctgattcaaatccattgtggaat

SEQ ID NO: 89250 - DNA, 1058 bp, Homo sapiens
gcgcggaaatccagcccgttatataatggagcagacactgcctgcgacccctgctgcaggcatgcatttgtgaaggcggttgtgattatttggtatctgtttccatgtgtcatgttgggtttgcattgaggctccgcgactgcagatggaaagcattttgtgaataggtttgctgccttcgaggggtctccctccatctctttccttccacactgataaaaatgcatgctgttttcccccgctgtccaaagggagacaggcagtagcacttcctttcctccttcccttttagattttaaaggagccattaggtagcagtgccaaaaggcagaaaacgggagggtggggagaaaaacgtttgcgcttaacctggagagtgtgcaggaaagatggaatcctctagattaagctgcagtctgtgatgttaaaccgccagattgatggagctttgtaagaattctgctcgctgattggtgcagggattgacagcagaggtgatagtgtcagacattcaccaaaattttctccatagaaccctaggtttattagaaagagactggactgcaaaggacttgaaaaaaactgggcgctgttatgcattttctaaggagtttatggccaccgcttgggtgggggagcctttccttcttatttacagtaggaaggtgattcctggtcttttgctgaggtctgttttgaggatgggactgatcttggtcattgtattgtgagccttttgattaatgagttggcctgtacggttggcatcatttttacattaacatatctggcaatatgttccagtagataagctcattaaaattgtttgcattgtttgataaggataacaatgtaatggagaatgcagctagagtcttatgcagctcaaggccagacttgaagggagactgatagcttcggtcatatttcctctgaagttcttttgtactggggtagttatttttaaatgttaccttgataaacgctaacaatgcttttgctttgaggcagagcacacatacctctaaagcgcatcctctcagctgatgagcaacagg

SEQ ID NO: 89251 - DNA, 1066 bp, Homo sapiens
aaaactaaaatttaagcctaaagcattggccataacatccagctttgccagttttaaaaaacatgctgttgttaaggaaaacaaagagaaatatcgtaatattgtgcatgtgtgtgtgtttttttgtgcacgtgtgtgtataaaagagttgtgaaagtgtgttccattcaatagaggctattgtaacatggctcacttttatcagaacataggcttcacatcacattccccaaaacagcagttatagattgcaaaagtctacgttcatgtctttattatgtatttgttagtatcatctaggtttaatactgtcaaaggaggttttccaaaaataaagatttttgtccttactatttttcttagtgtttgtaaaaatcagaagattacttgatgctttagtacatgcccaactctggaacttcttttacggattttcagagcttctgttaatggaatggtcttccgggtgctcttgctttggggagaggctcactcctgctctgtagctggtatctgttgacagtgcattatcttagagcagtgctgtgagattgtcctctggaattcagaaggttgatttccttatgcagcatcttttctttatttacagggacctcttgaagctgcagtgaataattctagattaattggaaggggaaatttgggactaatttaaatattctgtttggtttagagaattaattaattttacaaatatttgaaagtctgctctggccaaggtctgtgctagatgccccttgaaggatcttgagtcctagtaaagtccgatggaaaaccgctcattttgtaaaagacttacagtgttggtattttgcttagtctgatagcgaaagtggtttgcatttcctgaacccccagtgacccaaagggggaaaaaaagtttctctgaagtccagtgtgctgtaggaagctaaaagacactgagagaaaccagaaattttgctgaaaagaatgtaggctttaggatcaggcagaattttcactggcctggccaggtgtgttgggcagtggtagaaaataaaagcattgaaaagcaggcggggta

SEQ ID NO: 89252 - DNA, 1050 bp, Homo sapiens
atcaagctcctgccatttatcaagtacagcaaagggccctaaaactgagattgcaggtaattgccaattttttggccactctgagtgcagtcctctgtcctcctccaactcagcctaacctcccaccttagggaacttaattgggcaatatctggccttcatgtgacccctgtgtgtgatgacggccaggaaacaagccatctgcattcaccatgcatttctgtttcagccctctcacccaggagtctgggtgaaaactgagagaacccccagggagactgaccaattaagaaaaaaacaagaacaaagctttgaatatattatcctcagtatagggacctgctcactgtcagcaactctgaaataaaaaagcttgtggaacttacgagctgaatgtctgctagaaaaggaggaagcagaagacaggatcattgggagatggagtgtaatgggaagtgagtgcagcatggaggacagtgagggtttcttggggtgaacatgccagcctctagagagagtttagttctctgcctccctacccccaccccatctctctccctgtcttttcaagggcagagtaaaccttcccttcgacacttgttctccaaggacagaagaaaatgaagagctctgtgttagcctaggcaggggtctggcaggagaagggaaacaggaccaacaagtctctcccaagtcccttaatggggcctggaatacacagtaaattgttaagtttgagtttgggaagccaatttgggaagccaaattgataagtttgggtttgggaagccaatttctttccccctgaaatttttgacaggcagatagcattgtcataacaatgactttaagatgtcagcatgtacctatttccagcctgtatgataagtgtgtcactgctacctctactccagttcaaaatttggtctgtaccgaaaagggaacctggattgtcccctacctcctttcctaacctccaggaggaccagttggggtcctcaaagtgcacagccaggaagttgcttgaagaggcagtgaggtatagtgggc

SEQ ID NO: 89253 - DNA, 1034 bp, Homo sapiens
ttttatataaatgggatcacagagaatgcactcattagtgtctgactactttgactcagcacaatgattttaagattcatccatatgggatgtctcagtagttcatcactctttattgctgagtagtatttcattgtatggctataccatattttgtttatctgctcaccagttgatgaacatttatgtttccagtttttaggaattatgaagcaagtttctatgaatattgttatacaagtctttgtggaggtgttttcatttctctggggaaaatacttaggagtggagtgattgggtcatatggctggtgtttaactttttgagaaactgtttggcaaacagttgtccaaaatggttgtaccattttacattcctagcagcacagtatgagagttctgattgtttcacatccttggcaacacttactatcagtctcttaaatgttggccatccttatggatgtagaatggtatctcattgagattttaatttctattttcatgatgactaatgatgggtatgttttcatgtgcatattggccatttgtgtgtcttctgtagtaaagtgttcaaatctttttccatttaaaaaaataggttatctttttaaatagaattatacacatatgttttgcataataatatagtcttgaattgtattttaatatgtacaggtcttatattcttaacttgaatataaagtcccccccacacacacacacaaaaagacctagtctttgttcacaatgacttttacagcaattagttacatggtccatcctcagtaagtacatattaaatgagtctatttagcccgggcactgtggctcatgcctgtaatcccagcactttgggaggctgaggtgggtggatcacttgaggtcaggagtttgagatcagcctggccaacatggtgaaaccccatctctactaaaaatacaaaaaatagctgggagtggtggcacttgcctgtaatcccagctacctgtgaggctgaggcaggagaatcacttgaacccaggaggtgaagg

SEQ ID NO: 89254 - DNA, 1067 bp, Homo sapiens
actagaagctgctgcccctgatgcctagaacagagctctcattaagctgcagggcagctagggagcttttggtatctgtgttccagacatttccctactcacctttaaaaaaaaaaaaatgcctagaagacagggtcctttaattcactcaaccctagtctgttcctagccatctcacatagcactaggggcacgtattgatatttgccttttgtatgatttggcacacctttgtttgcattcattcagcatttatttattgtgtacctactgtgtgccacacacagttccagacacaggagataaagctgtaaacaaaacatattctataaagtttctgccttcatagagcttacatcctgggggcaagaggagtggacagatggtaaacaaacaagataattaccaatggtgttagtatcaccgagggcagagtagagagatgtgggagtaactggaagcggccacttcagaagtgggcatggagggttcactggggagttgacatttgagccaaacctgaagcatgagatgcagccaaccctgccaagtgctggaacaagctgctcttccgtggcatgaggtcttgagccccagttatccctaaggatgaaacttgaggctttgctctgtcatttgtttcttattatgagaagatttagaaaaagcagacaccgaagtacctgagaaggaactagcaccaccaagagtacaagagagctcagaaccaggaggtggggaccactcctacaaaatgtgtgcaccacaggactttgcctagtggcagcatgattgtttgatgaccgcatatgcttctgctatattgcatgcgcctgattttatgcagtggactaacaactgagcatgaccacccactatggtaccagcagcacctatgtcctgaaaggttgacccagggccctgctcgttgggggcagcgtgggcatgactggaaaagacctgggatcatgggaaagagctaaggtcagggtaagagggaacgaggccaagtagggctgggaaagtaaacagaaggcatatggtcaagaaggagtggatgtgctggg

SEQ ID NO: 89255 - DNA, 1013 bp, Homo sapiens
gagaacttttgtagttctctcatgttttcctctctttttcctcttaagtttattttgatgacttggagcaggtggtagccaggtggaagaaaatgtatatttcttttctctggtagaagctagaaggagctccttttatcctggtttccttggctttatagtgtgaggttctgttggttggttgtggaacctggtgatattctgatgcatggagtacaatacacggagtttagggttgggaagtggcaggtgctgtattgttgaggtacagtcccttccctctagctcccagatcctgtggacaaggagatataagcgcattggtaagaaggacacactctgctctgagtgatgatggtgcctgtaaggacaatccccttccagcctagcagtcctctaccacatctgggtacagtgagactcactccagtactgttcttgtttctttccaggagcggcctattgccaattcatggacatgctcttccctggctgcattagtttgaagaaagtaaaatttcaagcaaagctggaacatgaatatattcacaattttaaacttctgcaagcatcatttaagcgaatgaacgttgataaggtaggagacttgtacctccataaaatgtgttgttttttcttaaaattgtttttgtgcataaatgcaaaagtccaggagcataccaatgggatatatcttgatatcccaacagtaggctggggtctgtacctagcataaagcatcaccctaagttcttgtatttttatgaggttttcatttcagattttctaaacttgtagccagtagactaaaaactaacagggctcacaaatgttaaagtgttattagttaaatttagcattgcagatgagaaacttttaatgtttgccagatgccactgtggttctttgtattttgttcttttggagaaacatcatgtcatggcagaaacagcatggttttgaatcccagcttcatgacttgagcaagttatttaaattctgagtctcagttt

SEQ ID NO: 89256 - DNA, 1056 bp, Homo sapiens
aaagagaaccagatttgggaagaaatcttgagtttgttttgaacatactaagtttgagattcttttgtgacatttaagagaagatctacataggcaatttttgtgttgggggtggtgcacatgtgtgtctggagctcaaaggagttataggctaaagataaacatttgtgattcttccacatattgatgtaatggaagctggaagcaaatactgaatgataaagggtagagtgtcttgagaaacttggacatttactggttgagtagaagaggaagggcttgcataggaagcagagaaggtgccagaaagaatgaaggaaactaggaagtgatgtgtcagggaagcagaaggtagggagcataatggtcaacaatgtctacatctgctgagaagtcaagttaaatgaggcctgaaagagttcattagatttctcaacttgaatgatttctccgttcagtagaatggtagagccaggaatggcttgaggaaaaagttggagaaaggaaattgagacagtggaaagatccaactttggagccataatgggtgagcctatatagaataaagaaaactaagcacagatctttggaaatacatacatttaagggggaggaggaagaagaggaagctgcaaaaaagatgaacatcaggaagaaaaccagaagagctcagcatcagagaacaaaaaccgtaggaaatttgtagaaagaggggtcaccaacagtgccaaatattaattgtggcgatatcaaataggatgaagcctgaaaaataggccaaagtctgactcctaggaggtgattaatagtccctcagagaattggtccattaaaatactgagggcataggcctagattgcagcaatttaacaagggcttgtggaagtggaggcagtaagagtagattcaacctttaacaaatgtgtcagaaaaaaatggaggaaaataaaaacatttggtttgtgtagggaaaagagtgatagtagcttcaggaaataagattggaaggaagatgttattttttttcaactgttcttgtttgcttttaggataagg

SEQ ID NO: 89257 - DNA, 1050 bp, Homo sapiens
gatacggctgactgaggctagtgctccctggagttggtgttcatgccatgcttcactgggttagataaaggaataaatagggctgtttatttctaaatagtgggaagaacaattcacctatctgattctcagttgataaacataacgtaagccaaaagggccccaagcagtctaagtagatgtcccaaagtccttgagctaaagctcctgagctccctcattgggaggggcctctttgcctgggacaacccatgaaatgtggctgctgtcctttccttagcctgggaacctctaacactgctgctctggtatctaagcctacatcaggttagtaacataacaaagggtctccttcagggcgacactgccgagcaagaagaatgacagcaagggagggactaggaaatggagcaaaagcccacatccctatccattagtgaggagtgacaccccccaccaaaataccatggaggccaggggtgctgcttttatattacagcagctttactcatggttgtcatgatgctcttggatcactgtgtttggtttactcttttacaaaggttaggaaagtatgccatgtattctaagaagatttccttccaaaacaaaatagttgggtgcctaaagcctgacgactgtgctttctagaatgatctgttctttgatcacatggggaagctaaggcgcccctgcatatgtatcagacaccggaagctgggagacgtttgcatggcgagttgtgcctaactaagcctggtgccctccacagccttgagacgccatgctggcagtggcaatgggctgggatgctgcagggccccattcccagtcaattatctcagctgaaacttctcccctgcccacaggagggccacacagaagagccggaagcagaggagcaagcccacgaacagcagcccccgcagcaggaagagtactgacccaccccggctgctcttgacacttccattgtgtgtgggaacgtttcttctggagaattggaacatgtgtggccccaagctcaacagaaaccagttgttcccaatc

SEQ ID NO: 89258 - DNA, 1022 bp, Homo sapiens
ttcacagtattcacaaattactttatagtgtggactctttgatggcgcataaggaccgatctgtgcctgaaagccttcccacattcattacatatataagcttcatccccagaatgaattctctgatgctgaacaagggctgagctccttttgaaagttttgccacattcattacactgataaggttcctccccactatgaattctctgatgtctgataaggtttgagctcaaactgaaagcttttccacattcactacattcatagggtttctctccactatgtattctctgatgagtaatcagctctgagctctgcctgaaagcttttccacattcattacattcatagggtctctctcctgtgtgaattcgctgatgtctaatgagttttgagctctggctaaaggttttcccacattcattacactcataaggtttctcaccagtgtgaattctttgatgtataatgagatatgaactttgactgaatgctttgccacactcattacatttacaagctttctcaccagtatggattttccgatgtctaatgagggctgagctctgattgaaagctttcccacattcactacattcatatgctttctcaccactatgaattctctgatgaataataagataggacctcaaactaaaggccttcccacactggttacatttatagggcttttctccagtatggattctctgatgttgtgttagagaggaatgctgcttgaagctgtgcccacatacatcacatctataaggtctctcttctggaggaactttctgacacattatagagtctgtagttagaatcaagcatctttcagcctcatcataaaggtctctctttcctagagatttgtttgtgaagatcacttgactaaaactgcccccttgggaaggagatcttagtttctcccctgtagcacttccttgcttccacactaaattgctttcatgctcactaattcctcgaaatgaaggttcctgagggagtccctgtgatttttc

SEQ ID NO: 89259 - DNA, 1106 bp, Homo sapiens
tgtggactgtgtgaggcacttcgtctcaggaactaaaaaaaaaaaaaaaactgacccaataaagaacagtgacagagcagcaggaaaggtggggaaatggcttcatcaatgatttgttgagcccagggcaggccaggaattagataggcatgagaagaaagaatataatttacccaaaggttattttttgagtacctactttgtcccaggaactaggaatacagtggaaaacaagactgtagtctctacagtctaatgggcaaggcagccagacaggcagtgaaagtggaatgctcctatgtgaccttaaggagcacctgactcagccttggataaggaaatgggggaaatggcctgaaggatgaggaggagttagccaaggtggtactctagggaagtggtaccccagtaaagaacagtagccaaaggccagaaacaaagtgtggagcattccttgagttcctgttgtagtgaggtcttgtctgtcagagaagtctgggtctggccagactcttaagcagtgccaatggagaagttcctgttaatagacaaaacctggagcccttgggccacagggtagtcaagagctttgtcttggtttatgtgaccccagggaaagggcaaatatgtggtttccttgcccaacctgtaggctatcctagaacttccatgagggtggtggtgggaatgagggtgagaaagagcccagcctatacctcaagagtctgctagagtgttaagactctattctcctttgattctaaagacaatatcagagctgctgtcaggtttcttaaaattcccaacgctctggatcagaagctgccatatcatttgtttctggggctatacgcccacaattcctagtacattcccttgggctttggtgctcaaaaaatatttgtcagttgctgggtctgtgacattctttgggcacctcgcacatgttcagttttgtcttatgtcaccagtatttcacaatatcttttgcaatttttttttttttttttttttttttgagatggagttcgctcttgtccaggctggagtgcaatggcacgatcttggctcaccgcaaactctgcctcctgggttcaagcgattct

SEQ ID NO: 89260 - DNA, 1362 bp, Homo sapiens
gtcagtcaagacttcccttttctgaggggcctagcaggaagagaatatttagactgatgcttagtgtaagaaggaatgttgtacaggttaaccagcaacacaaagacatattcaaaagacctaataggtcagaagaataacataccacaccaaaaacaaatctgtatggaaatctagaatcatgtgcatagaaaaagaattttcatgaggataaaaagaagcaaagagaagtaatgctcttattggggcgtgcatcagtggacatgtgctaaccagtaagaacagcaggaggcctaaatgcccatgtttagggagagaatatggaaaaaatggatgggattatttggaaaagatgtaagagattaaaatacgtggtaagagctactcaactcttgtttttctccttttccatagataaagacctgaacaaactgaaaaggtaggacgtaaagtaggaattgtaaaacggaaatactctttatataagaaagctctactgtatgtcagaaagcaatgtaatagatagaccaagcacagtggctcacacctataatgccagcactttgggaggccaaggctggaggattgcttgagtctaggagttcaagccgagcctgggcagcatagtgagaccccatctctacaaaaaataaacagaatttgccagacgtggtagtgcatgcctgtagacccaagtatttgggaggctgaggtgagaggttcgcttgagccctggaagtcgaggcttcagtgaggcaagatcacaccactgcactccagcctgggagagcaagaccctgtctccaaaccaaaaaaaaaggaaaaaagtaaatgtaatagatacttgctaagggctttgtatatacttattattgttatttctcagcacgtatgtagcagatgaggaaatgaaggctaaaggtcatatatctacaaagtggggaggtcagactttgaacccacaacctgactgtggagccacttcagtatactctctccccataagaaagttccaatagaaaaaaaatgctacttaagtagggaaatcacaaaataagtgccaatgaacaataaatgttcaacctcactacagttaaaatgtatattaaagcaagagttgagatgacacttttccttataaaacagacagggattcagggacattgggactctaatgctgctggtaagacatgaataaatacataccatctctggcaatcaataccagaagctttaagcattgccttttgactttgaaattgtacctggaaatgtatgtttcagtaaccatcatgaatgtacacaaaatcctgaaactcttaaaactgatgtcacaggccaggcacagtggctcatgcctgt

SEQ ID NO: 89261 - DNA, 1134 bp, Homo sapiens
caatatggtgaaaccccgtctctactaaaaatacaaaacaattagctggtgtggtggcatgtgcctgtagtcccagctacttgggaggctgagacaggagaattgcatgaacccgggaggtggaggttgcagtgagccgagattgtaccactgtattccagcctgggtgacagagtgagactgtgtctcaaaaaaaaaaaaaaaaaaaaaaaaaacactgatgtcaattaatattaaatgaagtattcatgatatattgttaagtaaaaatattacaaaacaatatgtacagtatgatcctatgtaaaatatatatttatgtattaaaaatactgaaaacataaagtgctatactggttatgtgtgggtgctgaggttgtaggtgatgtaatttttttcttgtgcttttttgtgttttccaaatttttctatagtaaacctctaatactcttaaaattagggggcaagagtgaatggaatcccaggatgcttgagaaaatattttaaaagcacttgcttttcatagcatctcttgtctcttccaagtttcaggaaattagctaacttgttaactctgatcccttcatcactggtaaaatgacaatggtaaacataaccatctcacacctagtatattaaaaagtctacaaagtataaatctgggtgcaaaaggaattcttgcctgaaagatttacagttgagaaaagcaatagctttgaagtggagatctttgattattagagtttttccatgtattccatagccataagcaagtcatcttccaactctagaccctcacttaaaggagctgatgtagatgatctcttatggtcaaaacttcaacattccactttttatgaaatggaaggggcaccaatatagggtggatgtcaaaggaaattttttcgtcttcaccactcttgcttggaagaaaagtaattcatgcctttcccttctgctcagggctgtcctgtttctcttggtatagaagcagtccagggaataataatgtctaccttaaatgagtcttaaacagattttaaaagataatgtgcaatttagtgtacttaactttgatttcctgcctttccccttccctcatttccatagcctgcaactaatacatccagctga

SEQ ID NO: 89262 - DNA, 1061 bp, Homo sapiens
gaagtctttagtgactcatagaccagatttaggtatccctgccatgtactttgatggaaacccgcatttttcctaccaaagcacttaccacactttactgtaattactgtttagtatatatgcatatcctattagcccttaactctgggagggcaatgaccaggtctacctcaatgcctagcacatagcaggtgctcaataaactagtagacttgaattaacctcagcaggaagctcaggattgaggagacaactggcaagggggcagaatgaggcaccattcctcaggtactattttactgcctcagatattattaaactaatagcataattcaatattttcacaacctccaaattcaacatttcagatagttgaataactctcagcacatgcctccacctgacaaaatacaaatgctcttgccaggcacatttgccatcttataagaagctctttcaggatctctgccccaatcctggcattactgtgaaggtgcccaatggaaattatatctgagttggcagagagtggagtgaaggggatattgatgagtctcatccagaaatgggttaggcatttcaaggaaatatctaccattctttttggagaagacttgggtaacatttttcttccatttaacacttcaataatcataacaaacatctttgtgtgcatgtcttcttatagtaccgaactgggagggaaggacagaagttctgctctcaggaaacttttcttttctgtggagtctcacccctacagtgaactccttgcatttcacaattgtacaactcttacccacagagttaaactctggtgtgtgttctctgatgctgcataaggcctgacctatgcctaaatgtttttctacattcactacattcataaggcttctctccagtgtgaattctctggtgctgggtgagggctgagctctgattgaaggattttccacattcattacattcataaggtttctctccagtgtgaattctttgatgttcaataaggatagaactcctaccaaaagccttaccacatgcaatacattcatagcttt

SEQ ID NO: 89263 - DNA, 1051 bp, Homo sapiens
gaatgtattgcatgtggtaaggcttttggtaggagttctatccttattgaacatcaaagaattcacactggagagaaaccttatgaatgtaatgaatgtggaaaatccttcaatcagagctcagccctcacccagcaccagagaattcacactggagagaagccttatgaatgtagtgaatgtagaaaaacatttaggcataggtcaggccttatgcagcatcagagaacacacaccagagtttaactctgtgggtaagagttgtacaattgtgaaatgcaaggagttcactgtaggggtgagactccacagaaaagaaaagtttcctgagagcagaacttctgtccttccctcccagttcggtactataagaagacatgcacacaaagatgtttgttatgattattgaagtgttaaatggaagaaaaatgttacccaagtcttctccaaaaagaatggtagatatttccttgaaatgcctaacccatttctggatgagactcatcaatatccccttcactccactctctgccaactcagatataatttccattgggcaccttcacagtaatgccaggattggggcagagatcctgaaagagcttcttataagatggcaaatgtgcctggcaagagcatttgtattttgtcaggtggaggcatgtgctgagagttattcaactatctgaaatgttgaatttggaggttgtgaaaatattgaattatgctattagtttaataatatctgaggcagtaaaatagtacctgaggaatggtgcctcattctgcccccttgccagttgtctcctcaatcctgagcttcctgctgaggttaattcaagtctactagtttattgagcacctgctatgtgctaggcattgaggtagacctggtcattgccctcccagagttaagggctaataggatatgcatatatactaaacagtaattacagtaaagtgtggtaagtgctttggtaggaaaaatgcgggtttccatcaaagtacatggcagggatacctaaatctggtctatgagtcactaaagact

SEQ ID NO: 89264 - DNA, 1051 bp, Homo sapiens
aggcaaagtgaaaatgggtatgagagaatgtggcccactgaggaaactgaaggtagtttggggagaccagattaatggctgtcacttctgactacggctcaaaatcagccatgaaacatgaaccgcaaggcagacttcctgagtcagaatctccatgggacagggctttagtaagtgccacaagagcttctgatgagcagccaggttaagaacccggtgccagaccctggggcacagttaatgaatggtgagagaggaggtctgagaggttgaactacagagtttgcattgatccccatggccacagtgatggctggaaggtctgtgtgcccacccagagagtggcgtggagaagacatgggaaggggtttgttgcaaccattcagaagagagactgtgagagactgagctatgggaggcaaaagacaaaaagacgggagatttgacaggacttgacacaccgtataagggcttggaagagagaggggtcaaggactcaagtttgtggttggcccttgtgactagaggatgatggtgctatttgctgagctattcattaagaaagttaggtctgagatgcctacgaagcagcgtctcctaaaccgtgctttgccaggtattaatagatttttcatacatatctaaacacaagaaccctggggatatttctcctaattttttttttttttttttttttttttttgagacagagtccactctttcgcccaggccagactgcagtggcgctatctcggctcactgaaagctccgcctcccgggttcacgccattctcctgcctcagcctcccgagtagctgggactacaggcgcccgccactgcgcctggctaattttttgtatttttagtacagacagggtttcactgtgttagccaggatggtctcgatctcctgacctcgtgatcctcccgcctcggcctcccaaagtgctgggattacaggcatgagccaccgtgcagggccttctcttaattttttagtgtaaaatactagagaccaagcacagtggctcatgcctgtaatcccagcat

SEQ ID NO: 89265 - DNA, 1050 bp, Homo sapiens
tctcagaatgttctccaggattctgaaggcaaagaattctgtgaatttggggataaattaaatgaaaaagatcagaacgtctttaaaaggagacctcataactgtgacgaatatgggcaaagctttgtttggagtacaagcctttttaggcatcgaaaaacgcactgtgagaaaccttatgaatgggataagtgtggaaaggccactggggagaaaccttattcctgtaattggtgtattaaaagtttcagttggagctcagaccttattaaacaccaaagagtccacactggtgaaaaaccttataaatgtgatgagtgtgggaaagccttcagtcagagctcagatcttattatacatcagagaatccatataggagaaaaaccctatcaatgccgtcattgtagtaaaagttttagccagcgctcagatctggttaaacatcagagaatccatactggagagaagccttatacttgtaaccagtgtaacaaacattttagagttctgatgtgataaaacatcaaagaatccacactggggagaaaccatataaatgtgatgtgtgtgggaaagccttcagtcagagctcagatcttattctgcatcagagaatccatactggggagaaaccatatccatgtaatcagtgtagcaaaagtttcagtcagaattcagaccttattaaacatcgaaggatccacactggagagaaaccctataaatgtaatgagtgtgggaaagcttttaatcagagctcagtccttattttacatcagaggattcatactggagagaaaccctatccctgtgatcaatgtagcaaaaccttcagtaggctttcagatcttattaatcatcaacgaattcacactggagagaagccttacccatgtaatcagtgcaataaaatgtttagtcgaagatgagatcttgttaaacatcacagaattcatacaggtgagaaaccctatgaatgtgatgaatgtgggaaaacctttagtcagagctccaaccttattcttcatcagagaatccacactggagaga

SEQ ID NO: 89266 - DNA, 1051 bp, Homo sapiens
ggcaaagctctgtgggaaaaagggactggaccaaaaaaaactggatggtggcacacaagaagaggaaatgatgagatgtgtactttctatctctggttaggcttagtccccactagacaaattgattttaaatactatgtagtgatttttaaattccatccacacattcattacccacacagataatcatagaaatttgggggagtgcctagcttctgatgaagtggtgatatggcagtgccaagcagtggcatcgccagagtatctgtttggttagcaaatgagcagtcattttaggtcatgcagattgctgatatctgcccagtagccactgagcatttgctggttttttcttctggctttcttggaggttaagctctctgtagtcatacccagttggtacttgatctttagcaatatgtctcatattcatgtaaattgaagggagggttacatgtactgaaataatctgcatgctaggcattggcttagacaccgtacctatctcacttagatttgtggactaggaaagcaagattcagagatcatgtgacttgcatgtggcctagagataaaattcaaatctggttctgtagactccagggacatattcaccatgccatgggtggtggctattaaaccttgataaatttgtgtttatggttaacaaatgtgaaagctattaaacattgctggtttgaattttttacagtgcagaaatgtaaaatgaaaaaggatatttcctttcacagtgttaccgagaagtcatgataatttcgtttgttcttccagatttaggcatatacttatttaatcaataatgtgttaacagctgacacctgtggttgctgtgacaggcactatttgaagtgctttatcatggattaactcttaatcctcagctaccgtataaagtaggacataaccccatttcacatgcactacactgagacttgcctcctctccccccacattgaagatgttcttttttcataactatatactattccattgcatgaatattctgtaatttatttaatcccctatggat

SEQ ID NO: 89267 - DNA, 1007 bp, Homo sapiens
aatcttcactcaccattatgatatttatcttgaaagaaatggtgtcatacctgcctagaaactgaaattttaaacttaattcaggtcttaatgcctaaattttccatgtgatgtttatagtctgtattacttctccaaataatgaactacctgattcattgtccctttcttgaaagtttcttttttaagacaaatacattatttctgcattgatcattgaaatgttctttatatggatacattcccttatatattaaaaggcaacaggaattacaaagtctgaaaaccattttaaaccatcttttaaaaatttacccttatttccttttacctaatttgaatatgcatttgagaaaataagaggataaaggatggctaagagcctcaaaatgaaccataagatctcagataagaagtgatggtgataaaacatcaaaaagtgaatggaacaccttgattggggaagatatgcaaatactttgatctaagaattgaaatgtatcaagaatttatattttgcctgcaggaaaattcaaaagctactcatcctctctataatttggagtcatcttactaatgaaaataatgttttcccatatattattaaaaagcatacagtctaaataataaacagttgtaaaataatgaaggtagaaattataacactagggaaaaatttgtagcggatggcagtgttgaaggcaaatgtaaacataagggtaatggtctgtcatggcttttagaaaaagatgatagagttcatcattattttgccttcatctttgttaaggacagaaaattccctgacaggtgggcaagtatcaggttacctattttttattcctttggtacaaaagggttgaacgtcaggctaaaaaagcagccatgcatttattattaaacattttctaccgacaaggcactgtgctaggtactgtaatcctaccataagtaggtaggtatttcttccactgtaaatcataggggtttgctgttttatgtgagtt

SEQ ID NO: 89268 - DNA, 1033 bp, Homo sapiens
tccgtcgacgaaaacgggaagtactagtagaagacatggtatctcaagaagaagctcagggattaccaagttctgagcttgatgctgtggagaaccagctcaagtgggcatcctgggagctccattccctaaggcactgtggtgaggaccagaactctgtgtgggctagagggtgaaagagagtataggccttttgttcagaactttgcttgttctcactggtggggggatcatatcactcttaatctaatatctcagtttttttctgattaagttgattttgctggcctcagaccttttattcctagacattaacatcttcagccttttcttccctttcagtctccttcctaaaaagagttgcccatgtcaggctagcatttgccttactttgagccagcacccacccatggaccaagtccctctattttgcattcagtattacttgtcatctgttttacatccttttactttcaatctcctgcctaattccattggtacagtaagcttacctgaaaacctcttctaatctctttgttgtatatcactgaaatctttctaaatatttatttctgatttccttcaacgtctacctagagtcattttcttctaagaagcttcttttgtagaaatatttggagtaatttttttcctttttctaagtatttatgcaaaaaaagcctccttagctataacatgctttaaatgcagaaaaatcttttttaaaagctcaaagttgtattaattcacgagaccagtctttcccaatatattagccattaacaccatatacttatgtgtatcctttgatatggcccagtatattcctaaaactgctagattgctttctcatgtttatgtgaactaaaatgaaattttgtttgactctgctttagtaatcattccttgaagtagttggagatggtgctggtatgccactgaatgaggtctgagcaggttttcttcacatctgaggggacagtgccagccagtcaacttttggggtggggctgaagtctgctgaaaatctgca

SEQ ID NO: 89269 - DNA, 1062 bp, Homo sapiens
ccggccgcaggcggaagtgccgtggttccgacgctgttgtcacagggtggcctttggtcatctgaaatccgcggtcctgagtgctgggaagaggggctagaggacgtcgggccggggccggggccggggccgggatacacagcaggtctatgcagcagtaaggtgggcgatccacctgggacgaggtaccctgcccaaacattgtcgggaccgtgggccttccctccatttcccacaagcggtatgctctacagcataaaaggaagagaaaattatgtagaaatacttgcaccgttgataagcagggtcttggaataggaacgaatgaatgttggctagaccttatgtataaggccaccacactccagggtatttaattaaaccagtatgtattacttgtctgataaggccttttctgattctagtcttcatcttgcttgggttacaataagtttttttaagttgttattgttcagattttgggccctgaataaataaataggctgaatggctcattgctagtatgtgtcgtaaacaacagcacgggcatgatcgtgcaaataataaaggtccagaagcagtatacagtttcactgaaggtagaagctggggaaactgtgagtcctccagtgtaaggacaagacactggaccactgcaggaagtcaaggtgcttatgcgagtgccttttcttaatagaagtttctgtgattaatgcctatcattataaatataaatgtacgtatggtgtggtggaagactgaatatttacgtattatgtgcaagataatttttcaaaattatgtgatgtttttcacatatgatcttttcaatattatgtgatctgctactcagcaagtgaacattttttcacatataagtccaaggagttcttaaacaccttaaaaatattttttaaatggtaaagaaaatttttttaagcacataataataaagcgaaccttccttttgagttgacttgtgtgtgtcaggaaacaccaatcctgaattggaaataatgcgttccagggtcaggcacatttagaaagcactgaagtagtctg

SEQ ID NO: 89270 - DNA, 1461 bp, Homo sapiens
ccctcttcattcctacatcaccctcttcctcttctacttggctccaatcctgcttcaggatcacctcataccctgcctgacactttcagtgtcctcctgacaactttgaatgactttgttcatcacggcatatctactggtcatttgcctctgataagaggtcagttctggtattggtctgcaggatccaaaagaaaaactcagacactttaagagaaaaacaattagctggacttgagaaatcctcttaagaccaaactcaggtccagtctgctctgactggagtttgactctttcttaatctggtattaggcatggtttaaaacgacctgtaacgttgaaaatatgctcttcagagccagaaggcagtccctgtaggtgagggggacccattttcccccatctcccaagttaaagcatggatctgtccaaattttaaatgtgtttcatgattgatttggcacctggtggagggctaaacatgtttgcagtaagaaatctcttaatttctgaatccatagtcattggaaaaagataccagatatttgttactctttccagtgactgtaaattgggagagtttaacttagtaaaaataaagggtaacgaaagaaatcaatggactatggaacttgaccccattatcaaataggacagatatcctggggagagattacaaattatgccctcttacaaatgcatgaaacaatagtgtcatttaaaataatattctatctgatgggaatgtgtgggccttatttggatcctcattcaaacaacaacaaaaaaaactttaaaattttgagacatttgggaatctgatatattttgatatttgataatattttggaattctcacaaatagttgtgattatgctattgtaatgttaaaataattcatatttttagagacacctactgaaatatttatggatggaatgatatgacatctgggatttgcttcagaatgatatgagagagaggaagtggatgagaatcgtgttgaaataagattggccatgagtcagttatagttgaagctgagtgataagtccatgggggttctttatactattctgcctttggtatatgtttgcatttcttcataataaaaaagctttcaaaaagaatgagatatttttattactaaaaattgtgatgaaatcttacccaaagttagtgctttgcattagcttgcactggcttacagatgctgaaagtttgagaaatgctgcctaaatggtatgcggtcttgaatagaggaagtacccaattcctaaaacatctaacaaagaatatagaagagaagaaccatggacaggtaaagttgtcctgtaaatgttcttaatagaggtcttcattgtgtgttcagttgtcccggagggctgtgtatttaagagtattttctctgtagaggttaggaagcctgagagtgagaagaccaaagacttcagctttgag

SEQ ID NO: 89271 - DNA, 1057 bp, Homo sapiens
gtgagcgggggccgggactgggcggtcggtccgggaggggcgccgcgcccgaccccggagtcccgagcccgaggggagcgtcgcggccccgcggtgggctcgccgcagcggagggggcgcgcatccgggtgagcgccggcgcccccgcctcccccgcgcagccgcacgggccgccgccgccgctgccgccgagcacgcagcgcagggaggaccgcgcccgagcgcctgcgggcgccctgcggcgcccgccgcgcgacgagccccaagtgagcgggcaggcggcgcgcatgcggggcggcccggagtagcgccgcccgagcccgcgagcggggcgcccggagtagccgccgacccgagccgggcgcggaggcgggggcgggcgcggcggagcggggcccggccggacccgcccgcccgccgggggagccgccggcagtggccgaggagcgcgcggcggacggcggcccgagagtagcgcgctggccgcgggaccggccgcgaccgccgcggccggcccggaggacgcctgccgccgccgccgccgcgcgcctagcgaggtgagtgtatcgcccgcggctgggcagtcccggagccgcagcgctgcgcgcgggtcggaggtggagaaagaggccccgccgcggccgcgtccccggtccctttgtggccggcgctgcctggggccggggcgcgggcacgctcggcgcgggttcgggtctgggaccccggtgccgttggacacgcggcgtctctggttggcagctttggcgagcagcgagtttccgtcctagtttgacattgagttagaaccgtttttctttagaagacggaagtttgttttattgacaaaaataaagctaaatatggcttctgggttcggccgtgtggtacttgcaaccgcggtgccagcctgaccctcgcggcgccacgggggaggggaagacacgccggcagcgggggagggggcttcccggcccgctgcccccgaggaggacccggacctaaattagcaaatgtttgtggttgggaagtagcgggctttaggtaatgtagtagcttt

SEQ ID NO: 89272 - DNA, 1051 bp, Homo sapiens
ggatttcaccagtttttccgttaatatcttctttctgttccagaatccagtccagtgtactacattgtattttgacatcatgtttctttaatatttggtttgtgatagtttctgtcttgtctggttttccataactttggtagttttgaggaatactgtcctggctttctttgatggacagctttccatactcattctcatgaaaggtcacaatcaggttgacgctgtttctgcttttacttatttatttatgtaatacatctgtcatgcttatgtaacatacaactttggtacttttttttcagtaacagatttcttggatacagttcctaattggttgagatgcagaagagtgttataccattgcagttatataccaagttttattttttgatgggttaagagctgggctgaggtagaggaggaaggaaagaggagagatcagttaaaagaggcagttaggcaaagagggaccaaggcaaagggagtgacagataatggaggaagaggagtgcggcaacttcgtagaagagagttaggagtgactacttactgtttgttcatttattcaattaatatttattgactcagcagtcccagtctctctggcaccagggaccagttttgtggaagacagtttttccgtggaccaggttgggggccaggggaatggtttcgggatgaaaccgttacacctcagatcatcaggcattagattctcataagtcttgtgcaacctagatccctcatatgtaaaattcacagtagtgtttgccctatgagaatttaatgccgctggtgatctgaccggaaggaggtggagctcaggcagtaatgctcgcttgcccactgctcacctcctgctgtgtggccaggtttctaacaggccacagactggtactggttcatggcttgggggttggggacccctgtatggagcgattaatgtgtgccacacccagtgctgtagtctcaagataactgggggtggatagcattaaataaacatgcaaataagtacataaatacaatttgtgattattgctacaca

SEQ ID NO: 89273 - DNA, 1068 bp, Homo sapiens
ctgggatatatgcccaggagtacacttactgggttgtgtggcagttgcatgtttagttttttaaaaaactggtgagctgttttgtaaaatgttctagcatggctggaacatcccaaagtgccgggattacaggcatgaggcaccacgcctggcctgtcaccatttagccattctgataggtgtatagggatgtctcattgtggttttaacgtgcatttccttaaaggctaatgatgttgaacacttctcatgtgcttatttgtcaactgtatattttcttcagggaactatcttttgttcattttctaatgggattgtttgtcctttttactattaacttttgagacttgtttattctttatatattctaaatactggtcctttgttgggtatgttgtttgtctgtagcttgtcttttcatccccttaataaggtcttttgcagagcaaaagttttaaatttgttgaagtccagtttctcagtttatttttttatggatcattctttttggtgtcaagtctgggaactctttgcctagccctagatcctgaagatttttcccttgtgctttttttccctaatagttttgtggtttttacatgatccagtttatgaagctgagatttaggtcaaaattgtgtgtgtgtttgtgtgtgtgtttatgcgtgtgtctatggatgttcagttacttcagcaccattccttgaaaaggctgtcattcctccgttgaattgcctttgtatctttgtaaaaaagcatttggagctgggagtggtgggcatgggcatggggtagactgattcctcctacactttttttcccccgttattttagctgttctagttcctttgcttttccttataaattgtagaataatcttgtttatatctacaaaaaaggtctttctgggcttttgatacaaattgcagtagacctgtatcagtatggagaagatcgacgtctttagtatgtatgttgcatttttcaatctgtgaacacaggttgtctctccatttatttagatccttgatttctttcatcagcattgtgtagttttatcatgcaagt

SEQ ID NO: 89274 - DNA, 1028 bp, Homo sapiens
aggccagttattttctctggttatgggactctgtgttgatagttctttcagcccttgaaaaaattataccactttcttctggcttccatggtttctgaggagaaatccactgtcattctaataatttttcctctgtagaaaggaatcgtttttctctcactgttctcaggattttttcttcgtctttagttttcgaaagttttattatgatacatttcggtgtggattcctttgggtttatactgcttggggttcactcagattcctaaatctgtaagtttatgtcacttgccaaatttaggaagttttcaccattacttttttgagtactttttcagcctgccctctttctcctcttctttcaagactctgatgactggaatgttcagtcttttgttatgattccacatgtttttgaggctttgtcaatttttctttagtccatttctctcttattcatattgggctcttgtcttccagttcctttcctgtgtccttccctccctttctgctgctgagtctttttattttggtatttttcagctctaaaatttgctttaggtttttcttcatatcttgtatttctttgttgaggctttttgtttatttattcttaatttgtttcaagcatgcttgtaattattgaagcatgtctatcacagctgctttaaaattgttgtcagataattctaacatctctcttcttggtgttgctgcctcctgatgtctttttcattcagtttgagttcatcctggctcttggtatgatgagtgatttttaaatgaaaacctgggtgtttttatattatactatgagattctggatcttacttaagccttctgttttagctcgctttgttttgataccaccctggcgggggaaggttggtggggagggcacatggcactgtctagtgatcactagaggaaattagaagtacaggctccccacttggcctttcttgacccaagaggtacagtatcttgtttccaccaggtgggagtagaggtccaggatatccggggga

SEQ ID NO: 89275 - DNA, 1067 bp, Homo sapiens
tacaggtgcatttttagaaatggaatcagatggtctcgtcaatgggtgaaggaaaaataagtcaatcacttgatttgtaaggggtgtcaccattaacagcaatggaaaaaaacagagtttgagaagagttaatgaatgtgtcttggtacatatccagttgcaggtgtcagagaaggattccaggtggaactgtcctgtaggcttcatagttggagcactgcatcttgttgggagaggtcaggtctggaggtgcagatgagcatcatcagcattgaaatgatgaaaacagggagtggtagaaagggctgaggaataaacctgaggggatacttacagttacgggcccggatgaggaaagtgacttttacatcctcactgggcacatatttattgagtatctgtttgtgccaggcactgtgactacaatgggaactaaacagacatagatcctgtctttgttgatcatacaatttaatgaggaagataaaaatagaaacaattaagtaaacaatgggagaaatgacatttcagctgagacccagaggtcaaaaagattttaataatacaaagagtatgggcaagaggattctggtaaaaaagaatgctatgcacagagactgtgtagcaaagaggactcattctgtttaaggaactgaaataccagtgtggctgaagggccattggtgcaagggatgggggtggggtgagatgaaggtaggaaaattggcatggtatagctgatgcaagacctcattctcagtgctgttgaaaggttttgagtaggagaaagctctgctcctgattttaagcagatcacccctgctgcagtgtggagaatggatttgggtgagagggtgggatgggtaaaggggaggcatggagatcagttgggaagctcttgcaggaggcctggactaaatggtggtagtggatatgtctgaggctggggatcaggctctggtgtttgtctcagcaagctcttctggccttcaccttagtacctttgtttttctttatcatcatatgtatcatgttacccctctctgtttatccttgccccttttaga

SEQ ID NO: 89276 - DNA, 1034 bp, Homo sapiens
gaaatgaccctgagagccaagagaagaggctttatttatagcctgcctattctaaaaataatttaagatggctaagatatcaagtagaatgaagctgagaaagagacttgtgttgctaggtaggacattacagttacttgattaacagatggtttcattgaagtgaagacttgccttagggatagagaaaaagacttcttgtgcagaagatggtaaaggaagaacaaatagaatgataattggagaggttggtgttgtagcaaaaacatgtagaaaatcttagagatttgggggattccatgaccagaaaataacatgagcccctggcctggaggaagttcctgctggatcctttacttcccagaaactgctcccctggtaggcggtgtattttcctgtgtctgagttcatagtgggcagaaagatgcatattttgctgaaactccaacgcagtgttctcttgtaatgatctggcattaatcttcgtgtgattaaaaattaaagtatgagaagaaattagtaacttacctggcctttgcttttcagactctttagcatgatagttaagatttcctctgttctgaacacacccctttactcctgtctcccaattaattcttctgtttgctgttccccagacattccctgcaatttcttgcctccctattttaactcacactgttttgtccacttgagatattgttttgccttttcctaactcataccaattctctagtcattctccccaccagtttctcttttttgtgcgctatagcccgtcacaactctcggcatcttttgcaaagacttaaactgtgaaatgacatgcaaactcactttgttgtctctccttctatattgcaagctcgttgaggatagggactgaacatttttcatgtttgtgtgcatcagactgcttagtgtagtgttttgcacatatttgagaaagtttgagtgaattagggatatgtgattctgtgatagactaagtaacgccgtgtctaagatgagcaggtcatatactaggttctagt

SEQ ID NO: 89277 - DNA, 1418 bp, Homo sapiens
tcaggatgcttttcactgtagtagcagaatacccagttaaatcagtgagggctttatcatcttgcataacaagaagttcagacattgggaggtctggtcttagggttggtctggctccatgaaatcatgagggtcctgcgtgctctccatgttttcaatttgttatcctcagcatgtcattgatggcatgttgatgatggcttcccccatggcctcaagatggttacattacttctaagcatacactacttctgtactctccaacaatagccaaaggttgaaaagtgtagtttctccttcaacatctctatgagggatataactgtttctgaatgcttcccagcagacctccctttcagtaccattagtcaggatttggtcacttctattagctagaggaatagaatgaccgtggttggcttggaccagtcaggaataggtggcctagcagagaatggtcacttgaattcagttggaggtcaaatgcaatgaaaaatgtcaaggttggataaggaacaaacagtgtctcccacagtgctgtgtaggtgtctttggccttcccacctggaaagttaagatcctcacagtttcctaagagggagagagataattttgtatttccactgagcttggcattggatctcagtaatagtttattaactcactaattcatgtaatagacattaacggaacacattttgtgccacgtactgtgctcagtattggggaagaagctgaataaggcatgatcctggcactcaggtggtagctgcctacagttaagtggaacagggtggctgactaaggggggagaatagagttattctaaaataaactgattttaggacattcatttttcaacaggagatgtgggacatgtggatttgggatatgaattcatttgaaaaaccactttgggtaagttgatagttgggagtgaatgactttagggctctacttctcttacattggggtttgatcttacagctagcttcttaggttttaaaaattatgttgattgggggggcggttccaagatggccgaataggagcagctccagtctacagctcccagtgtgagcgacacagaagacgggtgatttttgcatttccaactgaggtaccgggttcatatcactggggattgtcggacagtgggtgcaggacagtgggtgtagcacaccgagctgaagcagggcgaggcatcacctcactcgggaagcacaaggggtcagggaattccctttcctagccaagggaaggagggacaaacggcacctggaacatcgggtcactcccaccctaatactgcgcttttctgatggtcttagcaaacggcacaccaggagattatatcccgtgcctggctcggagggtcctacgcccacggagcctcgctcattgctagcatagcagtc

SEQ ID NO: 89278 - DNA, 1112 bp, Homo sapiens
aacccagtaatcctgtcatgtgatctagaaatcattcccagagccattgctgaagatacaggatgaaagtttgtctgtgagctttgctttgcagtgttccaaatgaccatttgagttcttgttgtgtaagtatacatgagaaaggctctccattgtttatttaatctgagaaggtgcctctagaaataataccatttaaaatttaccaagtgtttactgtcatgtatgagtgtgttgttcattttctcatttagtttagtgcaatggggctataaggaaaatatgtttttctcatttaaaggaacaaagaggctcaggtttttgcaaatacagtaacattgctaggggtcacataactcataagtgttgctgcaactgaaatttgaactcatttgaatttcagcatttggcttaatagacactgatttctgtcttaatatgctgattgtgtgggggttcccaagacccacccgtaggttcagtgattggctagaaggactcacatgatccagcatcagttgtactaacagccaggatttattacagcacaggaaaaaggtgcacggggtgaagttcagaggcaaacagacacaagcttccaagagtcctctccctatggagtcacacaggatgtacataattcttccagcaatgaatcgtgacaacatgtgtgaaatgttgtgtactagggaacctcattagagagtcagtgcccgagatttttattgagtctggtcatgtaggcatctcctgcctaacacataccaaaattccagattcccggaaggaaagcagatgtttatacaaacaatacaatgttgtttgtaaagtttaggcacagtgaatcacgcttatcatttaggaaaagttttatatcaatgtagggaactgttcaccattaaagtttccacatgccagccaagggccaatctcgacaaccaagtccttctaaggatagcaatcttaggcctgttaacttttttcctgtacactgatttattcatttgaagcagttgtgattattatcattcagcttttgacaagtaatgagaaaagtacatattatggcaaactaaattatttaatggaatctgttttgtggagggtggaga

SEQ ID NO: 89279 - DNA, 1967 bp, Homo sapiens
tttataagtatcacttagtgttttctcaggttgctctctagcaaccttgtgaagtaggcaagaactgctgtatatatttcatggataaactacaggcctgccctgaattgttcaggtaagtgcatctctgttggccaccatggaacttgttgcataaagttgcccttgtaagaagctgttatcttgcccacattctggtccttccagggcatctgcatttgtagctttcagcatagacacagtgcagactctgtttcctcactccacttcataggaatgcacttggtttatatttctcctggtcttcagtgacacaggctttgagccttagagtcagctgctgagcaggagattctctacctctctgaggtctctcaggctgcttcatcatgctccaagatgaattccttacgcttaagacacctatgctcaaactatcccaaatgacttttcaaaattggtaaccattcctctagtcattttctcatcatggtataacataataaagggaggtagtagggtgggaaatggaaactaaaaatcagggaagtgtataaaattattgtcagagccaagactaaatgtcagatcttatgacatatacttttcttttccattatactttccacgaatctgtttcctgaatgattggtgactgttgcagttttagaatgggattcagtgtgaaagaggaacgagagttaactcaggaagctgctgtagtgcaggctacaaggagaactctattaattcttgagcctgggtactgaatgtggacagttgaaatgcactgggaatcactagttgcctaaccccctatggtaattaatagcttgacttttaccttaacgtataatacagcagttgagtaggaaggtagttaagacccaggtgtttgatgggtgtgaaatagtagctcactgttgttttaatttgcatttcctaattgtagggaattgagcacttttctacatgtttattggctatttaggtttccattctacaaagtacctgtttatgtcctttacctattttcctattggattgttgtatattgatttgtaggaattatttatatagtcctgatactctttatatattttataagcatttttccaagtctgattttcaaacatagtcttcatagtgaaatttcttattcttaatgaaattaataattcatattacttaatgtttataatattaaattaattttataattcacttttgatgttctgaatttttaagttaatcttttttcctttctttctctatagggtatgaacgtgatttctgatgaaactggattggaataattttcatgatctttgtatatttatatatatatatttttaaattttgcatttgacttaaagtgccatgagaaaatttgcatactgcaaggtggtcctagccacctccttgatttgggtactcttggatatgttcctgctgctttacttcagtgaatgcaacaaatgtgatgaaaaaaaggagagaggacttcctgctggagatggtgagtgacattttataatagagctgttttaactactatatcactggtttttactaactaatttggataatataaaattttaacttttttagattaactgtagtctgtgacttcctgtgggagatatgaggatcatattgatagttctccaatgggttcatccagcagttaaaagcatgaaagtatcatatatagaattgctgaattcgatttttgtgttcaatatttagtgtagttaatttcctgtaagttactttatgttactaaataatgtgggtatctcatagttgggatatcaaaattgtacagaagattagtctaatgccaaaatgctgagtggagcattaaaattgcattataaggtatcaaaagagattactcctcccctcccatctcattcctaaggggaagaaatttttatagatagatgtgatctgtagaagttgtt

SEQ ID NO: 89280 - DNA, 1040 bp, Homo sapiens
tagaagcccagccaagggtggcatttgctcagaggttttacctaaaataaagtgtttctgatagtttggtatggggcttcttgtgaccctggcaagtgtcatttcagggaatggtaactgtggaagtcagtggattctggattcaatatactggagaaacagtagggatgtggctgttctttaggaagcttcagcatgaagggaagcatgtagtatacggtagttacaagagagaaatggagccgaagttggttttctatgtatttattattatttatgtatgttcaggaagaggtttaaactataggggaaaggaggaatacttgaaagaacaaattctcagcagatgagacagtggggtatcagaaacgtgaaaaggattctcctcaaagagcatccacaggttattatagttttgacaaccactagtggcataagtttcaaagaaaaagactgggttttgtacaaaagtacaagctaaaggagcaaaagtctgaaagtaacggaggtatgagatggcctccttgcctctggaggaaaggagaacgaatcattctcccagaaacagttgtgaggttaaatggactctggaggagagctagacttcagttaagtctgtagatggagcctgtgtattgtggagaccagacagtggagaggctttacaacagcctgggggtgtcagggtgttcaggggacagactgagaaggacctccaagcgtgagggaagggctgagccgtaggctggaggggaagtacatagctaaggggagataatctttgaggtccctggtagtcttaagggaagaaatgattaggggaagagcacagttgatgctaataagcaacagtttgaaaaatctgctttgatatgaagtttcagtgcagtaggtgctgagaggtcttaagtcttttcagagcccagaggttgttaaggttctgctagtgacaaatttctgtggtgcatttgaagagatgtttactaaagaggatcagggagagggaatgggtaatggcaccaaggatgccaactttctag

SEQ ID NO: 89281 - DNA, 1035 bp, Homo sapiens
aatcacacaagacatttaaatagtataatacattatataattacatgtcagaaggaatgagagcagttaagaataccacacgtaaagaaataattgttgacaacagaagtataaaccttatgtggataatctatttgctaggacttaatccctctgtaagaaaattaacctaagttaatataaggaggaatatatacaaacatttatcctgcaaatgacttgtgcttggtttacttacgtgtcaatatttgctagattaaatatattcttccagaagagatacttaacctgagataaaatgaattattttttcatttcctcctttgtttttctctctcgttctgtgaatgcccaagaaggctgtgtagaataataagtttttgtagaatatggcctaatttaaaaggtgcagggtcccacaacaagtgacagagaaactcacctatagcagttctctctttcctttccctcatgcagccctcacccaacaccccaatctgtgtacatctgtgagaggaaactggtgtgagcagatgtctacctcactgctccacctgaggcttagtctctaggcagggtcctggagtgccgctccagagtccctgctcaggggtctgattctcctttatcttcctgccttggaagcctcaaatatccgggttaccatttccggtatctgggagacagtagatctttgtttttgtggttataatttgcagtcttgctttccaggttgagaatcatctaatgtatttttctttggctccattgtttaagtcgtaattgttagacccagaaaccagagcaagctgtttgcttttatgtaactctttacatctgctttttttcctattcatgagacacatctaaggcaccatcatttctcacctggatatggaaatagactaactagtcaaactaatgtccccacatactcttaccccctcccatctgttcaccatggtgcctccagagtgagcttttttaaagcatgcaaatttgatcatttcgcttccatgcttaaaacccctccac

SEQ ID NO: 89282 - DNA, 1901 bp, Homo sapiens
atggcagtggtatattgatgcaggaattcacaaatagactagtgaaacagggtagggtctagaaaccagctcatttttgtatgtaatcttgatttatgacagagcagtcactcatagttacagcagaagaaaaagggaccattacataaatagtggtggaacaactggttatccatagaagaaataaatgaagttggatacttactgtatatcatagttaaaatcagtcccttgaagattaaagtcttaaatataaaaaacaaaaaaaaaatttttttaattagttgagtgtggtgttatgtgatcccagccgtggtcccagctactcaggaagctgaggtgggaagatcacttgaggaggtcgaggctgcagtggcccctgattgcactactgcattccagcctgggtggtgacagagtagtgataccctgtttcaagggaaaaaataaaaaataaaaacacttactatacaattgttctgtagttggcattaaacaggaatgttttgaaagatttcttaacttgcttttatgacatcaggagaacagtggtgtgtcccatcatcgatgtgatcagtgatgatacttttgagtacatggcaggctctgatatgacctatggtgggttcaactggaagctcaattttcgctggtatcctgttccccaaagagaaatggacagaaggaaaggtgatcggactcttcctgtcaggtaattaatttgtcagacattttgcctaaagtgttattggcagaaggttgtggagctttgggaatcatatcaaatggataagtgtattttgagaaacgtgaagcattcgtataccttatggtagttaacagccatctttcacatatgtgagtgttttaaagaaggatttctcctctaataaaattagaaatttttgcttattctataaatctagtgcacatgagaaatgatgacatgcgtgttttttcattcctttatgaacattttgcaaatgcgtcagatctgtactttaattcagttattaaggataataatacttagcttaattaattgtgtcagtatgtgaagatactacctaaaactgggtccttgcattaaaatgtacaattttaaattcagacttgtaccatctggatgacagttattgactggtaaagttagaaaagcttgtgtaaaacataaaaatagctagaattgacacaaaatataaaaaaattcattaatccatttattctctgattttttttctctacttggtcatatatagatttttttttcaggatggaataaaaatcttcatgctctttttagaacatgaaattgagacctttgagctcttctgagccatcctagaatttagccccattgtaccgacctgctacttctgtattaagagttccttcagaaccaggcttcagcttttctgtttttgggcctcctgcgtctgccttcccttgaattcaagttcagttctggcaacactgaagagattttccactgactgtgtgcttttttccttagcctgagttcttagtagtagtagtgcaagggacttttcttctctttagctgttagtgcaattcactatctaaatcaggggttcctaaacatttcaaaaatgacaaaattttttgaaaatctggtgaaagctatgggtcttctctaatggagaaaaatgcacatgtacatgcagaagatttagcacacaaaaaactcaggtcaagaaaaccctgtattaaatgataattctgaattttggctgtttcttttaaatccttttctcattctttttttcttctaaaatcaaaataagtccaaaccttttttggaaacaactgtttcctctggaaaggcaatgagtacattttagggttcatcttaaaatataatcttcgtggtatctttggtc

SEQ ID NO: 89283 - DNA, 1046 bp, Homo sapiens
gaaactttgctattcagagttttgtaggaacagttgttccatcagctataagtcggcctgacattgttactagtccatccttattttttagttactgcaagactgtcaagtggcagggtgcacagttcagtgagttgtgtgagagaagcctgactgcaaacaattgctctgtttaatatttgagcaaaatagaccttgatttttttgtttgtgccttaacatatattgaagtttactgatcccatatcacttatatttcattctcacataaatgtcatttttctctgaaaaattaaaacacattttaatgtattttccttgctttatacttttggtggattcatggtgtctccacttgtatagtcacatatcacccagctgataccactgttctgattcatctggcttattagattcaatatataaacatgtgttacctaaaacaacactaataattcagagtcaattatttctttcaacaggtgttacaaaggtagattatggagatatatcgtcaagagttggtctaagacacaaactacaatgcaaacctttttcctggtacctagagaatatatatcctgattctcaaattccacgtcactatttctcattgggagaggtaagaaatatatatatatatattctatgtggttattatgttcttacttttttattaaaaaaaaataggagttagttaaacttccaataaggaaagtaccttcatgttaacatttaacttctcttgcttccttcctccttcttaccacgtaagtctaaactatattctttttttcccattcctcctccctgaaagttgatttccactgagttgatgcgcctggagataagctgtgtactgtggggtctgtttttccctattctgtctatagtgatgtgtttcctaaacagactgcaccatctgcaattgtggatctgtaaaatctgtatatatattaaaaaaaaaaagacttctttgcaggtctttgtgaacttgtaattataagatggcttttagaaaaaaatatgaagccaagtagggaaag

SEQ ID NO: 89284 - DNA, 1049 bp, Homo sapiens
gtttaggaaactgaagcacaaaaaagagaagcttctcatagtgttacagagcttatgccagaattaggacttagaatttaggtcatcttgcagcaagtcaagtgtaccctactggaccccagtgcctttctccctccctcatacctctttatcgacctacatatctacctacttctctctctctctctctctctctctgtttctccatccatccacctacctaccttttctccgttgtcttttaaataatgtatattaccaaaaaaaacaccttttctgcagaggaacttaatcaccaaaactgatgcttgaggtgttttgttttcttccactctcatgttaagattttttctatttcagaaattaaccctgcagcatgtgaacagtaatcagtgcctggataaagccacagaagaggatagccaggtgcccagcattagagactgcaatggaagtcggtcccagcagtggcttcttcgaaacgtcaccctgccagaaatattctgagaccaaatttacaaaaaaacgaaaaaaataaggattgactgggctacctcagcatacatttctgccacattcttaagtagcaaaaaaggaaaagtgctttcctcctctgcaggatgtaaggtttatcagccattaaaacttagacttctctagcttttcactagctgtgaaccagccttcctgtccatggacgtgaaactgcatagtaatgagactgtgcacactgatgtttacaagattgaaagagtctttctccgaaaatcatggtaaagaatactgagacaatgaaaaaaaatcaacaaaatatgctttctggagaactgtaccttttatggtttgcttgcacatcagtagtttctgctgaacgtgctgtcataatgaagagatttccaagattttttttcctgattagaactggtagccagtatattaaatattgatataaaaataaaagaactggaaccagattcagaatcatgaaaacaacatttttacaacaacaaaaaaactatattaaacagggtttaaaggaaattaaaaca

SEQ ID NO: 89285 - DNA, 1050 bp, Homo sapiens
ttttaatgacttagccaaagaagtgcagctattattccatattaataggcttgcatttcttttcctaaatcttatttaggctaaatcagttttatttttctctgattttttttaataccacagaatcacctgagtgtcaattgaaagttgtcaattaaaaggtaaccttttaatctcgtaggaggaatctcattaagacatttttcctgatatgtagagcagtctgttggcaaaaatgcatatattttctttcatatttgtaaaattatatttaatggaattcttttctttgattatcaaggactttcactgcaggcagtgctatttcttgtgcctaagaatgtttccaaaagtcgcatcgctaatgatatttgccaagttgagtgtacacaaagtttctcatatcctgttcaagttaatcaacatcaagcacatggggatgctttagggtgagtctatagtacaaaatgcataaaccatgtccccaggaaatttgaaaggaagcaggtgctgaatggaatttttttccttttccatgagctgtgttaattctatctccagtaggcctaatgcttgaataagcaagatgtctaatcaataaattattttcatgctcagaatttcaggtttttgtactccagcatagcttggtcttatttcttactgtatgaaagcttaacagcaatgtgatttaaggttttgttttaaatgggagatgtaagtgatttaattcatgggtacttttagaacctgatagataatcccattgcctttatttttctaattaaagaattcctaaatactttgaaaatacaaaatattcctgaatagttgtgccttacattggttttatttgaagttagagtggatccctgtttatcataattacttgtaattaggcagatgcttatcactctattataactcaaattgggaagaaaagaatgaaaaagaaaacaatggctgggtactggctcatacctgtaattttagcattttgggaaggtgagacgataggaccacttgagggcaggagtttgaggttgcagt

SEQ ID NO: 89286 - DNA, 1004 bp, Homo sapiens
tggattttgaatataaaaccaacagacttgaggatgcgtgggatgtaggatgcgagagaaacaaaggagtcaaggacagtgtttcaccttttggcctgaggaacaggtagtgatcattgcagtcagagaaccatggtggaggaggccgtaaggtcaggaggtctgtgcaccttatcatgccaaatggcacatgatgttaaaataaaatgttttgagtaatcagaacgtagttaattgtgctccaggatggatcatacacagagccgtacccatatctgatttacatgttgaaatttgagaattttgagatgatgagacttagatgagatttttcaacttgatgagaccttgaggaaccttgggatgggatgaatgtattttgtatgtgggatagttgcaaatcttcaggagtcagagggcaaattattgtaggtagaataatgatttccaaagatggccagtttccaatccttggaaatagtatattagcacaggtgaattaaggttacagatggaaattcggttgctaatcacctgaccttcagatgggaatattatcctggattatcccaggattatcccttggttccaatgtaatcccaatgcccttaaatgtgaaggagggaggcaacatctctctgtcagtgtcagagagttgtgatgtaagaaagactccactggcctttgctggctttgaagatggaaagagaccaccagccaaaggaagtaagcagcttagaagctggaaaagtcgagaaaacagattatcctcttaaacttccagaaaggaaaacagctacactgacaccttgattttagcctagtaaaacccaatttgaacttctgacctccagaattgtaagataatagggttttgtctttaagccactagtttgtgctactttgttacagcagcattaggaaactaatactaagggaggagaccacccctcatattgtcttatgcccaatttctgcctccaaagaaagaaaatgtaaaaact

SEQ ID NO: 89287 - DNA, 1033 bp, Homo sapiens
gagggcaggctggactggggacgctcctcccggccgcctcgttgctggcagcgcttccgcccgccggcgcaccagtcagtaccgcgcccggcgaatgtggagggcgaagctgcggcagggcaatcacaaaagggctgtcagagaggaggcgaggcgggaggaagatggagaggcgggtgggagcctcacctttggactctatcgccacagcccggtctagccgctacgcccgagctcaagtctgactcgaaactccgctgggtgcctgagaggacccggcaggccaaggggtggaactgagggggcggggacgcggcgggcgggtggggccgcctcccggctgggcacgcctccaagccagactggacgcgaaggaaaccggaacctgtctgcctacggtgcctgtttccggaagcagcttgagtccggacaccaacgacggggacgctgggaagccgacttccggcgccctattttctcacctggttcccgcggcgagccagcggcagcggcggcggcgatgagacagaagcactaccttgaggctgcagcgcggggactgcacgacagctgcccgggccaagcccgctacctcctgtaagaggactggaggggaagcgggaggcgagcgggtaggtgttcctttgctcctcacaagtctctttctcttttacagctgggcctacacttcgtcgcacggtaagaagaacgcctgtctcttgtgctttgggctcttgtcgccccgctttcctctgttccgcacaacgctcaaataaggccgatggactcacttccctccataaaaacaacaacaacaaagcccgcatgtgtctcggtttcgtgaaaaatccaaattctttaatgtgccttgtcttgctttgttagcggcatttgacacattgatcagtcttgaaatagtttcctcccttggcttctaggtcattacgtagttcacctcttcatttattacttctcgatttgctttgctggttcctcctaatctccccaagctttaagtattgtcgtggcccag

SEQ ID NO: 89288 - DNA, 1003 bp, Homo sapiens
cctgttcagttagatttcctcaggaatttctgacagagaaaagggcaagaacaaatgtttagggcaagaaagtgtattatgaatggttcagtatttttttttttggagacggagtctcgctctgtcgcccaggctggagtgcagtggcgccatctcagctcactgcaacctctgcctcccaggttcaagcagttctcccgcctcagcctcccaaatagctgggactacaggcgcacgccgctacgcctggctaatcttttgtattttagtagagatgggatttcaccgtgttgcacaggctggtcttgaactcctgagccgcccacctcagcctcccaaagtgctgggattacaggtgtgagccaccatgcccggccgtgaatggttcagttttgttggcacataggatgatttaaggcaaagaaagacaggcagacagactggtgccagatagggctggaaagccatgctagagcatttatccatatgctacacagtgatgcttctaatcagagctatgctccagaaagatgatcacactaaaagagtttgatcctagaagcagggagacccatgaggaaaatcactgcagtagtcctgacaaatggtgcataaggacctgaaccagaatatagcagcactatggagaaaaaggagcaaaaagatgaaaacagggaagtaggatatatagaaatcggtgacaaggaccaagggaatagggatttttgaatgtacctgtcattttaggtcaaaatgtccagaaaggtgtgttcattcacagaataaggaactcaggaggatggacaggtttgagtggttagctgtggggcaatgatgaactaagttttgaacatgtaggggactgaagtggttatatttagcaggcagctggaaataggcacaggagatgttggaagtagagtaacatacctagaagtcaaatgcattgaaatgagcattgaagatatgggagtatgtgacattagaaaagggtatggaggaa

SEQ ID NO: 89289 - DNA, 1034 bp, Homo sapiens
tacagtgaagattgatggaccagcctctttccaggtcccaggactttgcaagagatggagacaggttaggtggatagtcctgtagtgttatttttgtatattgttgagaaagaaacactaacaaaaggaacaacgagtaatttataaaattgtttaaaatgttggtttgtttactattttattggtaaattaacatgacttaatttgaacaaagtgatgatttgtgtgtattaataagctcacaaatagtgattattttcaaaagatctttttgtaaattttttttttgatccaaggccttgtgagaaatctcttgtttgtatttcttcaggtattttcaattgtttttctttattttcttcagcatttaatcactgtatactatgtaattcctgaaggggaagaactaattaggagttgattgagactttattatggtatagttaggacttgattgtagaagggactaaatgttccaacataatctttacccttctccccaaacaaaatatcaattctgtgtctctacatgcctttgattccttagaggtcggtaatttaacataaaacagggatgtcactttgaggggcagatgaaagtctagagaactgttccttaatagcattgtaaaagttccattccaactgccagtgtagattttaaaagtgttaaatagtgactcccttgattaaactgtttgtaattatttgagtagattaataatgaaaatactttggaaataatatacattttgacattctaccaagaggacaactttggttctggaactggtttctatttgtcaaatcagtttccttttaacataattaatccctttaacaaaaagccgtctatgggattaaaagacacgtgaaatgatacttttattattcccttgctcatataactttaaaaataatacttttagctctaatagctcaagaacacaatattcgttaatgttcagtaaagtagcctgagacattttcaatgtttccttaaggtttttgaatgactgtatatttggcagtta

SEQ ID NO: 89290 - DNA, 1073 bp, Homo sapiens
atatcataggaagttagcttgaggccagagtcagaaaagattctattgcagtgtttggtcttaatgtaggacttgaaaaatatataaaatttggatcctcaatatatacttagtattagctgtaaagaaatctgtaatggtggttcagatttcaagaagctgtagcccacttgcagtgcacacaaggcaagtcacacctcctagttcactagtgttgaagtattatagcagtgtaaagaaggcttctgcccttggaaagacaagacagacttaacatggattacaaccaaacagcgcagagatagtttcagctaggagcctagagtaaggatgctaagaacaggggaagagttttaggcaaagtgaaaatttgcctggattatgacagatgggcaaaattttggaagactggaggggcttggatatgatcagtggaattgagccttggtatgaagctggaactgcagaaactgacatgagggttgctcatgactgaggtgataacaagctttagggtggtagtggtgatacttgtggcaagtaaagggtaaattaaggacagaaaggtgggccttgttgaatgaggaaaacggaggagaagaagtaaagtggcttcggtcaacagagtaagaagaatgaggtaaagcattggttcccaaatgcacccatgccatggtgccacctgagaacatttattttaatagttacatttttttttttagtttttgagacagtttcattcttgttgcccatgcttgagtgcaacggtgcaatctcagctcactgtaacctctgtcccaggttcaagttgttctcctgcctcagcctcccaagtagctgggattacaggtgccgccaccacacccagctaatttttgtatttttagtagaaacagggtttcaccatgttggccaggctggtcttgaactcgtgacctcaggtgatccgcccgccttggcctcccgaagtgctgggattacaggcgtgagccactgcgcccagccctagttacgtttattttgatgtgtgaatcaaaacgaaaatgagcacaaccaacctgtgattgcatgga

SEQ ID NO: 89291 - DNA, 3330 bp, Homo sapiens
attgaatggagatcactgtgaaacactgcatttatttctttatacctttctttgcctaaacatttctagtataaattcccttattttgattttccaaagttaattgcatcagtattgtctggacctggcttggcattatttaatgggagaaagcactgaacaagtatagctattagcatggtgacacagctagtttagtgttaaactacactaataaaccaagtgatcagaatgtggaagataagttctgtttcatcagatgctggttaaaccacagcgggatttctgtcttcaactctggattccatattaccaaaatgaattaacttgccacagtgtatccagaggcagagacaagaacaaagggaaatggaactaacattccttggagaacagttgagggaactggggagatcagagctggggagggatataaattatgtgaatacctatcttcagaacctttgaaagctattagaaaagaggatttgggtttacttctgagagcagaactaggaccattggatgtgttacaggtgacaagaccactctgccatttaaaacttcctaatgtgtaagggctatttaataaagagtgagtcagtctctggcatctacctctatagcagatcttatacacagtctaacgcctaactagattaataacaccttaaactattgacttgtttacctcactattacctgatgtttgggtttcaataagaaattacaaggcctgctaaaagtcaagaaacagcctgaagagagaaagcaagtgtcagaaccagacttacatatggcacaaattttgaagtgatgagactaagaatttaaaataattgaaatgttaaggggtctaacagaaaaagtaggtacaatgcaagaacagatgggtaatataagtagagaggtggaaatgcccagaaaaaatccaaagcaaatgctaggggaaaaaaaattaccgacactgggaggcttaggtgggaggatcacttgagcccaagaggttaaggctgcaatgtgctgtgattgtgccactgcactccagcctgggtgacagagtgagactgtaaaaaaaataataagaatgtgtttgatgggcagttcagcagactgggcactgccaaggaaggaagtggtgaacttgaagactaggtctatagaaacttcccaaactgaaatgcaaagtgaaaacagaatggaaaagaagtccccacaaatagaacagccaagaattttggtaccatttggaaaggtataatgtacatgggcttggaatactggaaagcaagagaatgaagccaaataaatatttgaggtaaaaatagccaagaattttaaaaattagtgacagacacccaaccactgatccaggaaactcaagagaacaccaagcaggataccaaaatgcctacaatctctacttaggcatgccatattcaaagtacagaaaatcaaagtaaaaccttgaaagaagccagagggggaatcaccttaccttacctgtagcgtaacaaagataaattatggacttctcagcagaaccatgcaagcaagaagataagtgttgaaagaaaaaacccaccaacttagaattatatatccaatgaaattattcttcaaaagtgaaagacaaactagtgagtttgctagtgctggaggtggtcaaaaagaggtcgaataacaaggacgagaaatgttgggttcaatgtttgcctaactatattcggtacataagctgttagctctggaagatggtagtatgtgttcagcaaaaatgtatttcagtgattttgaggaatgtcgcaaaccagattgtacttttggaacttcactctgctcagatatggaggatctgagcaggcctgtagcaaagaaccctatttttgcttacaaacataagcccagaatctctgacttttggcctgcttgtgaaaaccttatggaatgatgtttcatggaacacccaatttgggaaacaccagattagatgacatttatgacaaatgagaaatgggattctttattaactggataatatatgtactaagtgagtgaggctaaaatgttagaagataaaggtaacagtattaacttcctcatttgaatttgagtacatgtggaaagactgattatggagggtcatttctttaaattccttctctctgcttgatttgaaatttcaaaaacagaaataaccaaagttaaatgctgcttatcagctcctggcttactctctctgctccatccttccaccctcaaggtcaaaacatcattattaggaggttcagctttcctggcattgggcaccttttctggttgaactagcctgtttctgccttttccctagtatgtttatgttgctgctattactcttgtttaagaaaatttatcacggggcctatatgctgttattcatgggaaaatgacaactctgcttcactagtaggaatgccagagatgttttaaggacagaagtagactacctgatacaagtcagtgtttccttattggattttgagttttaggaacataactagttgtcctgtcactgttctgaacccttagttgaactttcatttggataacatcttcagaatacccacccccaaaataattccaggatatgagagggaggttagcataatggtaaagcatgaggactctgaagacagattatcttaagttggagcccccttttgcccctgtctgttgactttgggtgaagtttcttaatggttaaatgtggtttagtttcatcatctataatacatggttagtaataatctctaccagtgaagattaaatggagcacttggaacaatgtttggcatatagtaagcagatgagaagtgtagtagctatttggttagggtcacagtgtggtataatgaaatcttggaatacataaagtttctttgtaacatctaccctaataatttaacattaccggtttttcaaaacctagttgacaggcattgggttccttgcagaaaacttgataaaatatctttttccacatgttgttaacaatctggaagattaatgaaactctgcaatagtggatttcttaagagaaggaactaaaggaagtgagacagttcgttagatgatacttacttacattaaagtaattcccaccaaaaggtaaaacttctgcagtcaagggggaaaaaatgacagctccatctgagatgtataggataacctgtgaaaagaaatgagaaaggattggctatattggagtttatatttttaaaattgtcaattccaggattagataccaagccaaatttgagcatttgtttcccagaaggtgagggcaaacca

SEQ ID NO: 89292 - DNA, 1033 bp, Homo sapiens
acctatctcggatattggtctttcattaattttgcttgatatttgatgtgcccttatattgggaagacccaagttgtcttttatttttgcttctcagtttatagtttttttcttaaatcttattataggtatattgaatgttctgaatcttcacgctgctcatcttttgttttgcctcacttttctcattttccttcactatttcctatggttttgttgttgccattttttgttatactaattcttccttactgcatgagaactctgcttgtctaatgttgggaacttagatttttttgtcagatttttgtggtctctgttgaagaaagggatttatcattgtgtttgcttggctagttcacagattgtacaactcaggtcaagtcaagaaggaatcaggagttgtagatgttagtgccagaatttgctgagtcagcccagatctgactgggaccttgcctctatttttgccagcacaccaaccccgccatccaattattctggtattgtactccctgaatcctccctgtacctctggaaaccacagcagtcacagctgtccttgttaaaatgatttggagtgatgactaaaatattcacaccttcagagtttggcaaagtcttgtaggaatgttcggacctatataatgtaaatgcaaaatactgtttaattagcctactaataaacattaatgaatttttacatctttaattattcttttgaatagagactatttaaacaaacttcagtaaatgcagtagtcccctgcttatcctcagggcatgttttccaagacccatagtgaatgcctgaaacttctggtggtactgaaccttatacactgtatatattcatgtgtcacttaacgatgggatacattctgagaagtgcatagttaggcattttttcattgtgtgaacattgtagcatgcacttacacaaacctagatggtatacctactacccactgaggctttatggtatagcctattgcttctaggctacaaacctctatagcatgttactgttgtg

SEQ ID NO: 89293 - DNA, 1035 bp, Homo sapiens
ttgtagagctgcagttgagcattttgaacaaaggagtaaattatcgtcttgaaattgtaaaattattttaccagcttgcattttttccccttctgtaggagaataacactaacaatatgtgagaataacgtgaataagaaatgaacagtagtaatccttagcattgtataagtactgaatttgtaaagagtaatagtgccatctagtggaagagcgggagctacagatgaaaccagagtccttaagccagtgttcattcttttacgttaaagtatgtaacagagaggaatttacactctattgccctttgtgcctgttcactcattcatggaatggaaatgtaatatcaatactaatgctaattactgtcaagagaggcattcatagaactctgatggttaaaacaatgatgcatataggcagttacgctttcttgagacgaagtccttaataaactgctaacaaagattacattttgttgttactgtatcagttcttagaagtgagatgagattgaaaagtagtttggagccacattgtggagggcacttgaatgtcaggcccagtagaggttgataacaggccaaagggaagaaaggagtggtggtgttggcagtgtctgaaaatggttatagttgttgagtggattagattggagagagattagcagtagggagaccagatgcaacttaattagaaaaatgtgctcagcagtaaaagcctgaactacagtgggtggtagcagtgaagtgtgtgtgtgtgtgttttgagacaaggtctcactctgttacccaggttggagctcagtggcacaatcatgactgactgcaccctcgacctcccagggctcaggtgatcagcctcccgagtagctgggactacaggcgagtgccacgactcccgactaatttttgtgctttttgtagagacagtgtttcaccgtgttgcccaggctggtctcgaactgctgggctcaggtaggtgatccacctgccctcgcctcccagagtgttgggattacaggtgtgagccact

SEQ ID NO: 89294 - DNA, 2972 bp, Homo sapiens
gtataatattttattatcccgtgcttttcttagataaagaatctggagaaaggctttccaaaatggtagaggatgcgtgtatgttgctggcagattacaatggcagattggcggcagaaatagatgatagaaagcaactcactcgaatgttagcagattttcttcgttgtcaaaaggaagcccttgcagagaaagagcataaattggaagtgcgtaacctttttcttctttagtgcttatttatttaattctctttttgttaggaattttaaaatattttaatctatgtgcacattttgcattttttaacatagacctttttaagcagtagcccaggtaagcttctccttgtattaatggtttttcttctacttgaaccaaattaatcttgcaagtaaacttagaaatttggaattagcaaaattgattgcatttaaaaattattcttgtgaaattccatgcaactataatttatcttaccagtttaaccctaatgtatcacagaaataataggaaaatagcaggtggcagtcacttgtagtaggatttatttagtttctgttttgagaagatgtagtcttttaggtataccattaagtctttaaattactcccttaattccacccgccaattctaatgcttacatgttccagccccactcccggctcacactcttaggcagaaattcattgctcctgtaaattaagtaataattaataccgctaatgagaaatctgggagtacaggaggtgattttaaaaaatgctcgtatttcctttgattagagtagcaattgttagggatacatgagccagatttggttttatgtaaaaaaaatctttcagttgatgagttcttgtttaaattgtattgctgtggcaatttcttattgtaataatatgtaggagaatttctaatttgaatccctttatttacagaaagctcactgtaaatttgtaggaatgtcatggtactaccccattaagttatttttattagtgtttagttattgattcagcagtctctaattgtgccaaaaatggtgcttagattagattgccattgctacccatgggagctgctacttaattattcccacctcaaattcccagctctcaagttagcactactcctttgcaatttactccttctctgctcgtataaataccctcagatgatgatagttggtggccactatacctttgaagaggttgcccacttctacatggaaaggaaaagatggtttttttttttaaaagatgaatttgataattaacttgccactatttcaccttgtgatgaaacctcaattttaaacatagtgttaattgttttattgtccacagaattaagggtaagtaatgtcatacaatttttgtctttagtcttttagtatggtttctttaacttctattgagcttctgttgcagatattggacatgggcgtatcttctaacgatgtcgtcaccattagtatattcttcctgctaaaaataaatatcaaaccctgaagcctgtattgtctcatgtttttgaaaattgaagagaagactgtaactttattctgctttatactttctcacttatgatgatggtcatttgtcactgtttacaaaaacagaatttatatttgaagtgtaactgtagaaaatagatcagatgccactccccacaacccccttttcccccagtgccttccagccacatttcatagttgacagtcatagattatgaggctgatgataataataatgttaacattcatgtgtcaggtactattctaggcacttcacataagcaactcatttaatcttacacagcaggatgtattatccacatttgatagatacagaactgaggcacaggaagattaagtaacttgcctaaggtcacaaagagctagtgagttgtttggaacgcagagaatctgcctccagagccagtgcacttcatcaaaaagacacattgcttcctgtttttacttaaatctaagattaaagcaaatgctaaagtcctattttttccaactttttctgctccctctcttctcagaggtaatcactgtcttgaaataaagccttctaggaactttttttgttgttcttctgcataactggattttatattataaagaagaaatcacctcaattatgttcagctgttttttaacaagtaaatactctttacaagtacagaaataaacttgaaagttattccacagaactctttgtaaattatcacttagaactatgttattcctttgtagaagatgtggaaatgatttgagatatttagacttttttgtaccaagtaggtggcatcactttgaagttgagactgagaggtgaagatttatgttttctgaatcagctgtgatactatcaagtaattttcatctattgtgtatctttgaacattaacagtggttgaccagatactgatgtgtcatttgttgctgcatttttgataatggaacataaatttaaagtatcagttcgggaattggccatttcatatttcttaaggaagccattattaaagcatgtgtaatgaatgaaaacatgaagtggtttaaaatttgtgttttaagacaatcattatttttgaaacttctgactatagttggttactaagcagaagcagataactgttgggccgggtgtggtggttcacgcctgtaatctcagcactttgggaagctgagctgggtgaatcacttgaggtcaggagttcaagaccagcctggctgacatggtgaaaccccatctctacttaaaaaaaaaaaaaaaaaaaaattaaccaggtgtggtggtgggtgcctgtagtcccagctacttgggaggctgaggcagcaggatcacttgaacctgggaggtggaggttgcagtgagctgagatcacaccactgccctccagactgggcgacagaccgagactccatcacgcgcgtgcgcgtgcacacacacacacga

SEQ ID NO: 89295 - DNA, 1016 bp, Homo sapiens
aggccccattaggataggaaatccctagcagccagtactaaaacttttacagtttaaactttttttggttgtgtaataatatgtttataaaatgtttactagaagcaagcagtgtgtctagatcacttcacttttgagctgctggccacatagtgatgctaagtagacatttggacagttttttccagggaatgaatgtctgattatatttaaagttaccgttaaccttttcaataacactatgcattgttactgttaacatttttctttttttctttttttttttttttagtgaaactgatgaaagttgtaagaagcaccttggaagagtgttatctatttgggaagaaaggtctgtttatgaaaatgatgtattagaacaacttaaacaagctctgtgtaagtgtagaatcctgatctcttaccttgatctcttcattaaaatgtattctttcattaatacttaaatgttctttcatttcagatggtgataagaagcctaggaagcgaacttatgaacagataaaggtggatgaaaatgaaaactgttcctctctgggatctccaagtgaaccaccacaggtagaaattttaccctgttaaaagagttacaaacttttacttcatgttgccaccaagctttattaatttcgtttcacttctgtaaattgatttctattatacttttaggtacaagaaagaagccacatgaatatctcttcctcattaacaaattgcttatgttaaatgtagtatgttgtatattgtatattttgcatagaaatcatgttttgtatagaaagaggatttttaattgccaaatatggttagatgtgagatgttagctatttaaactttttaaaataaaacaaaacatgcctattttgttatgtgattttttttttttgagacggagtttcactctgtccccagggctggagttcagtggcactatcttggctcactgcaacctctgcctcctgggttcaagcgattctcctgccttagccttccaa

SEQ ID NO: 89296 - DNA, 1048 bp, Homo sapiens
ataaacaaaaaatagtaattgattgaagggacatctctttcaacctgttttacatttcatgctcttctgttgtttcacaatagcttaataatgatttcgaattaacatgtctattaaaacaatcctaaattcaatgtaggatttagggtgccatcttaataacatgagcaatcaccatcttattttaaatgactatatttcatatagtttgtaatggttttactaaaatttaatacaggatagagtcaccgagatgcatttttacatagacattagttctggcgattttagcagcagtgactggttagtttggtagtaaaatgagagactagggttgaaatgatacataaaggttagtagggttattttagttctcaaaatgcttaatttaggtattgagaaagtttgtccaagtaaagatgttttaagtagatttttaactttttcttatttttcagccaaaccaaacaggaagcttacttttctctacctagccaatgatgtcatacagaacagcaagaggaaggggccagagtttacaaaagattttgcaccagttatagtggaggcttttaagcatgtttcaaggtatgatcatagttttgggtattaggtaatctgttttaaatgtaccatatgtccttttgctaaaatttgccttaaactattaaaataaaaagtagggaatatagttttttgatgcttttatttgaaaagacttccctctacatggcatttataaatgtattaaatgccttctctgaaggaaaaatattttttgaactgttgctaaggtgggcctttggagtacttgaattacagctttcctttaagagaccagaaccaactgctatattggaatgaacttcattaaaaatgaatgaaggtattgaagtaaaaatttgtgtgtttataaagctatcagtcttgtaacaaatatttccatatacacttagtactgtttctattcttttttttttttttttttttttttttgagacagagtctcactctcacccaggctggagtacagtggtgcgatcttggc

SEQ ID NO: 89297 - DNA, 1048 bp, Homo sapiens
aagcctgggtgacagactgtatctcaaaaaaaaaaagatttttaaaattacaaatggacacattgtaattgtatgtatttatgggatacagtttgatgttttgatagatgtatatgttggtctaatgatcaaataagggtagttagtatccattacctcatgcaattatcgtaacataacatttttaatgaaaaccaattatatttgctaaaaaataccagggaaaggagtgattattttacatttttccagatctttataagatctctcttaatagaagcctgctgaattctcgtgtctttttctgcattcagtcttgctgtatcacatgacctctgcaaaacaacactgtacgcttgtgagagaatgagagtgaaaaaaggcaaataatagatgagcattcttgtgaaagtagttctgacttaattgaccccatgaaagtgtcttgaccccctggaatccacagactgttggctgagaagtggaccattttctgaatattgataattagatcaagagactaggatacattgctttgccttaagcagacatatccctctaaaatattaattccccagaaaagcagaaactgaatttataaaatttccctttggcccgtaacgtaattttatttaggttctctttcctgtgacgttaaggttttttaaaaaaagttgttgatttgatgtttttacatctgattcaacaaattatctctacatttcttataaaaataaaagtgtgttcctacattaaacaaacaatctgtaattttacaggctttttttcttgataaaataaatttttcattcaaaatgtacaagtagaagtttcttctgttggttttctggccgggcgcagtggctcatgcctgtaatcccagccagcactttgggaggctgaggcgggtggattgtttgaggccaggagtttgagaccagcctgggtaacgtggcaaaaccctgtctctactaaaaatacaaaaattaacagggtgtggtggtgcatgactgtagtcccagctacccaggaggctgaggtaggagga

SEQ ID NO: 89298 - DNA, 1087 bp, Homo sapiens
ttgaatattgctgtctgttacaaagtcagttaaaggtacgttttaatatttaagttattctatcttggagataaaatctgtatgtgcaattcaccggtattaccagtttattatgtaaacaagagatttggcatgacatgttctgtatgtttcagggaaaaatgtctttaatgctttttcaagaactaacacagttattcctatactggattttaggtctctgaagaactgctggtgtttaggaataagaatgtgcatgaagcctaaaataccaagaaagcttatactgaatttaagcaaagaaataaaggagaaaagagaagaatctgagaattggggaggcatagattcttataaaaatcacaaaatttgttgtaaattagaggggagaaatttagaattaagtataaaaaggcagaattagtatagagtacattcattaaacatttttgtcaggattatttcccgtaaaaacgtagtgagcacttttcatatactaatttagttgtacatttaactttgtataatacagaaatctaaatatatttaatgaattcaagcaatatatcacttgaccaagaaattggaatttcaaaatgttcgtgcgggtatataccagatgagtacagtgagtagttttatgtatcaccagactgggttattgccaagttatatatcaccaaaagctgtatgactggatgttctggttacctggtttacaaaattatcagagtagtaaaactttgatatatatgaggatattaaaactacactaagtatcatttgattcgattcagaaagtactttgatatctctcagtgcttcagtgctatcattgtgagcaattgtcttttatatacggtactgtagccatactaggcctgtctgtggcattctctagatgtttcttttttacacaataaattccttatatcagcttgacgtcagatgtctggttttctttttaaaaaaaaattttttttaccattggaaccatttttaactgtagagttcagtagttttaagtatattcatgttgtgcaatgaatctccagaacttcttcatcctgcaacactgaaactctat

SEQ ID NO: 89299 - DNA, 1042 bp, Homo sapiens
ggaggccggggcaaggggatcacctgaggtcagaagttcaaaaccaccctggtcaacatggtgaaaccccgtctctactaaaagtaaaaaaattatccaggtgtggtggcatgcacttgtagtcctagctacccaggaggctgaggcacaggaatggcttgaacccaggaagcagaggttgcaatgagccaagatcggtgccactgcactccagcctgggtgacagagcaagatactgtctcaaaaaaaagaaaaaaaaaaaaagtttgtacatcaagttgaatgatgaagaataaaaaggaaaaacaatagtttctacagctgttagggtgatttactaacactgctttaaccctaggtcattcttaattttgttttcttttccccctctcaaaaacactggaaaattttcttaaatctgggaagtatcttggtatgtgtcttaaaaatgatttctcaatgactttttcctccttttttgttttctgttaaaggtgactttgctgttctactaaaggctggcatgaccgttaagcaggctgtcctttataatgcattgtcagccatgctggcgtatcttggaatggcaacaggaattttcattggtcattatgctgaaaatgtttctatgtggatatttgcacttactgctggcttattcatgtatgttgctctggttgatatggtaagtttttaagaagtcttattacattattgaccaacaataaaatagagaaaatattcggtaaagcctcattttttttctctctttttgggggagcaggaagtggaatcttgctatgtcgtccaggctggtctcaaattcctgagcccaaatgatccttccatctcagcctcctgagtagctaggactataggctcaataaaatatctttttttttggctgggcacggtggctcatgcctgttagtccaacattttgggagaccaaaccaggcagatcacgtgaggtcaggagttcgagaccaggctggccaacatggtgaaaccctgtctcaactaaaaactacaaaaaaattaa

SEQ ID NO: 89300 - DNA, 1050 bp, Homo sapiens
atgccaggacccaacacacacacacactaggcttcttacaatgctagtgtgatgacattggtatgggcttttcagttgggaaaataagcagtagaaactgtgcacattaagtctagtattcctgttatttgtggccatggtaattcgtcaagcattgaaaatgctcactatttatatattatgggggtcactgggaatgtatctgaagtacatgacatgcattaagttctagatagctagctgctcattggtcattttatttttaatgtcctaaacttcacctcatctctgaagtatctgaataattgcataactgaatgatttcaattttgaccttacctagccaactttctgactcggtgtgtgaaactgatgaatttataaataacaaattattttgccttcagtctcatgcaagtcaccaccatagtcatagccatgaagaaccagcaatggaaatgaaaagaggaccacttttcagtcatctgtcttctcaaaacatagaagaaagtgcctattttgattccacgtggaagggtctaacagctctaggaggcctgtatttcatgtttcttgttgaacatgtcctcacattgatcaaacaatttaaagataagaagaaaaaggtaagaaaaagtataccgagtacttactatgcttcagatatttatttatagtagtactctaactagattgttagaatagcatgcccaggttgtatgagctttatttgagagggagttcagtacccttgaagtactttttggtcccagagatatttatgaggagcatttctatatcttaatagctctgaagttttctgtctttgctattcttttgaaactcatgacaggataagaaaagcaaggatgaacatctgtataagtgaccagacaaggtaccagcagggccttgaagaccagaagcatcgtgtatacatggatacactatcaatatttattagtagttacgattaactaatgtcattaatttccagtcacccagtagctaaatgttctgttttcttttaaagggtatgtgacttttaca

SEQ ID NO: 89301 - DNA, 1118 bp, Homo sapiens
aggagcgagtccggcaggtccactggagactccgagcccaaaccccgctcccctgagccgacccgactcgcctcctaggtctggggcggcaactaacagcgcgcccggagcacgtccacaggttcaacccgaaaagcacaagggtcggccgtccagcgacctctcttaccagggggtcatagagcaccacggagcaggacgtgccaaaggccagaagtcctctgggcccagagctccagttcaggactccccgcacccggtttgggcagcaaaacacgtgagaagtctccagcacgggtgccaccatgtcgccaactggtcagccgcacaaacaagagacgcgcacttccgccctcggagcggaactactagggtggtttctcctgaggcatcacccagtccacgtttcgcagccagccgagggccagacggaggcagccccgcccccctgagactctccgttcccaccgcaggctggaacccctgtgcaaggccgccgctttgctagctctgctcttggaccgtggccccgctccgcgaacgagccaggcctttgtctcaagagcgaaatccgacccgagtggctcgggaccctcccgaaggacccggggctcatgtgcctggggcagcgtcagaaacatctcgctgccccttacgacccggctcccagcagcagccagggctggccccgggggcgctggctagcgagtagggcctcgaggaaatgacccccaactgcttacaatgcgctagggccgcgccacgcccccgcggcgtcggcgaacacacggaaaagcggatccgtctgcggagccgggttccggggtcgcactgcgcatgccctgcagtcctgggcgaagggggcggtggttccccgcggcgctgcgcgcggcggtaattagtgattgtcttccagcttcgcgaaggctaggggcgcggctgccgggtggctgcgcggcgctgcccccggaccgaggggcagccaacccaatgaaaccaccgcgtgttcgcgcctggtagagatttctcgaagacaccagtgggcccgttccgagccctctggaccgcccgtgtggaaccaaacctgcgcgcgtggccgggccgtgggacaacgaggc

SEQ ID NO: 89302 - DNA, 1061 bp, Homo sapiens
ggggcgtggcgcggccctagcgcattgtaagcagttgggggtcatttcctcgaggccctactcgctagccagcgcccccggggccagccctggctgctgctgggagccgggtcgtaaggggcagcgagatgtttctgacgctgccccaggcacatgagccccgggtccttcgggagggtcccgagccactcgggtcggatttcgctcttgagacaaaggcctggctcgttcgcggagcggggccacggtccaagagcagagctagcaaagcggcggccttgcacaggggttccagcctgcggtgggaacggagagtctcaggggggcggggctgcctccgtctggccctcggctggctgcgaaacgtggactgggtgatgcctcaggagaaaccaccctagtagttccgctccgagggcggaagtgcgcgtctcttgtttgtgcggctgaccagttggcgacatggtggcacccgtgctggagacttctcacgtgttttgctgcccaaaccgggtgcggggagtcctgaactggagctctgggcccagaggacttctggcctttggcacgtcctgctccgtggtgctctatgaccccctggtaagagaggtcgctggacggccgacccttgtgcttttcgggttgaacctgtggacgtgctccgggcgcgctgttagttgccgccccagacctaggaggcgagtcgggtcggctcaggggagcggggtttgggctcggagtctccagtggacctgccggactcgctcctcacccctcaccctttgccgtctcacgcgtggcgtcatcctagggtcattgctgcccatgagctgctagtaacctgttagtcccacgcagaaacccgaatgataagcatcttacctgaagccttccttgggaactgtagtaccgttaatcaatttgggttttaaaacaattgaaatttatatgtagattaaaaccatcatcccacaggtgcaatctcatttcagtatttccttcagttttggttaatgaacttttgttgtattgaatttcaaggaaatgttacctgtgtttta

SEQ ID NO: 89303 - DNA, 1034 bp, Homo sapiens
ttcccaatggctaagttggtctatacagttagtcttgcatctcaaaaggaggctcagtgtaaaaagtaaaatgttgaaaattcaaatacaacgcaggagatggctatatgtatttctgttcatacggctttattaatttggttaaaaatttcattattggccaggagcgtgtctcatgtctgtaatcccggcactttgggaggcagaggtgggagcatcgcttgagtccaggagttggagaccagtttaggcaacagagcgagaccccagtctctacaaaaagtttaaaaaaaaaaatagctggttgtggtggcgtgcgcctgtagtcccagctactcgggaggtagaggtgggaggatcgcttgagctcagaagtttgaggctgcagtggacgggggtcgcaccactggactccagcctgggcaacagagccagaccctatctcaaaaaaacattattctcacaccctttggagattcaaatatatatatgaaatatttgtaaccacattaccccatcttgagcttgcttgcctcttcctggtttttgtttcttgttatttgcattcttgaatggcaagagaaagtgcaaaaaacaagggtaaactttaaagggaccatgaggcaaggaccgactgtagaatgggagagaccacagcaggctctccatcatctcccacagcgtctcctcatccagcgccgtgagcgcggagccttgcggcattgcggcaccgttccgccatggctgggcactgggaggaccctaagaggggcggccataggggtggagttgtcagggaagcaggagcccgggagagccagggtgacacccttttaaaatcaactccgtcgtaaaattagcaaggcacactctttgccagtcaacccacggtcctgagatgtttacggcagaggaagcatcttggtaaagtctgcaaggacaaacttgccgctatatcacaggacaagatctgcttttaagatgattatactcatgctttgatgtacttaacacactgaaatgaaattctgatt

SEQ ID NO: 89304 - DNA, 1052 bp, Homo sapiens
aaatttctggacaagattatctccaggtctcttcatctctaagattctgactccagaattttcagttaaaatattagttgcctttagatggtgctcccaaaatcctatgatatttctttagttatcttaaatatatctactgtagttttgatatgggttctgaattagttttatttttcattacacactcatttgagggcattttgagccaggcacaaatgcaaaattttctgaattattaagactttgctatgattttataaatgatgtttaaaaaagttttaataagctacttatttgcttctgtaggattagtcacatgttaggtcaataaaaatcattaaatggtacaagggatgcctgttagtatggataataaaacataattgcaattatattaattgccaccagataacatcaaagactgactttcagtataggagtttgttataaaatgttaatttaggcttgtatgttttatcttccgtttaaaagtgaggttacataaaatggattgcttgtgtattactgtaatctataactattatgattgatttcctttcattgaactgccagataatgcagatagcctttccaaccctttatcggtgatatataaaattttaatatcattttgtatttttaatatgtctgaattttaacattacttttatgtatagacattcttaaaatcatatagttagttaagtggctcaattgctgtgacacatgaagttgaagcccatgatcacagttggctggcagcagagttaggacatgaacctgggccttctgagttcaaatctaatgctctttagtccagctgcttccctgaaacaaataaaaagaaaatccaaacccaaattaggttatttgccccttttttggtactactttttcttttgttatcactgagaagttgcaagtatttaaaagatctattttgaagtgtgtctctaatttcaacaataagtcatattcttggtagtagcacctgactacaatgtttcatataatgttcctgccaagagtgtttagcctgcatctaatca

SEQ ID NO: 89305 - DNA, 1068 bp, Homo sapiens
cctgggtttaagtgattttcctgcttcagcctcctgagtaactgggattataggcatatgccaccacgcccagataatttttgtatttttagtagagacaaggttttgtcatgttggccaggctggtctcaaattcctgacctcaggtgatctgcccacctcagcctcccaaaggataacgccctaggattacaggcatgagccaccacacccagccttttattttgttttaaacaaaataaaacataaggttttcaaacaaaacataaagtcctcaaattaacaaacatacccttaaatctgtgtgcattagccatgttggtagggctcatagtagctgttcattatttagttgtcttaacaacttttcatcttggtctttgggctgacatggtgaaaatgctctctagttgctcttgagcttatttttcacttctatcataaatgtcatagaatggagagaaggactggattctcatttaatagtcattatatttaccaagtaaccactgaatagaacgttttagagtgttcattgtattcctgcagacatttattgagcattttcaattattcgtgtagtggtgtgggaaattgaagtcaggattctttacttagagcttacaatccagtacagttgataaatcataacgtggtggaatagagaactcacagtgaagcctgttttttcttcccccagtaccaatattagcatgtggcaatgatgattgcagaattcacatatttgctcaacaaaatgatcaggtaataatgtttatattaagaggctggaattatattctgcttagttatatctcaatacagactatatccagattatagaattttagggaatgttctaatctaaaccaaaataatccaatagaatctttttttgacagtcctctgttaagatggttgtctactctgaacaccaagtaaccgctgccttgaccatcaggctcagagttgttagggggaaacaggtcattaggtgggggaggagagatggaagatgctgtggtagttgtttttctcttaaagatttaaacgagatataacatacct

SEQ ID NO: 89306 - DNA, 1568 bp, Homo sapiens
ccacaggcgtgtatcaccatgcctgactactttttaaattttttgtagacacagggtctcactttattgccccggctggtctcagtttcctggcctcaagtgatagtcccacctcctcagcctcgcaaggtattaggattataggtgtgagccactgcccaacccacctttttttctatattatatgtatagtatgtatcattttatatcttaaacatttaaaatatttgagattacaaatattatattatctactcagaggtgctccagttagtgatttagatattacgtgatgggtttttcattcccaaaggaatgctttttcttgtctaatcaaatagtgttctcagtaaaagagcaacgcagtaggactgtctgagaccaaatgatgtcactggtatacatgaagatgttaaattcttacatcaagcccaatgatttttatcttactagtttcagaaagtgctttctctctgtggacatgaggattggattagaggagtggaatgggcagcctttggtcagtatgaaattttgctaatgcacatacaatgggaacaaatatgtgttacttccaagaaagcagccttttttgttttaatttttaagttttctttgtatgttatgtttttctattgtcccaattagaaaggaggatgcttatctcttctgttgttagttggatggtagatgattaaataaattggtatttatcagatgacattagctgtcttgttcacatgcagaccttcttgaaaagttctttgtagaacttagtagactatatactacatgttgtaaacatgtattagcattgtatgcatatttgtcaatgttattaaaaatgaatatagatcaaatgaattggagggtaaggaaacaaagtattgttttttttctggaaaatctggaaatatatatattatagacaaaaaagtcttatacataaacttcacaatataatgttttaaaattaatacaacttattttttaattaggtagagatcttttcctagcaagctgttcacaagattgcctgataagaatatggaagctgtatataaagtcaacatctttagaaactcaggatgacgataacataagactgaaagaaaatacttttaccatagaaaatgaaagtgagtaataatgaaaatatccaatataacgatacttaggtctcctagttggttgatttttttttcaccacccacctatgtgaaggatagtttttcacaattgtcagattcctacctgaaatttcttttttctttctttttttttttgagacagagttttgcttcttcacctcggctggagtgcagtggcgtgagcttggctcactgcaacctccgtctcccaggttcaagtgattctcctgcctcaggttcaagtgattctcctgcctcagccttccaagtagctgggattacaggcacgcaccaccacgcctggctaacttttttgtatttttagtagaaatggggtttcaccatgttagccaggctggtctcgaactcctgacctcaggtgatctgcccgcctcggcctcccaaagtgctgggatt

SEQ ID NO: 89307 - DNA, 1028 bp, Homo sapiens
ggagtgcagtggcataatcacagctcactgcagccttgaactccttggctcaagtggcttagcttcctgagtagctaggactacgccatcacacccagctaatttttaaaattttctgtaaagatagggtcttgctatgttgtccaggctgtttttcaactactggcctcaaatgatccttccaccttggtatcctaaagtgttgggattacaggtgtgggccaccatgcttggcctgatactttgtattttcctatttttatgtgagaatgagtcatttttcatatgtgaaatatttttcttctaaaccatattagtaagatttttaaaattgctgaggataatgtttagtgcttctcattaaagtaatttgtaaaatattactaaatttgcagttttagcataggaagacctaaaggaataatgtgaattacttacacattttattggcctatgataaaagacaagctaaatctcaccatttgagtagtatatttaattctgattttcctattgtctagccttagaacagtatccctggatggtagatcctgttgggatgttgtatttgaaagagatatttttggatgtgacagttataaaggtagttcagtgaacattgttcacctaggtgtattctgttttttgttactattcttggtggtaaagtccatcagagttgagattttggtaacagttttatggggagaacgaaaaaatgatataaccagcatattaggagtagctatacccaaatatgaatttttttctattttcattatattgtttgaaaggtcaaaatactgatttcattatctttatttctgcatttatccttttaaaaaatgggatttgtatttgtccattcttacgcttctataaagaacttcccaagactgggtaatttgtaagagaaagaggtttagttgactcacagttctgcaaagctgaggaggcctcaggaaacttaaattaatagcagaaggggaagcagacaccttcttcacagggcatctcccaccagatcc

SEQ ID NO: 89308 - DNA, 1040 bp, Homo sapiens
tgaagctctagttatttgtttttattgcacggtagtagtctgttgtctgaatataccacaacccatttatctcttcttctaatggtagacatttgtggtgtttgcaattttttgctattacaaataatgtgcagtgaacatccttgcagtacccatgttgtttgttgtttttttctggtcatctacaaacatgatgattgttgatcacctaaagggattaggttttattttttagatggtgtcctacagcagccagtgagattattatctgcttccatggataaaaccatgattctctgggctccagatgaagagtcaggagtttggctagaacaggtaaaaatgttggatatttaaggaacagaaaattaagttttgaactctgtatttaaatcccaagtctatattgatagacctgcaaattttcactgtgtacattaaaatagtgggaatttaacagtctctggaatcagcgatttctgttgtgagaaacatagactattgattaagaattgttttctgtctgttattgtacaggttcgagtaggtgaagtaggtgggaatactttgggattttatgattgccagttcaatgaagatggctccatgatcattgctcatgctttccacggagcgttgcacctttggaaacagaatacagttaacccagtaagaaaagagtgtttaaataaagcatttctaatcaaatagagtacattctaggtaaatagtattttgcttataacactctacagaaacatagtagaggcacttgaagttcaagtgacataacttttttctgtagacattgttaaggtattgaaatttgcatgtaggtaaatttgctacgtaagtgcactgtattcctttaagctatagaattttttaatgataatttttctgaaatgtgtagctttcctgtcttcttaaaaagttaacataattggatatcttgttggactgctagatccctattattgaatgaatgtcagtcatttattgtgactgacgttcaacacctgggcatggtggctcttctc

SEQ ID NO: 89309 - DNA, 1439 bp, Homo sapiens
gagcagttttaggttaacagcaaaattgatctgaaggtacagagtttccacgtccctctacccccacacatcaacttgtagcctcccccactacattgttacagtcaaggacgattttttaaaagccaaacactgcccttcaggactgttactgtgggaaactgttagtccaaaagtgctgtccattgctcaaaactttttgtaaactcccattagtgctaactttagaatcagtttttgttcacagagggagtaacattttttgtcacaggcttttttttttttttttttggccagacataatatagtttagtcacagacttatccatcagattaggttttgaatgacctattagctatttatacacatttaattttcctctaaaggttaagttttagtcccacttgaggttgttcaaaaaggtgctctgtggaccaggcatatgacattttctatattttgttgtcattatttgtttatatggttgttgttgcaggcttcttagtaggtgaaccaactaggtttgattcagttgtctgtcctctacacctgtaactctttttacttaataaagccatcaggtccacatgcagaacccactgactcgttttacacaatatttttacattttatacaatttttatttagtttaataaatacatagaacctagtgtatactagaattgtcctgtgtactttacaaaagtaactcatttaatcctcataataaccctagaaggtaggtgctgttataactgttttattctataattgagacacagaaaggttaagtagtatctggctgctcaataaatgatgaatggagggaaatttcccacagttactgatttaaaggatacaacacatatttgaatgcttaagctcttacatgattgattggaaaatggatcctattattctgtgatccgatcttgtatacttagcttttcaccttgccagagggctttagtcttctctgttatcagacgtgagtgctttactttggtggtagtctttgagtattttgatatgtgatatgagcacttccattgcagagagagtggactccagagattgtcatttcaggacactttgatggtgtccaagacctagtctgggatccagaaggagaatttattatcactgttggtactgatcagacaactagactttttgctccatggaagagaaaagaccaatcacaggtaaaatgtcttatttatttatttattttttcttgggacagagtttcacatcacccaggctgaagtgcaatggcacgatctcagctcactgcagcctccgccacccaggttcaagcgattctcctgtctcagcctcccgagtagctgggattataggtgcccaccaccacacccatcttctttttgtatttttagtagagatggggtttcaccatgttggccagactggtctc

SEQ ID NO: 89310 - DNA, 1113 bp, Homo sapiens
tgactgtggggtgctgttggaggctcctacacaaagagtgatgaaaaggattttggaagagagttatctggaagccaagagactctgaaagcagtgaaactagcaccagtgtgagtaagactggagaagaaaatggaattcattagaaatgaagtagccaactaaatttcctggaatgtatactcagcacctcatgctacaggctttcttgattatgtgaagaggatttaagattctgttatgcttgtttctaataataatggacaataggaacaagatcaaaagggaagccttaattgtggttattatgtagagctaagcgtatggaggtggagggacagctagtttcaggatctcttcagttctaggaattgaaatggggttttacgattccatgagaggcttagtcccagttgtacacttagttctgtgtcctaagatacagggatcctgtagagtagcgagctgcttgctctcgtttgggttttgctcccatactaagtgttgggataggtatgtaggaatgcctcttactgttcttttccatgttagtttttctttgtttctgagataaagcatactgtttcttgtgtcccaggtagccatttttgatggttttaaattcttactattcatgtttgtgtctagtttcagcttctgtgttaaagtctaagttgtacagaacactcttagcaaatgagcatgtgccagttttgatggttagcatatattttcacatgtaataatttgattgatataaattgcaaaatctaagcagatattgccttttcaaatgacactcatacgaagttttaaaatactcagttagttaggtatgtttaatgaaaatactatgactaatgctgtaactgttcccttctgggaagcatctgtgtttatatgagcatcatcaggggatgtgcctgtgagattatcttggaagtagagctctgggccttccattttcagctcactgcatttcctgtcagaccctgaaacccattgaaatgttatggttcgatgaggtccctttatggatgagaggatgcccgactttatggattgcatgggagttggaggcctggtagggcttgtctgttggagagtgattgc

SEQ ID NO: 89311 - DNA, 1102 bp, Homo sapiens
aatgtgggtaacctgaagagttggttgtgtagttttaaaagtttggagactgttagatcaaagaaaatggaaagaacctttatggagttgattaatgctgccaggagcatgtttggaaaatactggagtaatggaaatactcttgcctttggaatcacatggacacagctgtgaattgcaccactttgaattaccactgctttctatgtggtggccttaatattgagacaagtgaaggagatataaaaatagtgactatattcttgatgtgtttcttcaaactaggagatatagcttctcagccttctgatgaagaggagctgttaactagtactggttttgagtatcagcaggtggcctttcagccctccatacttactggtaagatgtgacaaagacaatttaataaatcgctagaacacacagtatgttatctattgctgctgacctaaataagtgctatagaattcacttttacatagaaaaaaatagcttcaatttattctagagcctcccactgaggatcatcttctgcagaatactttgtggcctgaagttcaaaaactgtaagttaaactgtatttagctctttggtctgattctgtcgtaacttctgacttttcctccccaccccacaatctgatgtctcctttttcttccttctacctacctttttcctcctcttctatatatctcttagtggctcttcataaggaatgagaattaaaccttaacgtttatttttatattactgtttattatgttcattagttttgtttattcatcttatttttaaagtagagaagcataacaatatatattttttctttattaagaagacttggctgggtacagtggctcacacctgtaatcatagcactttgggaggccgtagcaggaggatcacttgaggccaggagtttgagaccagccttgacaacatagcgagaccccatctctacaaaaaattttaaaaaattagccaggcatgatgatgcatgcctgtagtcccaagctacttgagagactgaggctggaggattgcttctgcccaggaattggaggctgcagtgagccatgattgcaccactgcaccccagcc

SEQ ID NO: 89312 - DNA, 1048 bp, Homo sapiens
attgagtattttgacatatgaatgcaatatgcctgtcattcattcaggtctttaatttctctcaggattgatctttttaaaagtaaaccctttattttgggataattttcatttttttcccccttcatgtcacagtttttcattttatttttccccctccatgtcacagttttgatcatggaataatttttcaagatctgagagctacagtgaaaaggaaaaaaagaaagaaagaaaacatgatactatagtccctgatgattgattttttttaatcccaatcatctgtaattcttcccagagataagaaatggttgtagtatgttatctcctaggaattttttttggaattcaaacagataaataaaatatactcatagaaacaatgtgttgtttttaaaatgttttctcttcagtttatttttacttactagcttcattgtttcatctctgtcctataggcagctaagaaagagcatgcagctatcattctttggaacactacatcttggaaacaggtgcagaatttagttttccacagtttgacagtcacgcagatggccttctcacctaatgagaagttcttactagctgtttccagagatcgaacctggtcattgtggaaaaagcaggatacaatctcacctgagttcggtaaaacagcttctgattgggaaagttattagtgaaacagttatgttcattttatctacattaagcagctttagttaagagaaagataacagagtgaagggtagagcctcatgtctttgaagcctttcaaagttcttggataactgaggaagacttgaccttccttgtaagatttaaatggagatgatctttatttgggttgacctacttgtgattatgtagtcaagatggcatgcattcagatatctcagttcaagaaacataaacatctgtatgtaggaagttaggttttgcaaatggtgatagaatgctaccacaaagcctaatggataacttatcctaagctaggattttatgggacaggaataatgaagatacaactaagaaaactcat

SEQ ID NO: 89313 - DNA, 1177 bp, Homo sapiens
aaaaaaattgtattaataacatatttattaatttgttatatctttatggattatggagtaataatagatacgctcttattccctcctcataaacagttatgtggtttttgttttttagggttttttttttttttttttttttttttttcagacggagtttccctcttgttccccaggctggagtgcagtggtatgatctcagctcactgcagcctccgcctcctgggttcaagtgattctcctgcctcagcctcctgagtagctgggattaaaggcacctgctaccacacctggctaattttttgtatttttagtagagacggggtttcatcatgttgggcaggctggtcttgaactcctgacctcaggtgatccacccgcctctgcctcccaaaagtgtggggattacaggcgtgagccaccatgccttgccaacagttaggtgtgttaggtttagtccatataagggctagaacttcccttacacttaaatcttaaaaggaaaatattttcttaagatttctttttttaaacattaagtggtgcattaatcttttttctatagcctaatatgcaaatctgcctactttgagtaaggctaaatagcttcaggcttcttctgtaggcgtgagttgaacttcagttgagtgtttggaagatgtttgtcatcagtcactagagagtgaccagtcagtacaaaagcattccctactagaaaaatagctgtgtccacagccttctggtgaggggttggttgcctggcttcagtctatttcaaaagtcagtgcatataaattgaatattaagtcatatggtgtatatggcacttaaacatcacttcctaacaggtaaaaacccagctttctctgctttgtgaatagtgtatacatatttctttcagagccagtttttagtctttttgccttcaccaacaaaattacttctgtgcacagtagaattatttggtcttgtgattggagtcctgacagcaagtatttcttcactgggagtcgagacaaaaaggtaattatttaaaaatttaatattttttcaaatgtaaaaataatatttttataggtatgtttgaataaaaaatgcataatcctgcctttctgttacagcttttaaaaatcagctatgtattcctttctgtttttcgtatatgtacatataaaaa

SEQ ID NO: 89314 - DNA, 2295 bp, Homo sapiens
aggttttcctcatagctgagtagattccctgagcaatggacagtgtagaggaagagctagaaagctgataagttctttttttttttttttgagacggagtttcactcttgttgctcaggctggagtgcagtggcacgatctcggctcactgcaacctctgcctgctaggttcaagcgattctcctgccttagcctccctagcagctgggattacaggcacccgccaccacgcccagcttattttttgtatttttagtagagacggggtttcactatgttggccaggctggtcttgaactcctgacctcaggtgatccacccacctcggcctcccagaatgctgggattacaggcatgagccaccgcgcccagcccaaaagctgattagttcttaagcattttgtggtagcttcttggggaagtgcatgagcctactgatgggactccactggatcagaaccaatttgtgagtatagaaggcatgttagacacctctctgtggtctctgggcaggaacgctttgtctttggaccaaggtgagctctcggagacgcatgtctgctgtaccgtgccttctttctgatgcttgaaatgctctcaagtcctggcacaccatacacgaatgtaatgatgcattttttaaaataccagagcaaatactttgttttatctttgccgatgaaactgtagtacatggctagaaaccttgcaaagagaaggctttacagtgtgtgatctgtctgtattaggtggttgtctggggtgagtgcgactccactgatgactgtattgagcacaacattggcccctgctcctcagtcctggacgtgggtggggctgtgacagctgtcagcgtctgcccagtgctccacccttctcaacggtcagtctctgtgtggggcttagttttaagaggaccacttggtttcttaatatgtagccctcatgtcatttcatttgtgaattctcctagcctctgagttactgtcttttttttctttttttttttttgttttgagatggagtctcactctgtcgcccaggctggaatgcagtggcgtgatctctgctcactgcaacctctgccttctgagtttaagcgattctcctgcctcagcctcccaagtaggtgggattacaggcatgcgccgtcacgcctggctcctttttttatatttttaatagagatggggtttcaccatgttggtcaggcaggtcttaatctcctgacctcaagtgatccatctgcctcgtcctcccaaagtgctgggattacaggcgtatgccaccgtgcctggcctgagttactgtcttttgcaaaatgcttatgtttctcataataatttttaaattgatagaacctaatgattcagaatgtaaaatacaggttaggaatggggctcaaagattcttacttcaccaaatctaggactataatactttctctgtaacaagcatcttcagtggaacaagggtccctacagccagctggggaaacactggctcatgggccttgccagcagaggacacagataaatctgtgtgcagcccctgtaaagaggaggctccttgaggacacaggagagcagtgcagcatgtcctgggctgatgcctgcagagtcttttgtaaggcagggacagttgggacactgtgaagaactactttagagcaatgacgaagataacaatttcatgctaagttaatcactgttgtccccctcccttaaaaacagatacgtggttgcagtaggattggagtgtggaaagatttgcttatatacctggaaaaagactgatcaagttccagaaataaatgactggacccactgtgtagaaacaagtcaaaggtatttctttcctatttttgtttccatcagattaactagaaattgtggggtctttcatggcaaattttatgccacattttcatggagagggacatatatctgtattcgtcgtgtctaccactttgttttgtggtaatctgaaattgatacatgtggtaatctgaaattgatatattgcacttgatttttaaaagtttgcttgaccaaattgcttgcatgcataatattatttttataaacaaccatttgagatgaaagtgatttccataatggtgtgttgtagaatttgactacagtagattcttaatttgattcaaaatgtttgtgatttttaaaaatattctggattgcactttggtagtcgtatccttatgattgagccctttacctcaaaagatcctatagtggagctttcaggcatagcaaggctcatgccctgggcctcatg

SEQ ID NO: 89315 - DNA, 1555 bp, Homo sapiens
tagtaatgttatctaaaagactaacttgaatatccatttcatgaaattccattgatcattaaaacaacattcatttaaaaaaattttattttttgtttttttttaaacaacatttgacagagattcattgtctgtgtcttgctcattttggtgatgttattgccagtgagtaagattaaaatttagtcttgcagttttaagtaaatatagtaaaatattttccaggttaaaataaaatggctaaaatgttaatgatgcgattttaaaacctgtacatttcaattttcaggttttaacttccattcatgtttacaccattaattggaaaaacatttcatgatttctctatctttgttttagccaaagtcatacactggctatcagaaaattatgctggaagaattgcagtggaaaaactgaacagaaggaagcagaaggtgctgagtggttacactttgcaagctgtggtgaagatcacactgtgaagatacacagagtcaataaatgtgcactgtaatggacttaataactacatgcttgcagtcactggtatcttaaaatattatcatgtaaacaggtcatctttaccttcataactgaattgagtttctgggttttttttttttttgagatggagtcttgctttgtcacaacctccacctcccaggttcaagcgattctctttcttcagcctcctgagtagctgggactagaggcacaccaccaattccggctaatttttgtatttttagtagagactgggtttcaccgttggccaggcgggtctcaaactcctcgtctcaggtgatctgcttgcctcggcctcccaaagtgctgggattacaggcgtgagccactgcgcccagcctgagtttcattttttaagtcacatagcagtagtccttatttcagtgctagaccctttgaaatgcgatgaaagctatatggacccttcgctttgttatataacatatgcacacatacccagaattttgcacatatgttcagagattcctagacctgcagacctgcctctgtgtgtcccaatttaagaacctctgttctttcttcatgactggatttgcccaattttgtgttattttgggacttaatttgtccctctttgggacatttccttatttattgccctcttcagagagtagatgtagaaaataaagagaggaaacctagattacttaattttattttaacattttctatagatagcataccacgccaagtgtgctctgtcttgatccccttctttctagcatctgccagacattgtagagtttcgcaagcagttgtaggtttgagctgcagccagtcatttcttttattctttaaaagtacatagatttgtctttttagggctttactgaaagtaaaatatcctgacatttaaactgacagatgtaggaggtaaaaaatagagttctgaaacatttgaatttatgtgacagctgaagtcacgagatgagggatatatgtcccccagggaggatgcagaaagaagaaaagggtactggaaacagcatgtcagtggtgccagctg

SEQ ID NO: 89316 - DNA, 1049 bp, Homo sapiens
agacccctgcagtatatttagatgtctggcattgtttttcccatctacagcagagtgagcaaccgactttattgatgagggttctgtaaagcagaagtcagggcatttatgtgcctgggtatacattcatattgttaagatgatactaatttccatcagagaatcttaaaattggatgatccaccttgatagaaacagctggagtttcaagcacttggcatgtagtgtatgccccacccaggctctgaatgcatggtttcctttcatactacacagctccataaggtaggggctttgattgtccctattttagagatgaggaaagtgagggagagtgactaaatgacccactttttgtgctagaagtggggaactgagattcaaaccagccctgtgtgactcagggcgtcggtgctgttctgttctgggaaccaggtatatggctgtggacagaagccatgcctcccgggcttctcttccattaactggaggggttcacccggtcaccttcaagggccaagcacttttaggcctggggacaggtgaatgttataaatgagtaaaagccttgaggcagaattcctggcctgacacagagtgcatagtcagaagtggtaacatatagttatcaactctgctgtgaattagctattgaggggtctgttgacctgggtgagctatcataccaggaccctgccaccagtgaggctttttgggccacagggcgtgcttcttccgggtcccacagagcctggtattgacaagaagtggagttctgtgcagcgagcgcattctcagtggtacaaagaggggagaagcatgagcgtgggacaggcagacactcagagtgctctcagctctcctgcacattcaagcccctgagggagtcaactttttttttttctctttcttttttgtgacagggtctcactcttgtcacctaggctggagtgcagtggtgtgatcatggctcactgtaaccttgacctccctgggctcaggtgatccctcccacctcagcctcctgtgttgctgggactataggcatg

SEQ ID NO: 89317 - DNA, 1985 bp, Homo sapiens
agatcaggatcatgggattgaacccttcatgggtcagttggctttgtttcatgcatggccacagaccatatcggtaacctagccagacatccagcaggtgctgtcatggcctcttgcaacgatctgggttggaatagactggcatcaatctttgggaaggaaggggctgctatgtcatgaacttatgctggaggctgcactgtaggtctccatgtatagctttatttatcctcacaacaactctagcaggcaggcagatgaggaatccccaattaacagatggggaaactgaggcacaggaggttaagcaggttgcctagggctatactgcgtttaagtgaaggagctaagatttaaggtcatctttttttttcctccaaatcctattgttaactctgtcccattattagaaaatcagcaaagcccatgctctctgtgcagatgggggtggggtagggttgactgcattgcctttgcatgcggctgcctgtcacagtgctgtgatttaagtggttgtgctctggcaagtcctcccagggttgatgctctgtgtctatgcgttttgtcctcggactccaacctgagtccctctggaaaacaacaggactgccattgccctcccactctggactctgaaatgttagttcttaatagtgtcgactttaaaacagattaacatgctgaggccaactcaggaacagccctcccccaccctccttttctctccatattttatctctctctgacgatgatacttttgaacacttgggaacttttctgtcttcagaggacagcaatcacctgctccaggcaacctccacacctcatctctcaataacactgctgttgcctgtggctggcttagaggcatagctgggtcctcctctgctggccattttcagagtcttgggtttgtcagcatctgctccattagagagacaatcagaagatttttgggggtgaagggggagctgggggactgtttctgagctttgttctgaactaagttagaaagaatggggaaaattaagttacagtgaatgttaagctttgccaatcagcgcaatccagattgtgagaaattacagtttctccaacaaataaattgcaaaagaaagaaaaaggtggaaggaaaccttagatgaaaagagattaaagagatacatcaaccaaaggtaatatgtggctgtgattgaatgctgattcaaatacattataaaataaatatttgagatcacttgaacatgtgagcagtgatgtttaatattaaaattattaactttaaagtgtgataatagtattgtggttaggtttaagtaacagtttatggctttcagagatacatactgaaattatatgatgtctagaatttgcttcagaataattccagataagagacaagtaggtgagtcaatatatggatggaacaggatagactgtgagttaaagttggattataggtatgtggggagggctcatgatactactttctatacttgtgcatatactgaaatattttaataaaagagctaaaaaaattaggttacaattccaatagtccccttgggatcagagctctttcattaagtgttactgtatgatctgagtgtgttttctatggctgagatagctaaccatcagtggattttttttttcatacctccaatgatacttttcttcccaccctgattgttgtgttctccttagaatcttagaaaaacaagtgtagggcatctgtctttttatgttcagggtgtctttctaggctcaatcaattcccatgatgaagtaaacaattgtcagttacataaactattagcttagtaagcgaaatgctaaggtagagatattatacctgtggtttcagtatatgctcctaaatttttattactaaactgtgaagttgctaaggctataataagtgataacaatatataaaggcactcagtttcctaaggctgttgatgcccatgacatgcctgcat

SEQ ID NO: 89318 - DNA, 1117 bp, Homo sapiens
gggtttcaccatgttggccagggtggtctcgaattcctgacctcgtaatctgcccgcgtcagcctcccaaagtgctgggattacaggcatgagccactgcgcctggcctgagctttattttttagaagtccatttttccctaatttgtatttggagcgatggtcctcatatctccacagatggggatggacatggcccttgaaaattaattggttgtgcccaagaggatggaaatagggtggataagccacaagaaccatgaccccagggtttggtcatggagtgatctgtgacctacaacctgcagatagtgtctacgggggctgctggaagtgccacacctgttaccttcccctgtggtggcagaagtaaagagctgttttatgcccatgagaaagctgtgtaatgtggactgtttttattactcagatcagtatgtgtttattgatgtgcatgtgtcttgtactctaaagtatcttcacactgtagttccatgcagctgtccacttaaactgtgtgtgtgggtggacacaggatgactttgctggagagaggttactactgacaaagctagactcagggaaggaaagactaacaaacaaggatttctcccttatacaacaaagcatctgttcctgtcacagaatgaacacatggatacatttggagactacagaaaagcactttgaagaaatacaaatcacttttctcatcacccaaagggaaccactcttaacacttttgtgtcttgccagaattttaacatctattcataataatatctgaatactttcccaagtcattaaatattcttggagcacatcatctttaatgacagttaggtaatccagtctatgtatgtaccatgatccatgtaaccattgttcccaggttccatgagggaaagtgctctttcttcttgaatgttaaatttgtccatgcttggtacttaatacatatttgtaaaatgaatgcatgaatgattgaactattggaggtttaggtagttgccaataaggaaaatacagatagtgctataatacatacctgcagaaaaataaatattttttctcatatttgattacttccttaagacgaattctcaatgtttagttgc

SEQ ID NO: 89319 - DNA, 1056 bp, Homo sapiens
ctttctcggagagccattgctctcattaaaaaaaaaaaaaagttccttgacccacctggtccctaaagcagaacgtaccagctccattaaattaacatatgtagttctgcaaagtctaaacagtttaaatttcattattctaggcagtatttgtcaggttgccaaagcaggggaaatctgtgaggggacaaggagaagtttagccccatgcatgcccaggatggtactttgcttctgcctcctggggtgtgtaggggagaaaactggagctcctctagagggtctaccacatttcaccagcatttgttcaccagcaaaaagggcattgcccaaattctactgcatgagtcactggggtttaaaatccttcagatggatagcgaggtcacctcttgtccttttgagctgtctatatatattccaaaatatatcttggtcattttgattggtcattattgattgaagggcctttggtgttattaatgttttagtagtttccgatcagtttatttagggctcagagtaatctgtaacttgaggatggacccgataaggcaaactgtaagagcccaccccagcgcctgctgttctgcagctctgttccttttaggggtgggcttcattttttttttctttatattatactttaagttctggggtacatgtgcacaatgtgcaggtttgttacataggtatacatgtgccatgttggtttgctgcacccatcaactcatcatttacattaggtatttctcctaatgctatccctcccacagcccccccaccccctgacaggccccagtgtgtgatgttcccctccctgtgtccatgtgtactcattgttcagctcccacttatgagtgagaacatgcagtgtttggttttctgtccttgtgatagtttgctgagaatgatggtttccagcttcatccatgtccctgcaaaggacatgaactcatccttttttatggctgcatagtattccattgtgtatatgtgccacattttctttatctagtctattattgatggacatttgggttggttccaagtctt

SEQ ID NO: 89320 - DNA, 1053 bp, Homo sapiens
agaatgcagtgattgatgagtcaggtctaccagggaaggtgtggggccaagtgttggccattgtgaactgactgacagctgtccctactgagtttaggagggcttagcataccccctgtacacccaggagggaatcatgttgtgtgaattacacacctagcttgaaattaaccaacttaaccagacctattagtttttctaaaatggagtagggcaaaagtcacaggttttctcctcattctttggcagtgacccctaacattacgtctatgtcttacatcatggagtgaataacatgtaagcttcttgacatgtgaaaacaaagcatctgagagaaaagatacccaaagtagcaggagatttcaccaaaaggaaataacatttgtgaaagcattctgagcactgtcgagtgctctataaatataaggacttattgtgcattgcctgaggagaaccagctcagccataatgctcacagttacaggagagacttgccttgttacttttccttcctacagttaagtttcttctcttggaatgtgaagagagcctctggggatgggctttgccggaatgggtagctccttgctgcaggctgaaggcaggggactgtggcgtgcagggctgaccatccgtcattttgctggctggtgtatccaggagggatcaagcctgtgaaaagctggctgctgccaccagaggtaggcagggtgacttggcttcatgcagggaggccaagatagtcactttcctgctgtgcagcctgctgtttatgggcacggtcttttcccaggaggaagaacttcttgggaaaccacatcagggttagggggtcttggtgaatgcagcatcagagctggaatctttttctgatgagtgagtgagtgagtgagtgagtgagtgagcaagcatggcatcagatcagtggaaggcacatggacctctgtggcccagagtgagcatgctcatttgggagctggcctgccctgcccctgcctttagatgagacattccttgctgctccccaggcgctctcctgccattcctgttctg

SEQ ID NO: 89321 - DNA, 1058 bp, Homo sapiens
tggcttagggcccagaggatgctgtcgatgtcactctgttaagagatgcctcatccatccacttggtacacagattgttcccgatctatttgcactaacatactagctcttcaagttatgatccacatttcagaacattgcttgattttacaaaacacaggagggcaacatgatgtgatttctccatatgtagtctccatctgaggagcaggttgggtataacaggctctttctcttgcagctggatgactgtactctgcagctctctcacaatggcgcctacctggatttggaggccaccctggcagagcagcgggatgagttggaaggcttccaggatgacgccgggtaagagcaactgttcaccctgctgactggtccccacctaccaggaaatgggggtacattgaggccttaaagtatttaggaggaactaccatggctttgaccttctcttaattctcaatcacacacgagggagatgcaagtgactcatcagtggtgactgcagacccgtttccattttgagtaacttttcttgatgggtgctcgggagtagcctttcctaggaacatttgtggtaatcaagcacatggtatttatatgctaagttattttaaaatcatatgtcacaattaaatcgatattttccagccagctgtggtggctcacacctgtagtcccagctactcgggaggctgaggtgggaggatcgcttgagtctgggaggccgaggctgcagtaagtcatgattgtgccactgcactccagcttggataaaagggcaagaccttgtctctaaaagtgaataaataaatggatattttccagattttagtggatttgcaactattttagatattgtattcaatgataatttactggatagtttcttagcagatgctatagtagatagttttatacggtatcatcttttaaactcattactgtggaaaaaataattattaattatgttaatgtcaacttactttttgcctatacctagaattgcttaatacttttgctgaataaagaaatactgtgagtctgaataaagt

SEQ ID NO: 89322 - DNA, 1147 bp, Homo sapiens
ttggacttcataaaaattaaagccttttgcatccccaaaagacataattggtaaagtgaaaacacaagccacagaatgggagaaaatgtttgtaaatcatatatctgatatctgatgacctggaagacaggccatgtgaaagaagccagacacaaaaggtgaagtactgtttaatttcatttgtatgagatggccagaaaagacacatctctagagggacagagtagattggtggttgcctcttgctgagtgtggggacacagagcgattgcagatgggtatgaaggtttgggggtgtttttgcattgatgaaaaagttaaaaaagttagattgtaatgactgtataactctatgaagatactaataatcagtggattatatccataaaacaggtgggttttatggtacctaaattatacctcattaaagcttacaaaaaacgtgtaagggaatgactatggaagagagacactgagctggtgacggccgggctaggtgtggggagaaattccagcttctgtgatgagaggacactagctgagcggaagttgactgagaaagttcattccgtctgcctcatgtcttgttgaagtgagggtgaaggaaactggaagatgagagaaccagactggcctctctgagaaggtatctagagagttgacctgttttggtaggtcccttttccccaagtgcacaaacttcacactttggttgtagcacatgttgcccagggtgcttccacctgggtcccctgtgtgtctcggactcctcacaccttccagttaaagtagatgactcattcctcagaggctgacgcacttagagttgcacacacaggaggcacagacattagtatagtcccttgagaaaattaaaatgctacatcatgggaactttaatgaagaacaggaaaaagcatcaaatagtaacaaatggattattattgtcgattcttgaatgggcagtgaagagagaacgagaaaaaggtatgatgaggagagaggtgggaggaatgagaagaggcagacaaaaatgaagcaagagacatacagaaagtgagaatattcagacattaagacaaatggaacgagggagagaaagtggctgaaagaacagtaatatcaacaagggtattacctaacatta

SEQ ID NO: 89323 - DNA, 2751 bp, Homo sapiens
ctctgtggatggaatgaatcgatggagcttggcagtgagatgcatgtgccaaaccaacaaagtcagacttctttattttatttttgtgaaagtcctgtgatgtcaacattatttcaggatagattcttattcagtgtgggtctctgcttctctggatccccacttaagtgggtatgtcagaaccttcacgtggattgacagcatgtgaggtgtctctgctgactcctctgatgcccctgttttgtctcctgtctcgttaggcggggcaagaagcacagcatcatcctaaggacgcagctgtctgtgagggtccatgcctgcatcggtgagtgacacctgccctcaggaactaaacatatgatgaaagacgcgacttatgggaataaaataaagattcactgttatgctgtctgtttgcactagcccctatcatgagttcttagagttttagtgaaacaatttccagcaatgatttttgaaggcctgtttcattccagcttcctctgctgtttggttagtgactggagcgtgaggtaagacagcttgctggtgaggtgccttttggcagtgctggggtagatgaggttcttctggggactgtgccattgtgagcctctagcacattgacctgatcttcacgtgcctcctggtggctctgtgaggcatgcctgtgggcaagtggagtctggggctccaggttgttatcaggtgactaaaaggaaaatcttgggtcagtgcaggatgagggtacgtgtggatacagggcaagatgctcttaagcaagcaaacatatttgtggttcagaatggcttgctgcgggaagcccagtttcctcctggtaatgggccaagttgcggcaagaatataatgtcataagaaggaaaaaaaaggaactaaatttcactttatgcctagaagtttttagtatctgagtaattttgcttttgtttaatgtatggtgtggtcttcatttaatcctctaatcaaaagagcgtagatcatcctgttgagtcctagtctatacccgaaaacatattcatgggtggagtgaaggaaattatttctggtccttccttcactctgcttccctattggagacccagggatggggagacccagggctggagatggagggaaatccatgtgatttcacttcatttggtgtggagggtggtgaggttgcaagtgtcttgagtaacaacctttgcctcactctgcagctaaagaataattgttcaggtgactcaaacttcagggactgaaaggtcagggtgtcaggaggattggtaatcttgttggaaacaaagtaagatctgtaggacctccagccaatattgactattctgcttctcaactgcttgtagcactgagtaactgtacaatgtatatgggcacttatattaaatcgtggcttttttattacctgcttcgtgttttcccagtgatttcatatgtataaatcatgtctctctaaaggaaaggtctgtgacacgactttggataaacttcccccttaccctcatcccagatctagaacaaatccaggcacgtaacatgtactgaacagtgttgaagttaaatgttgaaacacagttgataactacaagaaatttgggacatgaatatgaattgttttttcccaggaatagtaaggtggcagaaagcagacttgcatgaaaatgagctcaatccaaatccaaatgagctaactccttttaaggaaactcactcctttgcagtatgtagtcaaatatttcaggtacaggattttttaaaaacaacttctgtgttattgacttgtcttatgaacttctgtatcctatcgtcccatgtgatagatgtaagatgtgtgacatcttatcctgtggcatgctgagcaccgacagcctctgaagcccacactcaaccaggacacacatgctccctgctcttggggttgacctggggtttatggagtcagtgtgcttgctcacaaacctctttatgccaattgcactggttatcagaattatgtaatttaatgaaatagtaccaaatatttcataaactaattaaatatgactacataaaggtcactgcttctttgaaagttcactattttggaaaagactcaaaattagtcactacagaagcatttctgtcaatgtaaatgtgttatgataactataaaaggcgagggggaatattataaaatctaagaggattctactcttcataagcatcttcagctccgctggacttcaaagaaactagactggaaatcagaccttgttattggagtgagttgtaaaagaaagtctacatggaattccaatgggtagatccttattcagagaactatttgtgcctcatcacaggtagaccggcatgttttgccacaatagctgcgagttcaaaatgttgtaaggtcttgtttatgtttatgtatttttttatgtattgttttcaaaaggattttctgctttaatcagcttttaccattaattgccttaggcctgattatgtcagatgagaggatttggccgtataaactaacagcaacacctaaaaaaggaaaagtttttcctttgtattaaaagccttttttaaaattccatttcctactattagcaagatctggaataggtttattagcactaaatattatactttggttatgtatagaaaatggaatgtgtgcaatcatgttgatgaagtaccttcccctattgtgacatattctttccctttccaaatggcagtgttagatga

SEQ ID NO: 89324 - DNA, 1048 bp, Homo sapiens
agatgcatctaattactcagatggtcaagtcacagggacaaaggcaacttttaaaggcaagaaaatgatatgagagaaggccactccattaatgccagtttccagcaacagaaacatcaacagcaaaagccatcaatgtataatttgcaaggcatttttctcttgcaggccctatcatgcagccgtgtgctttgcactacattgttatagcaaagagatgaattataaacagtgcaacatttcctcaagaagaacctcctagtgcaagagtaacaaaggggattcatctcacagccagccgatttaggagcattggctccctggggcgctgtgttgagcaaggtcctgaggctgtgtgcagtcttaatgggaaaggatcctgcatcggtaccctcttacactggtggtgatggaggtggtgtacatatgtgtgccatgaggtggcagctcaggtgaggtgcaggttttgtccagtgcttgagcctcctgtagctacagtataggggtccctgggcttctgtattcgaagggtggggaatggcactgtaattcatgacccccaaccactgtcccctctcctttcttcccagaccctttccaggttctgcccttcttcttcagcctgtgaatctgagcatgacttctctcccacttcactgtgttttctgaccagaccgagtaccaccttcctccacctctgggtgtctttccctctaatcaatttgagctggtttctcatggctgagccctcctggcttgcagggaggcccccctctagcttccttttctgacatttcacttgcccctagggtggcctttggaaaattagctggattcccatgtggtccttactgcttcttggctctgtgtcagtttggaatttccataaaaactagaggtttcctatgggaagcagcaaattgtctttttgacactcttgttctgacagcacctgagtgctgtttctgtgctagctagtaaagatgaggcccatggagcactgtgtgctgagagacatgaggcctgaatggtgatgcgtgtgtgctcg

SEQ ID NO: 89325 - DNA, 1071 bp, Homo sapiens
ggatgcctgtagcatgtgttaccagataagtttaaatcacgtgctggcagttagactcctaagttcctatccagcaaaacatcagttatatgcagaaaacaacttctgatagggaaaccaccctggttttgactagagtgtctgcataaatactttcctttcacaagtctggcctgcttctggggtgtgatgtgagctctagtgaccagctctgagtgcctttggctgtccccatgaagagacaactttatttttggcactggacaatcaaaatttatgtcaggaaacaaaatgctttgtcttatttatagaaattttggtatccagagggtgtgggagttgaaaaggaggatggatggttcaaaaatgtcttgctgaagaaagttctttgaggagtgggtgcatgtcaatgtatttttcacatctcaacatttctgttgtattagaaatacctaatgggaagcattttaactcagaaaaaaaacatatagaaagcattcataattcagcgaaactgctaccagttcaagatttattttaaaggaggaaagaaaggcattggagaattgttacaagtgctgtcatctcaagcccatatactggagtaatagcaacagaataagaagaaaagttaaaaggttctgctcattattttaggataattgaaaaaaaggaaacagattctattaattgttcacagaagtaacatgacttatctgtaatcccagtaactggattatgggcatgtgggcaggaagaggcactatcttgctaggatgtagagagatcattggggcaagggatagagccacgttactggtcaatacttcggtcatctcccttcctccctccctccctccctcactcccttcctcccttcattcccctccctcccttccctctcttccctccctgcctcctttcctctctccctttttccctttctctctctttcttttgttttcttttcttttcttttcttttcttttcctttcctttcctttcctttcctttcctttcctttcctttcctttcctttcctttcctttctctgtatctctttctttcttt

SEQ ID NO: 89326 - DNA, 1834 bp, Homo sapiens
gattcaaatagggttgggagcttgcccagggacacagagctaaacagcagagctcagattaacgtccccatctgtctaattgttaaatggaaaagttctgttttattatgatgggcaatgtacttttaaaaatagtttctttttataaaagcagaaagggaaatttctactaaccacttaatgcttatacttcctaccaggcactgggcaaagcactcgacaagtgtatctcctttaatccaaacagtaacctatgaatcagaattactgttcccacttaatagaggagaaaactgaggcacgcagtggtctaatcacttggccaaggtcccatgaggagcatatgactgagttgagatttgcacccatatctgtttgcctgactgcagggtgttgtgttcaacctctgtgctctggtacctccaataacactagctgctctggagcacttactgtgctccaggtatctgaacccttgatgctatagcacaggtctgggctgatgagagaactcaggctctagaatcagacctgcccctgagaagcagtgtgaccttggaaaagtgacctcactgctctgacttcagtgtcctcatttatcaaaaggggatgataatatcgcctttaaaaattgtgaggattaggccgagtgtggtggctcacacctgtaaccccagcactttgggaggtcaggagatcaagaccatcctggctaacatggtgaaaacccatctctactaaaaatagaaaaaattagccgggcgtggtggtgggcgcctgtagtcctagctacttgggaggctgaggcaggagaatggtgtgaacccaggaggcggagattccagtgagctgagatcgcactactaaactccagcctgggcgacagagtgagactctgtctcaaaaaaacaaaaaaacaaacacaaaaaacacctcacacaaaattagtggagcatggtggtagatgcctataatcccagctacttgggaggccaaagaaagagaatcacttgaaccaggaggcagaggttgcagtgagttgatatcatgccattgcactccagcctaggcaacaagagcaaaactgcatctcaaaaaaaaaaaaaaaggattaaagaaatatttcattggtgttagatccaatttttaaaaataaagtcatatattgagtattgatttgtgtgctcaaacaatgggcagaataagccaatatgtgttttagaatcagacaaactgggttcaaatcctagacctgcctctgtgtgtccacgagaaagttactcaccccttggagacctgtttgttatttataacagtgagaacgggggacctagtgcctccctcctggtgatgatgcaaatggtcaaggagatagtgagtgtgcaggtccaggctaagcccttggcaagtggtggaagataccaccaccaccaccaccaccaccaccacaaagttttgtgttttgttgccttacaaaccattagaacaccatcaaaatttgattgtccagttcctctaaaggaatgtgactttagagtgtctgatctatttgtagagtcagagctgatctggactgaaatgtatatcttgcctccaattcttgaaggagcccatcttccataaccagaactggatcacagaattgtattaactattaaactggggaaatacattgtggaactcttaaatatgaaaaccaagtaacgcccaattaatgtgtttaaaatgtgttttagctactatccttttttaagcagccgacagatttgaaactaggtcaataaatttctattaaaattttacttgttcttacaaaatggagttggccaaccta

SEQ ID NO: 89327 - DNA, 2086 bp, Homo sapiens
gggctgttggcatggaggaggaagctcctgagtgcacatgaccaggcagtcaaacgcatgaaaaggaattaaaacaccacaacatgacaccaagtgcttagttatatctataataactttaaagttgaaacgttatgctctaagcattataaaaagtagtccaaatattctgtatgagttgatattcacaaaatgtccaaattaataagctattcaaattgcaccaaaaatacaatctgtatgtttgtctttccaacaagaaacatgctagtgatggcaaactttcactatacatatggcaatacatttctcagatgacccagtatctggacagctttttatgacttgtttggcctggggtaccttagaagctgtccgtcctctgcctcatctccctgcattgatgggtggctcagggcatcctgggtacatgggcatgggtgctggggttggcaagggtgatgtgggtggccaggggtgggctgaccgggcactcctctttaccaggtagcggctcaggggcctcagaggctgctgggaagaaataaagtgccacgtatcacttagcagaaagccgtaaaaacaacgagcaatttccgtgcccgttagagacactgaaaggagccccatggagctgtcttggcttggaattgcccaggccagtgtgagtcacctgtgtgtgctgtggcttgtcttggaagacagtggaatcttgaagagtgggatcagtgagggtgtgtgcattgagatggtgcacaaattgcctggaacagcccatgccaggctcctggagggcagcactgctgtggtggagatactcagagggcagctgggctgcaagttctaggtgtggccctgcctcccctcggctgtccccagggtttgaggttcagtcctttctggggtcttacttgaggcctggccttcatcaggactcatagggcctccaggctgtggggtctagcttggggggattggagaaggtggggttctgagtgcagcaccccattcatgggccaggcaagagacgactgacctgggccttgtgggtagaacttctgatgtcacctccaaatgatgttgtgtacctagaatctaagattaaatattcaaaatatagaagttcttaaggcagccttcctttggaatatctatttttctttcttaaacaaatggcttaggagccaaaaataccctccccaccccaaaaaaggcaagtgccctggactgtgtcctgggtgaggttttgctcagtcaggggcccagactgtgggcagaaggtgttggttccccctcaggggtgtcctgcttgaggggagatggtgggttagggagaagcagcattctaattctggagctagcatcatcaggttgctagatttgggacatgacacttttgtcaaaaatgggggactctcacacttcccttgtgagctgcggaaaggactgatgagccatgagggtgtcttaggtcaagaacctggcatctggtagccctgcaggttttcattaatgtgagctttgttgttattactgtcaaaatccagcaatttcttgtgggtaagcttgaaagcatcactatcatttatgttactgtaatgtgagacgttcccagatttcctcctgactcaaaataacacatcaatctttattcagtgtctgtgggtgtaactattatgttaagtgctgtaaaggaaatagacacataagtgaatgcagtacatatatgaagcagttccatccactttcgtgattctaactagcagctgcatacttgaagtttcccactttccctgagttctagacctgttgttgaaatgtgtgctagatacctgaacttcatcccacatccatctccctgctgctcctccaccccgcattggcagggcttggcccacccctctggatgtcccctgggcttctagtgctaccgtgtgctgtcattgccccttgctttgccagtggtgtgatgtgtctactcctgcttgccagtgagactgtgtgaccattacaggaaggggtagaggctgttcctctcttgtggagaggttggagggtaaaggggccttaaggaaggaatttgggg

SEQ ID NO: 89328 - DNA, 1395 bp, Homo sapiens
ttccatcactgcatttaggggtccagatcttctggacactttctctttccttgtattgttctctccaaggtttctccaccttgacacaattgacatttggggccaacacttcttttttggtggggttgtcctgtgaattgtaggattcttggtggcatccctggcttttacccactagatgccagttgcaatgcccctaattgtgacagcaaaagatactcctagacattgccgaatgtccctttgagggcaaaagtggttgcagttgagaactgctgctctagagctggccccaagacagtcacagagggactaagaagctgtccgtaatccccaccaattcagggtattgggctacacaaaggcaatcagtcattcatttccccaggaaaccattctcctggagtcccagttgtgtgcccaactagacctggagaatacaaaggggagtgaaatgagcctaattctctaagcagcttaaggaaatgggtgttgtgattggggccagaaggcttcctcttaaattatactgatcctactgcagggttgatattagggtcccaaacttcagaaaactctgggttctgatggtttcctatgtgagggcagggagctagttaatccacttggatccacaagcccggggactacagatatattagtcttaggaagggacttggaaagtgagtggcttgattaaaacttagaagggtttatttaaataacaagaaggggctgagggaaccatgggagaaaagacacacagatgagcgtgagcagaatcagagtgaatttgctaacaaagcaaatccaacctacttgggcagatcaaggaaggaaagaacactggtatgggagtaggggagtgagaaatatcaggctgagtgagggagacctggattttctgagccgtctcctggggagcatgctatctgtcttatggattcattgttatggtcaaacaagataatatcaatttaaatattgggcttcccagatgaaagtcattattaaggtcatcgtgtagacagtcttcacaagcagacattgagatttttactttacaaaatagaaaataaggaatcattgacatgagattttgagcaggggagaatattctggaaatggcatatagaattaattggatgggaaggagccaagaggaaagagcggtatagctggccaacaaccatccccaccccgcagcactagatggggaccacccaccatgcatgttttgaaaacctaggatttttactgtgaacttacagatctaagtgtatttgatgggtttcaatcagttgcacttaatgtacttgaagtttgagttgtcccatttttggccactggaacccaaggaggcttctgaatcatcacgggtgttctctttagctt

SEQ ID NO: 89329 - DNA, 1083 bp, Homo sapiens
atttatgctgttctgcaaatgaaaacaattcagtgctatgaattgaactatttgcaccatatcttgggatgctgatggcatctcagtgcagatctttagtctcttggcagtagcagtaggtggagagagatgtttctccttcctgcctttctagcaatacttcctaagatgctgtcttttaagtgtggtaataagctgctttcagttcttttggatatatacccaagcatggaattgctggatcatgttgtaattctataaccactgtttttttcagaaagaaaatgccggcactcagtactggttaggattccagttgcagtaggtgctcagagcctgaggggagtggagctgttgtgtagtctcaatgatttgttccattgtgatggtcagggcatatcaggaacaagccagggcaggtgggtgcctgctgtatggttggtgccctgtgcatgcctaggcagagctttaagcgagtggtcagtgtaatcccactcattcacatgtgctttgcgttcccttcaacctttgttccaagttccaatttaccaaaataggtaaaagtctgcctattttccatgatgcaggtacattgtatgtctgtgaccccctctaaagggatgtttttgggtacatttcagtgtgttgtgaggagggaggtataggacagggatgggggggatctgaggagaaatatgtgtggcatgtgggaaggctgggatcccctgtcttttggtctggctggtgttgagactagctctgaactcattcttctgggagacagtgtgagatttttgtgatctaggacttatttgtccaaagctgcctattttccaggattggaggagagtttgggtaccttgtatctgacatcaagcaagcagagatctacgccacccttccaggaaggggacactgctgttctgaaaacaggcccatcacattccttggtgttgataatggggcactggaaggtgtagctcaggtgcttctcctttccatggccccagattgctggcctggcccaatttcagtgtcctgttcgtttgtcccaaggagggcaagcatctggggcaggctatg

SEQ ID NO: 89330 - DNA, 1028 bp, Homo sapiens
gtctgtgagctgtctcacttgagtacgactagacatgtatttgagttttctgatgtggattaatcctaagtgtccacacacagatgttatatgtgtcttttgttttgcaatttgaaagctcccttaggagatcctgtagcagtctgtctttgaggtccccatcttgtcccagagctccactcttatcttggtgggtgaccctgaggaagtggctcctggaggcattttctccaccccaggctgcccttggggctcagggcatgcaccttgctggtttggctagccttgtgctcaggtgctctagggccttctagccccctccgcttttcttcttgctccacatttagtattgatgaccctgctgcagaaggctcatttggttttagaacattatagagagctattgctgggaatccaggatcaactgtttatagccaccgccaggaagatgctctgagctcccatcttgctgggaggaagaccaagtgagtacacagttagaggacagttttgagtttagaggcacgagatggctgctggcccaacaggccaggcctgagggttcaggcagaatttgactttgctccttctgaatcatagagttccttcattcactgggtgaaaataaaaatgtaagaatgttcccaaaagctggacaggaagagggtgtgaggtgtggatcctggccgcagacatctatcacccctcagctccccatgcatctttctgtgaactgaaatgtatttctccagctctgattctcaacagtagagtttatgggtaattttaattagttttcaaggtttatttttgtatgtttgtagagccatggaaaaaaatgaactggaaatgaaatatgctgttgaataaatgataattttacattctagaagagctcagtatttaagcaagaccttaaaaatagagtgaaaaaagtaattactccaataaattttaccaaaagaaaaatagaaacgttgttctttcctgttcctcttctaaatggagaggacaatggtcttgtaagt

SEQ ID NO: 89331 - DNA, 1050 bp, Homo sapiens
ttttagaggcaatgagaaatgggaccagttttcatggaatgctcatcatgctggtgctgggtcacctgtcacactgatatggcattgaataggcattgctgctacaaatacagctgctgaaatgtggcctgccacaaagatactgatttgagctgagtcagacagctcacaaatatactggtcctcttgccttgttttattactcttacgtttttgagagctagattttataccttgtaagagttttcctctcagcgtttatgggcctcaaaacagccttggcatgtgcgggaatgaggatggcgcatttgggtccggaccttctggcataggattaggagtggttgggggtggggagagagggatgcaaatgccttttacaggtgacatttaaacggggtgtgtttgggttagcaaactctttttgaaaatctgccccccgccctgagcctatcagtcatattcactttagaatgaatgaatttgatctgagatgagctgcccttggggactgggagctcttatatttggaaggttattgcggaattttggaattattgatagtgcatattctggcgggcagcttgagtcagaacagtctataaaccactttcatggactggtaaagagaagaggctgttggcaggagcccatattagtggcaggccccactagggtactctctgtgtgtgatcagaccatgtgtgtgttctcacctggcttaccacgtcacccatctgtccacctgcttacctacgcatccgccctccagtaaacgttgaccaggtgcacctgcttctgtgcctgctgtgggatgaagtcatgcctgagaccagtgctgtgcacagagaagggcttcagggtccattagtatacagtgtaatcgcatcatgtgtctggaccaactgatcagtggtaaagatatgcctgctgtcctctgctttccctgtcagtctttgctcacctctcagtttcctcctccaaggactactctagttcccctttccccaccacataggaatgtggtccagagtcacatgtgaagctttt

SEQ ID NO: 89332 - DNA, 2291 bp, Homo sapiens
taccactaatttaagaaatttagactgaaaatgttacttttaataaaaaggaaatgtcttagacatattaatgcatataatttttcatatcacgaggtgcaatcatagtgtttggtttttgcggcaaaaatgacacttgtcagttctcactttgatttgctgacactcttgccccttcagggtgggttgccatttggaatttggaaatgctgtggcttcaatccatttagacaaacatatccatttctgattagattcagagtggttgtggtgatctgagtatagatgtccataacagcttcacattttcatgtactctgaaaaggaattttttagaggttattatttagaatgtctaattccaagtgaagatttaggggtggaaagtttgaatacaatgctttattctctcattgaaattttgtaggaagctcatgggttgcttttgcaaaagcaatttgaagatattccacgttagtttgaaagctttgtatttaagaattagattgtttaaggtttgggagtacttctgtgaaattgaggtcatgggagtttaggtttatgatgatgaaagtgtgtgtggaaggcacatggcaaaacgttgacttttgctactcagtttttcttataggtcacaggttgaattctttttatcaaaatctgcatgttcttgccagttgtggtggctcacacctacaaccccagcactttgggaggctgagaggcaggagcatctcttgagcccaggtgtttgagaccaccgtgggcaatatggtgaaacctgtctctaataaaaatacaaaaaattagctgggcattgtggtgtgtgcctgtagctctaactacttaggaggctgaggtgggaggattcttgagcccgggaggcagaggttgcaatgagccgagatcgcgccattgcactccagcctgggcgacaaagtgagaccctgtctaaaaataaaattaataaaataaatctgcatgttctttctataaataggaattttattttcataaataagactaaaatagtggtctggggggaattaacacagtgggaggggaagagtaaaaaacgtgtatggttctaaaaagaacttacaaggttaaaatcatggtctattacttttatagtaggtctggctataaagatgttaaatttttaccaagtatcaaattcaaggaaaatgttgtgaaataacattggatgcattcaaaggaattttaaaataattataatttgccgtcttctccttggtcagagggtactttggaatcttactttgagctgtgcaggcaaaaggaattattccacttttctctatttggctttgctctgttgttgactattcctcttgagttcaagtggaggcctcctggacagctggtggccagggcagctgtagtgacccaactctagtgtgcccctcccaaggatggagctcccagtttagctgttgggtttgtacataaaatgccacagcacagcagtctgagctcttgctttctgtttaaataaaaaggcagatgcttcacacatgttttcatgaatttatataaaccatggaaggaaagaatgctgatattcaataggaaccctgtagcaacttgttacttgtaatttttaggtttactgtaagagcaaatgcagaaagcaaacctgcatctgtgctgacactgggttgggactaacccatgctcttttaagtgcctaagtagtgggtgaatggggcatctataaatagtgagttagtgtgtctgacagacctcagagactggagggattccttgggccagcattgtctcatgtggccacatgtggccagggaggaacacagctgaagggaaggaagtgcgctctcttttatccttctttccatatcaagaagagtagatccttgagtcagggagctagcctgctgaggagcgctagctctggagcatggtctactgggcagacctaaagtaggactgagaaaagctttgccacttccttgaggaagatactgtattggcttccatgacttccggaggcatctgatgcctcccaaccggctaccctgctaagttacacttgattaacttttctgtctcctcttggactcagtgttttatgaagctgagcttctcttggaatgcggagcctggaaagggaggaagtgtgccctgggcattccttacagttgtactggattcatactgatccgtccacactctctcgggcctctgtgacagcgccaggcacatgtcactgttgaattaattgatggtgtacacttgttagcagatga

SEQ ID NO: 89333 - DNA, 1061 bp, Homo sapiens
gtgaacacccaggaaatgaatcattccatctgagccaatctgcagtctcctctctcacttgccacctgacactgtagcaccccttctggtgtgattgaagaacttctaagtgccagcctgcccacacctggtgatgcaccagtgtctgtgtgctgcctcgggaggtgactgtgagatatgaggatcttatataagctagtagttttgcatatggctagcccttgttggctcgggacagctggtttaacaaccagcccttagatgacactgggtagaaatttgatgttaagtatttctcactcccttattataggattttttaagagcagtgtttgcctaaagtcagaaccatcttctaggagaggggtcaggtggtactgctagtttttggccagtttcttttagcttatctgtgattcacttagatggttgatacattccttgcccattctggtggctttctgaccatgggggactgtctggtggcagtgcaggataataagtaggaaggcttatgatctgaggagtgtaaatagtaaatggagacatctcttgttagtttttcatttcagctgttgactcctcagtagtgctggattttttatgtttatcactgtctctttcacccccaccctctcttacccagaagacaaatggtgaggttaaatttggccatgactcagccaaagtctggtggtggccatcaggaaagagtgtcagaggtcttagaattggcactcgggtgcttgaactgtttttagttttcactaaagttgaaactattctggttgaacttattctggtaataagctgaaaacaatgtgctcctgggcatgtttcaaaaactaaaacattttttaaaatggaaatatggattagggtagcttgccacaatgatagtcacgtgtagggaaatacacacaaattgaactaagtctaacttttatgcttagataacaaaaagatacttttgaatttaccaaatattcattcaagcagtcaccaatgaggcatctggatagcttcttttgtaagactgtccttattcttataaagttagt

SEQ ID NO: 89334 - DNA, 1036 bp, Homo sapiens
gtatttttgaaactgagcagaaaagtgttaacattttaccatgtcaccattttaatgtgagaaaggaaacctcccagcaagaggttgagaaatgacagaccagagtgctcctgttgtctccttcctaggtcattccccttcgtggcttcagtttctctgccattcctggagctctgcttcctggaggtacacatgtccccctcacccttgattcctccccggccctcgattcacaccccccccaaacttcatgttcaaatcctcattctgctatgctatgctattctgctatgaattcaaaatttttaagtaatgaaaacttcgataagagcaatatacacttacgatttttaaaaagctataatttttatgatttaatgccatgattacaattttaggatctcattggagatcagattgggtttgactagaaaatgagcaggtgtggaaaaggaggttggaaatggtctgaactgaatttgggtgaagatctcaaagtacatagaacagctgatgtcatctcagcatattgtttcaccacaaaagcaaggtcatctaacaacattttgtcatggtgaatctgatgagaattcctaagtacactctgagaatagaaagaaggtggatgctgcggagggggtctgcattggaaaacctctgctgccatttcaatgcatcgagccaccttgccttattatagtgaacaatagtagaagtacctggaggctccatagaggggctgtgtgcagtgagcatagtgtcgaagcaccatgtgtcaacagtacacacttctgaaggtggaagaagaatgacatgagaacaagaaagagaaatgattgcaggctcttacataaatgcaactgatacgtgggttttttactaacagtggcatagaatgaatacagtggtatagaataacatatttaaaaataaaacaagaatccctattctgtttccttatcctgctgctgtttttcacggcaatcatcaccttatacactcagttctgtataacacttgtttgtaaaacccgtat

SEQ ID NO: 89335 - DNA, 1014 bp, Homo sapiens
acagcagtgcttgtgttcatgtaactcttatctgacttcataatggccccaaagcacaagactagtaatgctggcaattcagataagccaaagagaagccataaagtgcgtcccctagggaaaaggtgaaaattcttgacttaataaggaaagaaaaaaattatatgctgaggttgctaagatgtacagtacataagatattttgagagagagactgcattcacataaccgttattacagtatattgttacaattgttgtcttttattagttattgttgctaatctcttattgtgcccgacttataaattaaactttatcataagtatgcatgtatacaaaaaatatagtatacatagtatccaaggattcaggcatctactggaggtcttggaatacattcccatggataaagagggaccgctatattatagttaagggacgtagaatggctaacgtagcttatcaatgaaggggagggatggaaatgtggaatgtaggtcacccagctttttaaaatttgtatttaagaaaagctttatgttctaacaacctttaattcaaagccaattaaaagtaagaacaatcagaataatagcaaaagtggccagatccatgaatataaggttatgttcatttagtaaagatagtggggaaaaaaagagaccccaacagtggcgcttgactccaaaataatttaatataggaaaaattaaaaagtgtataaacatgatgctttgatctgggtttgttttaatgaaaattcttgttattgaattgttgctttagcaccagtcatgcatatttaatatatgtatatggttaatgctcagtaaatgagggcatgtgttgagtgtgtacctataattggtagttggaataatagatatatatgtgtacatagacacatacttatatgcatgtgactttgtgctgcaactctgggaagcacttcacacactatttctttctttcttttttttttttttcgagacgaaatcttgctctgtagccc

SEQ ID NO: 89336 - DNA, 1105 bp, Homo sapiens
gggtgatacagctggtaattggtgaacctgggactgtggtgcagagcccatgccttcatgggtgctgacagcatttagctaggtcttggtgataccagttaagaagatttgtcccttgccttccaggaagaagccatggagttgtcagtggaaaatcaccatgagattggtgcacaagtgagcagagcctgaggaattgtggggactgggggagcaggtgcctaagtgccttgtgtggtgggctccccctccattaactagatgctttgaaagtgcccacatacattgaaatgagcccaaaataccccaaaagcagaaagcatagacatgtgcatgaaggaaggaactaatgttcattcaattcctaccttgttgtaagcactgggctagtcgcttctcatacactgtattagtaactgaagttgtcacatatgagtttagtgtaagtgtttttacttgttctgtctcatttagtctttacaatccttctgtgactggttctgttattatcttcattttccataaaacccaaagagtgtgccctaagtcacatagttataaatggttttgtttaatcatcaccaccaaccagtgagataggaattattcttagaagtaagcacacacaaccagggagtggtactgttaagatttgaatgcagggctgtcttcacagcctttgctttttccattttaaataaggcacacattgagtcgaggtgtgtttctaagaaaaatataagagaagatttgagacagtgattaagttcttccaagacttaaccaaaatatatatgtacttagaataatggagatcttatatttaaaagaaaagcagttagcaagttgaatagcaattagtcacagaagataggagccatagattttaaatatggtaactatgagacgagaaagatcacactgccagcagaggaattcatcttaaaactagaactgatcttgcttctctaaaaaaaaaaaaaaaaaaaaaaaaaaatccttcttggttcccactgtctgcagaatatgaatcttggcatgtcctctcttgtggccagtctctcatcacctctcaggccactcctacaggcggcccctctccatc

SEQ ID NO: 89337 - DNA, 1024 bp, Homo sapiens
cctcgtgatccatctgcctcagcctcccaaagtgctgggattacaggcatgagccaccgcgcctggccgagtttttggtttctttttgggagttttatttcagtggcatcccctgcactgccctcccacacactcctccagaggctgcctgcaggggatgcctctgaatctgttccaagcagtttccacagcaaggctgttaggaacctccatgaagacctcaaattgctccacagagaaaacttgacaatagagggtattatccagaaatattatttatcttagtctcaagctggctagcatggtggttgtttttagagactacttttaccttcacgctgaggagccagcaggcccctcagctctctgcatttctccgctgactctgccagctgtggagtgtgcttgcaggttacctgcaacctcctccttgccaaatgcagggagctttttcttgctgtgttctccccttctcttgggcactggagggcattcaccatcagtcgtttaaaaacttccctctcccaccggctcccctgctttctccctctctctttctggcagcttctctggctgtggcttcagtagcccttctgcccagatccctggccctcccctcctgcctgtacttctgtcagtccatgggatgtcaaatctagcagcccctcaaactcagcatgaccactgttatgtgtgtctgttgtcagcaaaacctgtgggcagtcacccgacccagaggcctggccatctcccttccccacatattgctcaggtatggaggcctgtacctggtgtctgctgccccagtgctctccgtccatgccctgcctcggctcaggccctctcactctcctctgcaccactgtaagacactgctcttcatcctgtcttcaggctcactcctctagctcatcttccacattggcacttgagttttcactcagaaaaccagttctgatcctggactgacatccgtgtggcctcagggtgaggcctagacactttgcagcctgtcctgaacaac

SEQ ID NO: 89338 - DNA, 1136 bp, Homo sapiens
ctgtgactatctgctgagattatctccacccgccaccctcctgccctgctattgccttggataagcttttgcaattggcagggcacccagttacatggtcttagagcatgctatactttttgcttttttataatattttccccaattgcatggttgtgtgtgtaaggtcattctctcttatagattcctcagttccaggaggatagtctcttcctttctctctttgtctttgcaacattcttcgcagctagaatattgcccagcaagcaggagctcagtaaaaatgggtgaggtgagcaggtatatgccccagagctggatgttgaggtgtgcttcccacaggctgcacctgcccaccaatgcgaggtgaggacctgcatgagccaggcattgtcagaccctgggcaaattcagaagggtgggcatgaaccctgctttctgaggagaaaggggtggtcagtggccaattctactttaatgtggtaagtgccagaaaatgtggaagctcagagttgtacgggaacatagaggatgaggacgaggctgaagctggagtctacaggaagtgtgactggagacagggaggccagaattgggtccagaaggcttcaggaggttttctaggaggcctgctgcagactgctggacgtctctgtggctgttgtagtgggcagagtccctgctggcagaattcttagctttgtgtctgctggtaggctccttcttatttttaagcttatgatagagatgatatgctgggaaaccacatgttacagggaagcttcgcacaaacagctgtgctgtgtaattgccgtgatgctccttaattatagacatcacagccaagtgccatctcttcatcacattttagacgcagtgcctgccccgtggaacaaaatgtacctcctcatggaatcgtggactcactgaatttggttggtagtgctagaaggaaccttgctcaagttacagtgacacgttgcatgatttttttaaaaagccccaaaaacaaaattagaaaagtcaagtcaaattatgctaagttaggatttctgactttagttcatgaaagtccgtgaataaagctttggaatagaataataaattactgattacagactgtttcctctatgagt

SEQ ID NO: 89339 - DNA, 1061 bp, Homo sapiens
aacaaattgtaaatggagtggtaccctgtgaaagttatttcccttctctactccctaattctgttcaatttatttgaagtaggaagagatattctaaatcattccattgaccatgaggcagtgtttaaaattcctataaaaatgagctttgctttacctcaatatttgatggactggctaagggtaggattatgaaggtttgggcctctgtctcatcttgggtttttctttccattcgaggttgccccattggtgggttccagaaatcatgggcatgtccaggtagttgcagcgaggctccctcgctgcggtcagccacagccatcagggttatagtttcctggatctttaccataagtaaggttgaagcggaagttgccattttcttctaaataaattcattgagaaaccttgatcctactccaggattctccagggttttttgttgcatccaaatcagtagggcttccctccaggtctccgttgatgaatggattccctggcccctgtcctgggttaggctttggagacaggaacttgttgccaggacagcagatagaaaaggatttaaggtcacctgagaaatagtccacaattaattgtgctgtgaatacagggctcttccccaaggagcgagcaagtgtttgaaaaccagacctcgtggtaggctgtggtcctccacggctggcgctcagggatgctgagcactggcaatctggccttcctcagtgcataagggccctgggggctctcagaatgacaggtcatcattagtcgcggtgaaatcaccagcaacgtgaggagccagccacggagtcaggctggcttttaactgctttagatctatgtattaatttctcctactcagcagcccaagcctctgcggactttttttttttttttgcttttccagtgcgctgtctcgtcagcattggagactgctcccagagaggtcaggcctaattcctcattggcaagttttgccacactttaatccacatgtcccagattgaaccctttttgaatggaaaggctttgcaagtcagtaagggtctgcaagt

SEQ ID NO: 89340 - DNA, 2468 bp, Homo sapiens
gatcctagcaacagtctgttgtcctggattgtatgaatttgatcaataaaatagttaaatgtgttagggacgagttctgggatgggataggagcaacaagaagtgggaaacattttcattgtttcacagtagatttttcttttgctttaatcctatctatatattatggcaatctattatgattctttcaaaagagaactttttagcacaattttattaggagagatttattttccatttagacagatgtcggcaatgttcattaaacctttaattaaaaaaaaaaaaagctgtctagggatcacaggtaaataaatgtatttcatatgggaaagagccaaaaaaatttttcaaaaaaaatagttaaaaatataaaccgtgctatgggccctgccttcctcaggctctgaggtgagttaaccgtcattggagcatacatttcagtctttactgcacatgctttgattctggctgcagctaccctaagtggagaattcataaacaggttgggctgtggctttcagaagagtggcatattcatctatttttgttttcccctgaaatttggttcttccttcccttcctggtctttcagcgggtgccatgttaatggctggaaccacttggcagacatgaatctcttggatgccgccccctagtgcagaaggtctgcctgtagatactgtcaaggccatgtgcaccccgagttgtgcacctcaaatgtcccctgacatttacatctaccatcccctagggcttgtacttttccgatgttttccagaccccctgtgaagttaatggggcttctgttcctttgaacttcttttgtcctgcgcactgaacagtgacaggtaagccaggctctctgggcccctggtgcaattataattaaccatgggcctcaaacaaatcctttagctatgcatgattttccatctttgcatgacctttcatgatctgtgacaaatcaacttctgacattgattgtaagggagtagttttccaacaaatgcaaaagattgcctagagagctggggtccgggctgtagactttatcagcagcaccatcttaggggtttgtagcctggatatgctgatggtttttcttatcttcttgagagacagaggaaggaaaggacagttgattgtaatagattagaagattagtggaaaagaaatggtcatttcttataaaacagtatgtgttcctatgtcatgggtaagaatggaatagggggatggggctgtagaaatcatctacctgtagttttcaaactgctcatcaaggccctaggtgttcttggggtactactggatggggctggggaaggaggagttccagcctgtgtgtcccccacgggcaacagtgtcagtgatggggtcagagagggacccacttctactgccttcctggttgagctctggggactgcaccaagcttctggagagagccttgcttgtacacacctcagctcttgcctgcccatgtaaagcaggaccacacagctgagactgtcatcctccctctgtcatggggtgacttgccacagtgccatttagtgctgactaagtgtgagtctgagaagaaaaacattgatgtctaagtattcaccttttaaggaatctcccttttaattaaggaggattctgtgtttccctgtttagcacctgcatctttggttttgtgggaccatgaagatgaagcttgggaagatgtgagaaaggctctgtggagggtgtagctccagtcaggttccagcaggtgggaaggtgagaagtgagaggaaaagcccataatgttttgggaggaaagaggttttaagggagcagctgctgagatgcatgtgccttggctgagagggacaggtgaggagaaccttgaggatattttgctgtgtgttggtgcccactcagaagacttcaatatggatttaaaaatgccagtgaggagtgacttaatgctggacttgcgttttttaataaatgtaatatgctgaagcgcagctgggcacatcacttacctgggttaggatcatcctgtgatgggccaccaggcaccctggtgaaagtggcagccatcagcattggtggattgttcactgggaagaatgccttcagatatggtaccaagctctgtagcacacacaagcttccgtacagaacatctgacttttgcaaaaattttgttttacattcaaatacgaagggtgtctgaatccaacagtaaaaaggcagtcttcaaaaagaaaaaaagggaaaggagcagcttttgtagtttgcttttattggcagagctgaaactgattccataagagttgaccaatcttgcctgatggtattagagtgaaggcaaccacagcagcagctgtaacaggtgaagagttgtatgtccactcctgaagtgtttttttctctgagttggtacctgctctttcttgatttctctgagagagatccccagagcttag

SEQ ID NO: 89341 - DNA, 1897 bp, Homo sapiens
ccgcagcttcgcccctggactgatggtgccttccgtggggtctttgctcccagctgaactgggacatgatggcacctgtgtgggtggcctgctttactcctctagagcagagacctcagggctttcattcctggctttgaacgcccacaattactcccacatggctcagggatcgcagtgtcccagagttaatgatgcaaatgcagctgtgccctaaaacaaaaggcagcgggtatgcgctttggagagggcgtgcatttgggaagatgaggatgctcctcctggtactctgcccagcccacaaagcagaggagcatgagcccgtgccatgtgaatgctgataggagtgtcctgagctggtgaacaccatgctgccacctctctgaggtgcagtctctccctgaggccccacaccccagctctgggtcctgcctgacccgagccagcttgcatcctgctttactgtctgctttctcaaggtttcctgaggctacacctcctcccagaaggcttcaaaattgttatgcgtggatatcacccctttgttttccttggtcaccctgtgtccacagcaagtggttgtcgatcgactgccctgccctggtggcccctggacttctcctgagtactgggctcacttagaacaaagagaagtccaggcaattaggatcagaacaatggtctattcagcacttctccaagcaaagactccttttgtccagagtgctgacttcggaaagttcttcttgaggttttggtgtaggaaattagaatcaccagggcaaagacagtaaaagagaacttccctgtgggaaaatgaccctgtttaaaggtagttggttttctgctactcacacaaatgcttgtctgtctatccacagaataagtgatactttctttgcagcacgcggaaaggttttttgtttcagggaagcagcttccagggcacaattttgtttctatcccggggacgtttcacataaacgagatgatatgagtaatgattttcatagtgtttgtgggcaatgacaaaatacctgtgaaagaatccaatccagatggagaaccaattgttatttccaaccattttagttcccagggttaaagtcagcaaatactggctgagaggataaaatcctcaaactcagataatgatgttgcttgaaaaaatggaagtctctaaccaaaactgaaaagaatattaattgcaaattccacttctccatagtgcatactttgctgtaatcttaaatatataagttacttggcctacatgatttctattaagatgcagcttttataaactttcgagtatgaattagcatctggtggtgttttcgatgaatacttctgaaggctttgtgtgaggaagcctgttagggtaatggcaacctctctctcacaatagtcccttgtagaatactcctgtgtcatccctgttttatggatgagaaaaaaccaatttgtctaagatcaaatatttaacatgtgaaggagctagaatttttaaacagcttattgagatataatttacataccataaaattctcccttttaaagtgtgcaattcagtggtttttagtagattcaccaaattttgcagccattgccagtatctaattccagaacattttcatcaccccaaataaaaaccttatacccactagcagtcactcctcatccccatcttttcctccccagccctaggtagccactgatctacttctgtctctgtgcttttgcctgtgctggacaattcatatatacagaatcatataatatgtggtcttttgggaccggcttcttccacttaacatagtgttttttcagcttcatccatgttgtaacatgtatcaatacttctttttttctactgctgtgtaattttccagtgcat

SEQ ID NO: 89342 - DNA, 1726 bp, Homo sapiens
aaccttccttttctttatcaaccttattgacgagtaattcacatgcaataaaatgcacacattttaaatccagttcaccttttgacaactatatctcaaacaagacaaaaaatattttcccatagtttccttcatgtattttccctatcaatctccgctattcccaatccaggcaagcactggtctgctttgtcactatagatcagatttgtcttttctgaaactttatgtgaatggaatcatacagtatctggtattttgtgtctggcttatttcatttagcataatattgttagaattcatctaggctgcatgcgtcagtagtctatattgctgattagtgcacccttgtataatgtaccacagtttatctgtttgccaactgatggacagttgagttgtttccagtagggtgtttttaaaaatcattctgagtaaagcttctatgaaccttggtgaaatgtttttatgtgtgtaaattttcattttccttggggaaagtcctagaaatagaattgctgggttgaacagtaggtgtatatttcagttgataagcaactatcaaactgctttctagagaggttgcagcatctcacatcccaccagcagagcgtcaggttccagttgttccaggttctccataagcttatatgaccattctttttatggttagccattctaacattgtaacatgcaaaacgtagccaagagatattaaagttcttgcctaaaagcacacaggcagtaagtgcctgagctgtggtcaccctgctgggcccctgagcctgttgctggttgtcctcccactgcatcctgcccacttctctgtatggacccttctgtaactgtgttattccatgggagatgacagagggaaatggtcagtttcatcaggaaatatactctgattaggtattaggctcagaaatatttatttagctgaggttctaaccccaggttctctttctcttttctgcaattgaagtctggcagaactttgaagctatatccacattgtttcttagtgaggttctcaaatgtgttggactcacccagctgtcacaacaaaggggaagagaccttatgtttggtattttgcatttttttgttttcactgagacaacttgctggaactgcatggcactcttggcttagccctccttaccagaggacacacagcctggaaataaatacagaggaaagtgtcaggaggccacggaggatccacacacagcttgtccgtttaatgtgtacaaaccttaggctaggtgtgaatttgttatgagacaaaaccagtatttaagctgtactgaacttgtaaaaatgccagtatatattattttactgttgttcttctgttccccattcattactgaataaactcccatcaaaacagttgttttaaatatccattcttttttctgatgcaattttctttgctttatgtgatacttgccatagatttgtggctgtttccatcttgaagaatacttaaaggaagaaccctggccccatgggttggggcaggtgaactgctgagttttatcatctctgcacagtgacatgattgatgctgggttgttcccttttgaccccagctaatgatccttaacttctctccaaggagtagatactcatttcttttttctcaaagtgtttagggcagagagggtgaacatcttccctatcaactggcattgaccccgggaaggaagaggcaatctct

SEQ ID NO: 89343 - DNA, 1032 bp, Homo sapiens
tactacatattttcttactcagttttgtttgaaatagacaatttaaacaaatgactataaaggttttgttttgaaaattaaagatagttggaatgaaaagtacttctcaattagaaattgtagtttattttaattaaatgacatttggcaaaaaagaggagaggtttttggcaccactgggagatatctttggcatttgtagaaggatgctgtttatcaaagagtttgagatggcgtcagaacctgcctgaggtctttggttctagtgccactgaagagtaagttgtgatgtcgcagaggttaaaaatacagtgaatgcatagcaattagaagacaatggtcagattgcatgtaagcaagatgcaactatataagaaattctacatagatagtttaaaaataaaaggatagaaaaagatacaccattcactaacccaaagtgtccatattcatatcagaaaagtagactttaaaacagggaatattgacagggatgaagagaggtattacatagcaataaaagttcaatacaccaagaagccacaacaatcccaaatgtaagcacacctaccaacagaacttcaaagcacctaaagcaggaactcataaagatgaaagaagaaatacacaaatccactgtaatagttggagacttcaactctcctttcacactaatctatagaacaagtaaatggaaagtcagtaagaatatagaagatgtggacaccactattactcaatttgatatagtggatatttatagaacagccactcaataacagcagaatacatgttcttttaaagtgtacatgagacattcaccaggataagccatattccgggccataaaataagccttaataagtctaaaagatttgataaagtatatgttctgaccacaaagaaattaaattagaaattagtaacagatatctggaaaatctctaaatatttggaaattaaacaatacaccttaataaaccatgggtcaaaaaaatcacaaggttaagttattcccctctgaattcaata

SEQ ID NO: 89344 - DNA, 1029 bp, Homo sapiens
ttctctggtatattaatattagtgattagcttgagtggtttcttgagagcttgttctcactttttcaccatgaagtcatgtgtgaatctagttttagttaaagtaataaacatttgttacatgcttggaaaaactttctgactagacatgagctcatctaaatgttcacttttcacatatgctggtggaaaaggatatggagggagagagaattattttttatttcctttatacatatgagtgtaaagtaattttccaaaaactcatgatattgtcccattttctttcttccaaagccatgattatcttgaagtctgagttaacacagctgtctttcattacgttcagggcgcagacatcactcacccacccttccccccaggtcagctctgaccctgaagagctctttcctggttcaaagggagcctttgctgagcctggccacatttacctggtcccccatccatataattgaaaaatgccataaaaatcaaaataaggggctgatttcatgtaggaacaggagaattatgccagttcatctacattattttttctcttttggagataagccatggttgctgacttttcctataataataacctttcattattccattgagctttctaccatttacatcactgaggttttttatttttgccctgttgtgatcatttaagatgaatgtttcagctttatcctagatgcgtttgagacaaggcactgtccaattgaggaaatctcccaatctcagttgaggaaaacaatggtggaaaaatccctctcagcttggtactatgaaaaaaatgactgggtttgggtctggctagttaaatgatcttgccaatgtttttttttttcttttcttttctttttgccactcctgagtcttagtgtctttatctgtaaagaaaagctaccattaaatcagtggttcttgaacaggcaacccttgaggatttcctggggaatttaatagagcctgggccccaccccagaaatttggattaaatccatctgggtaaggt

SEQ ID NO: 89345 - DNA, 1056 bp, Homo sapiens
cccaagggctatctttggaacacattagtggctttgagttcctcacctgatagtctttgctgcaatcaaatgtttcctgcagtagaaaaccagcaagcttctccgtggccagtcccttgggaccgtgggggagtagagcctggtgtttcttgaagaatgaaaaacaaggcactgtaaatatttctggcagtgaggagattcatttgccttatctttattagattgcccagaaggcagcaataactggtgtttggcaaaggacaatgttaggactggttgtaaaattcttttggcaacagttgatatgcttcatttgaatacagcagagcaatctgtagggtccattctggctttaaaggcttgtacatagttttagcagcacagctgggatggaaggtggacagggacagtatttgaagtatttttgttttctttcctgccaggatgacaaggatttggtgcatgaatttgtagtggctgaaggtctgacatgtttgatcaaggtgggagctgaggctgatcagaactatcagaactacatcttaaggggtaagtcatgactgggcatgcagcagctgccccagctgcaggggggatctgggttcaccttcaggaacttaactactgagagctttttaaaagacttcgatttgagagtaaggtggtaaagacaccctttggcaaaaaaacatctgccataggtaaaacaggttttaccagttcctagtaattagcaactgtgctaatttttactgactttcacctggagttattttacacgcttactaggaaaactgtaccactcactgggttctttataatctgtcttatttgtccaggaaggagacatactaaatgggcttgggtaaagcctgcatctcagcagaaagccaccccaaaccaaagggggcaatttatttcttggaaaaaaacattttctcccaatttgagttatcacctggggcttttgtcaaagtgcatatttttcaccttgtcttcctgtttctgattcgatagttttgagcgggtccgggatttgccttttaaagagcgatt

SEQ ID NO: 89346 - DNA, 1041 bp, Homo sapiens
accaggaaagtaacttctgagggatggaaatgacacatttcttgggacgtgacatttgcgttttcctgcagggaagctatgattttccttagttcatacatggagtcactcctttgtgactttgaacaatttctcacgtaggcttttttttaaggttctgataactgctggcagccactggacatttgcgatcaagaacaacctttgaattacctctttatttgtccacccatgttttaactgtgctgtcttcggtggggactggtgagggcagatgcagatcaagagaagaggctgggaaaagttttgcagttattttattcacagttccctgaggagaagacacagcacccatgcagggccactcaggaagcacagaggtcggccatgaggtggggggagaggcagactgtgggcaaacacctgcattgtggcttccaagggacaggcaagccagctgaggattggccccgaagctcagagtggctctggagtggcgagggcctgtgtatagtagcccaaggtgtgagagccccgtgtgggagaaggttggggtgtagacttaatgggctgctggagaagacgaactggctggtcgctagccagggcctcaaaactgggttaagctggacacagtggcacatgcctgtcatctccgctacttggaggctgaggccggaggatcacttgagcctaggaatttgaggttacagtgagctatatttgcaccactgcactccagcctgattaacagagcaagaccctgtttttaaaaaagctgtgtcaagatagcattttaaaaaatgatattgcaaaccgtaagttgggttaattgtcctagtgtcttgagaagtgtgccctcatgaagccacctgaggagctctgctctgtgtggctacatgggagtcctacagccccaggggaaacaaaagcatgtggagaatccaggactttcccagatctgcttttagaactctttatttgtctttatttgcatacacagccccctctcagcattttttttttttaaggcccaggaat

SEQ ID NO: 89347 - DNA, 1011 bp, Homo sapiens
ggaaaaaatcctcaaatgccattcatattaggggatcccttaatgagaatcaggatgtatggtcagatggtgtttgttggcattgatggtaccagaaatggaaatatcatagatatcatggaaagagattttatgatgttagaaggcagtggcacaaaatgatcaagtggtaattaaactaacatcctccttgtcagaaaaactgaagtttatattttggcactttataaaatgccaaaaagagcagaggttgggtttagactacagggaaggcaccaaactagccccaaggtgaggaaatgggagcaaaggggaagaatttcttgcttcctgaactaaggttaggtctttggctactgtattttccacggaacaacctagcctgactctctgcaacctcatgacactggtcctgtgtcccatgcagctggcttggaggaagctctttcctgcctcttgccagaagggttttctgctttgggtctggacttcagagattatcatggtagctgtacagctaggctttgatgtggatgacccaggagtcttggaggtgtcttcagctccaggtgggttgaggccagtgttaagaatggagtccttcctcatttgatgtctctcctcttgctgagtggtacaacaggactatttccaataaaaaatcactgcagcgtaagcagactggcagcctgtggggctgaatggaacctgcaggtgttttgtgtgccctatctaacaggtttaaagattgtgaattatgaacatttaaaaacttggagatttggcataaaaatacagctttctggcttttcttgaagtactgaaaacttaagccgacccaggccctgtgggatgtggactggggagggctggagaaagtggcccttgaagcagaaagatgcaatcaccacgtggtgtttgctttttcttcctcctgtagttgaaacctctgctttaggtgtcttggggccctggctgggtctgacctccatctggcctctctttcacgtc

SEQ ID NO: 89348 - DNA, 1039 bp, Homo sapiens
acgaccaaatctcacttctgtgttcatcaggaatttttccactttattcataccaaagatgtgcctcctcactctgtccttctctccttgctcagtagacttttccagaggagctgctggctaggtgtgccttgaagcacaatcgttatttccttggctctaattttatctcacacatggtcttcttttacaaggtttctatttgtgaatccagctttatgatagaagaaaatgtcaacagcaagatttaaacctagccccaagcatggattaaaactttttttgtgggtggggtggtggagctaagactttctgaggaaatatcagttggtgtgttcatagatttctgcattttggaggcttgagggctcttggtagattgggccagcctcttggcagggtaccacgccttttctaaccctgtgatttcccctgccattaatgtgcccaagacctccagccctggctactctccaatgcctcaggcctgtggagccagctgtgccctggtatctccatctccattgcaccagtatctccatctccattgcaccatgcccaaacccaaaacccatgtttttataccccagtcagttcctccacagctctgttcatcatcccaacaaagcgtaatcattcatcacattcaattcagccaccctagggtcctcctaacccctttctctcattcattctttgtaatcatcacccaccaaattagggcttctctaaaccttgactccctttcaagtccttccatctctgtctatacccagtttttgagttcagatcatcatttgttccttcctaacctgctctaccagctgcctcatgggtctctctgcttttagtcctgcctccctttggcccattttgccctctgttgcatggatggaccatgcaccatgatctgttctccttagtccttggttcagcttctttagtggctcctctcatcctcagggtgaaatcccaggccttctgtgtgggtagagcccactttggtcctgccctcgtgtgtcggtgcagtccactgcag

SEQ ID NO: 89349 - DNA, 1030 bp, Homo sapiens
ctccaggagatcttccctggttcccgagtattttggccctctatgcataccctggtcttgactcactgataataaatatttgtgaacatacactatggaccaggaacccaaggctaattccctgcaccatattagccttcgtgcatgtcaggttccatccttgttctgtgagatccttgagagccaggcatgttttaagagctcagtgaaaatgagctgacagaaggaatagaagaatgatagactatctgcagagaaagagaagtcactacttgtgagaaagctgctgatttgtactagtaattggagagccggaatttgcttatttgaagctttagtccacctgctcttgtttctgaagcagtatagcacaaggtgatttggttttggtacttttcaaaaaatgccgatgtactaaactttctttttgataattttactagttcagtaggtggatatatatctactagggtgtatatcttgattttaaataagacatgatttatacagataaaatacatgcaaatatggattatactgtacagcctgttttgtatgtggaggaattatttacctgcctctgaaatagatggactgtggatttcttggagatgggagtagtatcatcacaacctttgcagctgcaccagcctgctcctgagtgcctcataaatattcaacaaatagttgaggaagacaattgaatgaatgcctgggagaggagtccccagagccatgccatggctgtgttgatcttgttgagtgttttatgggtgattccgggtaagcacaaagtttataccaagaaatgtgtgtgcatgatcaggagatgtgaaatgagaagacagcaattatatgacacatgttcaagtgtgatgtggagggcttttacttgatttgattttcagtatcctcactatttcaacctcattatcttgtcgtctttgctttctttaccctgcctcttctatccctagctgcttaaaactggacctttccaaaaccactcacatgggagtttggcctgact

SEQ ID NO: 89350 - DNA, 1568 bp, Homo sapiens
gtcccaaatctttggattttggaatcagtcagaggggagattattctaggtaggatgggcctaaatagatgaatccctgaaaagaaagtctagaagtcaaagacttctgctgaccttgaagaagcaagttgccatgagttctacagctgcaaggaaatgaattctgccaacaaccacatgagcttggaagaggaccccaagcctcagatcagaccacaactgacaccttgattgcagcctggtgagacacccccagcagaagacccagtcgggccatgcctggatttctgcaccatggaaactgtgagatgataaatgtatgttgttttaagctgccaagcaatttgttatacagagttagaaaatgaatatagttacatacaaagaatcacaacacgaagccatctggacttgctaaatttggtacagaatactctgacctcagaggtcttttgtaggggaatcagggaagatatcatgagggcagcaaccttttactgtctttctgggcttcttaggcaactacatgccatccattcaagctgaattccccttgatcccctgcctcttcttgcatgatcttctcacacggtctgtgcagacctctcatgtgggtctcccaactgttgacaatgtccaggaccactgcaataaaggactctcttccacacacaaaagagtgactaatggagaaggcaatttataagaaaatttggtgtttcctaatatgccagcatcatgagagaacatggtagctttatcaagattgggctgagttttaggaaaagatgatcacttgggtgatcttgggatgatctcacctatgaagacaagcatgggcactgggccacccttgctcttcttcagagatgctcttatctcagtgttctttgcatctcctgtttactcattgattaatccaggagatgatttgcagatgactgcagtgggagatccaagggctcggccaaggcccctcgtcgtaaggaacttggcagtggcttagcataggagccatctaagtaaaagtggatagacacaaaaacactgtatttgttaggcatggaatgaaaatcctgaaatcattctttttttcccccctcaattttgtttgcatcagcattatgtttctaaagatggttgataaattttaagtagttcaatcctgtatcatttatttcaaagatagttattctttgcttagtcactcaagatgtttgctttttcataattcagcttttttttttcttttgagactgaatcttgctctgttgccccaactggagtgcagtggcacaatctttgctcactgcaacctccgcctcctgcgttccagcgattctcctgcctcagcctcaccaccatgtctggctaatttttatatttattttattagaaatggagtttcaccatgttggccaggctggtctcaaactcctgacctcaggtaatccacctgcctcagcctcccgaagtgctgagattacagatgtgagccaccatgcctggcccataattcagctttctaaaaaatagaatcagcttaatatatagtgtttcatgggaat

SEQ ID NO: 89351 - DNA, 1052 bp, Homo sapiens
gaagagtacctgggatctcaccatactacctttgtaatttcctgtatatttatatttcaacataaaaagtaaaaaatcagtacgcatcttatgttgcttagcttctataagaccactatccatactcaacccaagaaaacaccacacaattagcataggctggattattacatttgttatgttcaacgaagtgatatcatagtctttgtgttttttatgatgatcagacccacttttgaattcattctgtattcagtactacatactatattctatagactgagttggctgaaatccaggacataataagtaggtaggggaacttgggcaagatttgctaggcagggcatgctgtgactttaactatttgaataattcacgtgtatagaagacatggagttattctgggtgaaggtgcagatgccaaaaccaaggccattgcgtagaaagtgtctagagtgagatgggggcccagtcaccgtccagagaggaaagcaggccacagttcttccattgctcagacgtgcctggagtggtgagcagagactgagtgaacacctgctgtggaggtgggcactgcagtggcaaaaatggggactcagtggcacctttcaatggcagacccaggctcttggccaagttgtgatgaaagaaattcagcagcaggtgggcgaatcagaggtgacaaaaccctgtttggggctgtttatcaccattttgagaaaattaaaaccaaagcaatgttttctgagactatttttgaacccattatgagtatgatttctagagtaggaagtacaggattggaggatgatgtgctcattaaagtccccaagaatggacagcagtgatgattcagaacaggcaagtcctggaagaggcctggttccgatgtggcaataggggagtagcttgaggaaacacactgcacatcccttgaagccttggactcaacaaagagaggccctgaagaattaagtgggctctctgctgcctctggcttcatgtcgcctgtatttaaatcatgatccctttcatcatgttgttccaac

SEQ ID NO: 89352 - DNA, 1075 bp, Homo sapiens
tcaggctgcgtctccagggagctcacagtgtgaggtgcctgggcacgtgagtcactgggctgggtggctgcagactcccgtcacggcagtcggctccctcactgcctctggacttgccaaagttttgttgaggtggagaggtcgccacaggctgaaagcattaaggagaaccaccctggcatgcggagcagtcggtgtgctttggaggaaaacatacaaaccaggtgagtgtgtgtggacaagctggggcttggctgccagatgccgccctcccctttctggtgggactgctcagggacatctcctcctcctctcttaacatcttcccaggtgtttctttgaacagagcaatgggtacttttccagcaatataaaaagctttgaacagagaaattttacagatggtattaacttttcaaaaattagacaaacaacctaacttcagaagttggtatttcttacattaaaatcctgggaaaattaaatattttgccactagtttttacatctctaaaactagggtaatactgactacctggtgttggccatgaagagtcaatgaggcaatgcttgtagattaacttcttgtagattggtagtgtaaacttcagaatttaaaatttatccatgctcaccctccctccctctccttctttatctctccccctctctccctgtctcctcacctttgatttaagtcaacaaaaattcattttgtgccccgtgtgccaggactgggcatacagtggtgaacaagacacacatggctctgcctcatggaactttccattctggccaagatgatagacaaggaacaataaaggatatatgtaataatgacagctggtgataactgctgtgaagaaaagtaaagcaggtgtgaggcttctagagggtggcatgtataaggtgggcagacactatttatacagggtggacgaggaagacctctttgaagacgtaatgtttcacccaaagaatggagccagctggaggtaaatctgcatccaaaatgtaaaaagcaatggattaaggcattcgaagcagtttctgaatcgtcaggaacactgttgat

SEQ ID NO: 89353 - DNA, 1069 bp, Homo sapiens
cattccactctgcttgggcttaattactcgtctctacaccttgtgttcattgtctctgtcacctggtaagcagggatgtcagtcagggacagatgccctaagtgtatgtgtcctgcatgggccgtcactaagctaggaggagctgcttttcccgggttcattggccaagcccttgtcactgactcggtgtcaccccaggtgacaccccaggtgaacacatgagcgcgaatgagacagtccagccactgctgaccctgctgcagagtccatttctggttcattccacctgtggctgtgacctgttttggagaggctgtgtgcttccactggtatttcattggatgtaagtcttagaagatcattatagaatagatcattaaaatgactgttttactttccatagagaacctagaagtctgccaaaaatttttagaggttcaaaacttgctaatctgttatactttccttcattcctttggtgtctccttatctaaaatatgggggactgtagaacgggaaagactgggagagggtgaggagcataggtgtaactgaggctgctacagcccagcagtaatgaagcacctgtttctgtacaggtggctgatgagggctccttttaaatctttagcatgggaatcttggatataaactttgctgctgttgggaagatgaatgaataggccagaaacaaaccagtcttctgtgtgtattagatgggagaagatgcagagagcttagctacataatgtcctgctgggaagaaaggtctatcagaaagaagcacatcagtgtcagtgtttctgtttggaaggcctggggaggagggaggggagacgggccctccctcctttgagagttactaagagttaagcttgtaagtgttaggggagaatattaggtctgatttttttaacaacttttttgggggaccttttttagaaaatggtcattctaaggtagagagagggtagtaatttaagactgctttagaaaaatttgcattgcaaatgctgctaaatgtcagcaagggactcaaaactttgacaccttgttggagctctttgtg

SEQ ID NO: 89354 - DNA, 1009 bp, Homo sapiens
gttgaggaattctcaatggaagttagcaaacgttttgtactaaatgaaaatacaacacatcagatttgtgggatgtggttgaagcaatgcatgagggaaatttctagcattacctgcatatattagaaaagagggaaataataatgtaagcacctaccttaagaaactagagtaagaaaagtaaaataaaaccaaataagtagaaggaagaaaataataaaagtagaaattgatgaagttgaaagcggagaaaaaaatagagaaaatcaatgaaacaaaaagctgattctgtgaaaagaaaaataaaattgaccaacaagaatgacaaatgaaaaaagagaagatatgcattgctaacattaagaatgaaaggggattaaacttcacttcaatgaattatgacagaatactatgaacaactctcagcacataaaattgatacattagatgaaatggatcaattccttaaatggatcatttccttaaaaaccacaaactaccaaaacccacccaagatgaaatgataacctgactagccccattactgtaactattaaagaaatttaatttgcagttaaccttcttaacaaaatatctccagccccaaacagttgcctggtgaattccaccaaacatttaaagataaaataaaaccaattttacaaaatctcttccagaaaacagaagaggaggaaacacttcccaattcattttatgaggtcagtattaccatggtatgaaaaccagacataaaatacactgaacaatatttattatgaacaaagatgcaaaaaatcctcaacaaatattagtaaatcaaatccagcaatatatgaaaagagtaatatgccatggtcaaaaaggatgcaagactcattgagtatttgaaattcagttagtataacctactgcattaacaatctgaagaagaaaaaacacaatcatatcagttgatgtagaagaagcatttgacaaaattcattcattcatgatttacaaaaagctctta

SEQ ID NO: 89355 - DNA, 1037 bp, Homo sapiens
gagttgctgaaagttaacaaaggcagtagctgccaagtttatttccagtctacatagttctaatgagatcacctcttatttacaaaaccaatagagtgtctgctgatactcttccctcacccccatctgaataatgagaaattgaaaagaacaacagatacatcaacccaagacccttagattttgagaaggaggcctcagtctcctccttaaacatacagtttggtcaatacagctgcaatgggttttccccaattcaaattaagaaatcagcaaagccaggggccctagcatttccttttgacaaagagtcagatttatcttaacctggaaaggttaccttgacatccagttgcctttgccttatacagtcacagagttgataaaggaagtactggagcagaaacatcttgtcactgtgttttcataattcatcatttttcttccatgaaaggcaacaagatgtgattttgcagcctgccagaggctcattatgcaatgcatatttgcagatatttgagactcatagccaggggagaaaataatgcattcgtagccaaataatgactttttaaaagaaagaaaaaagtgttttcaataaagtgtttctttctatttacaagagccaatctttaaactctccagtcagaggtaagaggcagatgccaggcccatgacttatcacaggatgtggatttttttctcttcatacatctggaattctaattaattggagtaagatgattcagtctatacagcatggccctttgtcacccagcacagagagtctgtctctttatctctatggatcctcttttggcccaaggggaaggcctcagggccctgagcctggcaaactctcacctccttgctgcctcttaggggtgcctcagggcgctggcatggaagcttccctgtctgcattgctctccaggttagcttgccttgctctgtctaagttcccatcagccccattggatctcatccttccatctgtgccccatattgctgatcacaggtctccagacttcctttct

SEQ ID NO: 89356 - DNA, 1046 bp, Homo sapiens
tggatcatctgaggtcgggagtttgagaccagcctgaccaatatggagaaaccccatgtctactaaaaatacaaaattagctgggcttggtggtgcatgcctgtaatcctagctactcaggaggctgaggcaggagaattgcttgaaccctcgaggtggaggttgctgtgagctgagatcgcgccattgcactccagcctggtgctggaaaaaaaaatagaagaagaaaatgccaatttgtagcactatttattgttatttttaattattttgagttgtctgctatattttacattctgtaagatttcctgttcgctagcaaaatcctaagggctacccagccttacacttggttactataccttctgcaaattgcattgtgtcataagcaggttggccatcaggccctgaggctggaccacatgggttcggtgctcatgacttcctgttctggtggatgtgccaaccatagtctccacactctcccttgaaggacacctgcaaaacaagacccagagttctgtacttagttaatatgtttgggcctatactttatttctggtaatatacacctcatgttacagataacctgttagaggtcgggaaggttgagatttggagtctgggatgtctgttggattgtttgataaccagttacgaaggctttagggcacactctgagctgcttgctcagaaattctgagcttaagtatatggcattgagatacaatgtttaaataaagagtttgtatcctaagtcacttgagatctttttttctttatagtaatacttgtatattctaaagtgctgatgagcttgtaaacaatgtggtaaaactttatagatcaagttatcttaccactttcgaattcagttttaataaccagcatccatttatataacatatatttatgatgttttagtggaaaatgaaacaaataaaatgaagcatggttttccaaccccctttgtaatttcaatcttgaggtttggaaattgttttcttttttggctgttgaatttttagaagagaaattaggaattt

SEQ ID NO: 89357 - DNA, 1084 bp, Homo sapiens
aagcttagggccggaatggggtttgataatgaaagaaaagtgctcatgagcttacctgggagaggtcagatcctgagcttgtctttgcctctacccagctcctgccactgaaacacagaagtctagctcctcctcctgttcttcctgtcttgttcagggtttccctggctccttcctcccctcccctctacgcttcattgcttatgacccccagatgtttctagaaccttctcccttcctctcctccatcccctgccctgccttactcaggccctcactaggtttaacctatgctcctggccaccctcccaaacagttcggtcacatccaaaacctgccagtggcttcccagtgcttatagcataaagtcagtcccctggctaaggggacccttcacccttcaactcctgcccagctgccacccccttctcccacctcggctgtacccccacccccttaccttgggcatgtgcttttaaagcccatgtatgcacctcttctctgctgtggtggtgttgcccatccctgtctctccaagtcggggttgcctgctcaaggatggggtctctgtctcccagagtgatgtcccagcactccagctggcccagagccagcaggcatgctgcaaacacgtggcgaagaacgagcttctgctctggtttactgtgtaacgtgctgtggaccccgtgatattgggaagcctggaattaaaatgcttcccaattaaaatgatttttctccttttgtcttttgttgtttgttttcttccccagtaggactcaggtattattatcatcatccccacaaagactcaagaacaaaaacttgacaatactttttctttttatgattataactgtaatactactgttacaatcataaaaacttgggaaaagtttaaagaagacaataaaaattcacctctagtttcaacaaagataatcactgttaacctgttggtatatttccttatagttgtgtgtgtgtgtgcgtgcacactatgcataaaccagccaggatgtgtcgggaagaaacgaggggcctaaattgcacttttgattcaaaccatttgtgtctgtgattt

SEQ ID NO: 89358 - DNA, 1045 bp, Homo sapiens
atctttggctccagagtaagcaaccaaaagtagttctgggtccattagcaccactagaaagtcttagtttcgatactttctcccctgcacattcttcctttgagccatgcatgggtaactcactacaacatgtgttctatgccaaggttttatacaaaatgtgaatgttagaagctgcccctgttacaaacacaaatggcggcatccagatatcttaaactggacagtgagacccaaggcctgctgatcagattgattgactgtcttgagagctgagatggttactttgcagtggttggaagaacaactacaccgtggtgtggacttcaaagtagtttgatgatcaatatcagcaaggagataattcagtagtcagcaggtgaaaggagaaagaacatgtctttgtgctcagttagcaagggtcatagaagattgcccagttctgactggctgggcaacttagccaaagcaaaaggctttctattcacttaggaaagccaggagatctccatattgagctacatttgtgccttttacgtcttgtagtaagtaggtacctattctttgtttaatcctcttaaacaaatccccttaaatcctgtcttctctgcttttcttactgtgtgcatctgcttcctggttcttttaaaattgcttcagcttaacccacttcctgccttctcagagatctccattcactattcagcagacattttactgagcatgtactatatgccaggcactgtcctaagggcatggagatcaacaagacagatactatcatggtccttgggaaacttttgttctcaaggccaaaatcagctctgacatagcccatccaaggaccagcatttggaaactactgtatttaggttatttccaagtttacttttctcaagtaaaaataagcaatatccctttgagatctttatagagaaagcacgaaagagcttcatgtcgcaaaccaccaagccaagagcaaggcaattcttatttcacttcacttcaaatattcatcttgggcctagaaaaccatgtcaaggtg

SEQ ID NO: 89359 - DNA, 1036 bp, Homo sapiens
gaggaaattgtacacaatcctctgaaaaaggcctgtatataaagccaccgaagatgctgagggtaggagttaggtggaccttgtcagtagtacttggtgttctcctgcttcatcatgtttgttccttgtctgtttcttgctgttacacttttcgaggattcctgtgttgtgagttcaggtgacaatgctttgcaataggctggtaaggatgatgatacggaagtggaccatcctgggcacggttcacagtcttgaagtgctgggctcggtaggatctgaaacaggaggccagagatgccactctgaatgctgtttgcttcattctttttggaatttcactttactggaattattacttcaacattaatttagtagcatttgagcaaaatatactttgcagcttgtaaagataggtgatgttttatctatctagattgatgattatgaagtgacttcatttacgaagcctgttggagggattttgcctgtggccccaaagtgacggcatgattttgatgaggtgggagtgcgatagtgggaatgcagtggtgaaatgctgattgggaaatgatttcttcctgcatagcttagtcacctgctcaacatctgtgcctcaaacagtacctcagagtcaagtggctcattgtgttctgtcccctgcagaccttgaaagacacagaagctgcctcatgtacatatatgcacattgctcttcatccctgcaaacgccctggccgcacctaacgctagcttatagcaacatgccttcagatgccacatatgaaggatttggggctagattttataactcagtcacccaagtgatgccaacttttgtaaagaagggagaaatatgttttagaaaggggttcatattgttctaaaaaaatatagggcagtctccactcagatggtccttttgcatcatttgaatttaactctcacgatcatcctctgtaagattcagacaggacaggttttattaacctcattgtacaagtgagaaaacagatggggctaagtgcctattccaaat

SEQ ID NO: 89360 - DNA, 1414 bp, Homo sapiens
attgttaaatgaatatggacgtgaattggagaaaatattttgtgcacccgcataaacatgctagaggatttcacaacaaccagattaacaaccattggtactatgagtggcaagtagctacttgggaagatttatctgatggtaagtgacttgttataaatgggattcactgacaagtgtggtgacctcctgacaaaagtatgattggaatacagccagtgattcagcagtgtccaagagattcatgctgagtgttgaatagcaaagggtggcctggagagaagaggtctgggaaggctgggagagtgggcttggaaatgggaggaactgtattgaataaaggcagaggcactgggacatgaggaagaagttactttgcaatgctcctggtatctggggcgggattggcttctcaaatattcgttgtgaccagattgcaaatttgttgtgggtttgaacttccctgaattgaatctgaggatctttctaggttctgaagaaattggcaaaattttatccttaaggccaagtggagctactgatgaatttcaaatgattaagtgaaaatcagtgtagtgtttctgcaggagcattctgggcacagcatggggaactcactgggggagagcaggctgcacaaagagattggtgcagggctttcgctggtccaggaaggagtggagggggcctgactgaagcaggggaagagagaagggaaagtacagggaggtgctgagaatgcaggaggctgtggtttgtaggacaatgactggattgcatggtgacaaagacaaaggggcctgaggtgattctctggcaatcagtaacctggggccagtcagtaagctcctggatgtatctatgggtcaggcagatggaaattcccatagtcagttggataggcacttctggaactccaatacctgtaggtgatggttgaagctctagtttagaggccctaacccaggaaaaataaactgcatgggcagagaactggctggggaaaaccagcaagagaatgtacagaactttcatctcatgaaatgaagaaactgagaacatcacccacatttcaagtcaatgaaccttgacatcagttatcatcaagtgtgactgtttctcaggctagagtggacttaggtggtatgagggctctggaagaaacaagctgtttactatgggaatggaagcgaacatacctcagatggaaaggttcaagttcctagttgaatcttttacttgctttgggaattttctttcagggccaagtttccctttgacctgtccaaaccccacatctcctgtaagatgcaccttctcctctgtgttctgaatgttcacagcactttctaaggctcgatttttgctggcagtccacgcaggcatgggtgtgggtcatccagctagagaataa

SEQ ID NO: 89361 - DNA, 1046 bp, Homo sapiens
gaggcaggagaatggtgtgaacctgggaggcggagcttgcagtgagccgagatcgtgccagcaacgaatatctgtggcttagaataaagtgttttttttttttttaaacacaaagtcaaggtatacacaaaaactggtgagaagcctcatagtctgtagttatcactagatccatttgttttacacctgaataaatctgtaaccccagttactaattgtgctttttttctgttgatgtttgtactctgcagacttgaattccattatgttaaattactccatgtttcagcagaaataatatgcttgaccctttaatatttatttgattctaaaacaaaatagcaaaataatggcttatgtattaaggtactagcccatagtccagcttcttgggtatattagggatccatgagctatactttatactcctcctaaactttgcatgctacagggacaataaatactttcctgtctaactttgggttctcaccatggaaacatcagagcaacagctgggctctgttagatgtcttttcattctcttggctggtaaaatcttttgcagaaactttaaaaaacttgatggctaacaaaactctacttttaagtgaaatcactgattcaagttggccagatatttgtcttaactgattacgattgctaattggaagttttcaaatgttaccttgggcccttggtgacctagaaacagccttaaagttaacagaaagtgtgagtcactgtgaggccaagatcaaactgcaatttaaggattcagtaacacagaaggctgcagaccaagactggagggccatgttctttaccataaatgtaacaaaatatttctatgaatatcttatatgtcctatgcattttatggaactaaatgggacagtttaaatgtctgcattttatctaaaccttaagacggctttttgactagttgccacaaatgggtcataaggcactgctcctccaggctttcaggacagcaggcaagtctggggtgactgggctctgggctggtcttctgggagctgtacgca

SEQ ID NO: 89362 - DNA, 1047 bp, Homo sapiens
cattgtgctgtctgcccttggttctgccctgccacttatgatagcaaagctacaacacatacatcatatgaagatttattgtgggatctgaggatgttgagcccaaagagaagacagcttgggatgtaggttcagatagctgtctttaaatatctgtgagacagccatttggaaaagagttggatcaaaaagacaaagtgcttttacatattaatgcattcctcctaggggataggtactgttagtgccccatgtagggatgagtaaagtggggtccaaggtcacagggctcaaaagtggtgactctgaagaccagacccaggcagtctggctccagaacctctccagctctacctgggagagtaaatggaatcaaggaattttggagggaggggctcagtgttttgttttaaagaggagaggcccatcggttggcaaggtggagggcattttgtgtggaccagaagtaataacacctgcaaactcctgatcaagctgagggaaggtggcctcatgatggagcttgtaggtatagtttggcagctgtgggagcacatggaggaaaagaagactgaggctggtagggggtggtgtgtatgagggtatactatgccaagctcagaaggatggctgagtccgggcatggtggctttgggaggctgaggtgggtggatcacttgaggttaggagttcaagaccagcctggcaaacatggtaaaaactcatctctactaaaaatacaaaaatattcatccatggtggcatatgcctgtagtcccagctattcggaaggctgaggcacgagaatcacttgaactcaggaatcagaggctgcagtgaaccaagatggtgagattgtgccactgcacctcagcctgggtgacagagtgagactctgtctcaaaaaaaaaggaaggatggcttagatgtgcttgtttgtggcttctgccatgacaggagggatgctatctcactgctctccttgtttctgctagaggcaccccgagtccagatccatctctcccttcttagttacataattctcaa

SEQ ID NO: 89363 - DNA, 1008 bp, Homo sapiens
cagtaaagatgtgaggactctggttgctgcagcagctggtcatcaccaaaaacctttactggatgattctgtgtggaggagaaaaaccacagaggaggtctgcccatggccagaagcttctgtgaattgcatgtagggggtgcagggtagtggcatctagccagcttgacaaagaaatttggccttttctgctttcttacatctccacccgacgtttaaagtcccacatttcagaactgtctcttgtctcctaacagactgagtgtgcttttcttcatttcagccagctgggtggttttttttttttaattattattatttcgttgttgttgttgttgttgtttttgcttcatcttcctgtttgtctgtaatgctcatctcacttttccatgttgtctgtgtgcatttctcttttcctggctttgtctcagggaggaggaggaggaagaggagcagccaatcacggagcccagttccgaagaagagagagaggatgatgcttcctgtcagggcaaggacaggtacctaggactggagcctcccaagctcacactaaaagtgggagactccttcctaatgatagttcactgccttctagtggccacctcccttcctcattgactcccacttgcaaactcttacttaccctgttcacagagccacagaaccactggttttgtagaaatacctgagcatgttttcattagagaactgcactttttattgaaatcctaccttcctaaccacactttatggaaaaaatcactggttttctcctcacctttccctccctcattgaatgctttagctcaaccagattgatggtgactaaaaaggctcatctcccctaagaagattcttgccctttcagcattgcagtaagaagaattccatatgttcctttcttcctgattttaccagcacaatattagctaaaatgtgtggataactactatattaatgattcaggtttgttttatatccaaacaggaaaattttcaccccatg

SEQ ID NO: 89364 - DNA, 1033 bp, Homo sapiens
gcatgagaccttgcttctagtttttccctggataaataaagctccgtcttctccctccagcatacttcttaaggaattccctcaggagtgatattttcctttgcttggtaccatggagatcttatagcacaaagcagtgccccacactgattccacctgctcaagagttttttttctttctaaaaatggaaggtgattttggaaggagaagctggaaaggactgggagaccctaggagcagcatgggaagatccatttttaaaaagagcagatatggaacttcaggatctgaaaattaatttcctctgatttccagaatggctttgtatacctccaggagttgtgaactgagcttctttttttttccttcttttttttttttttttttgtaccccaatcatactatcccagtgaaccaaatttgaattccttgaaactacaagttctctgcaggtctcttccaggtctacagttccaggattgttgttatctttcacacagtttttgcggaatgaatccaacatgactcttacaccttccaagaacaatatctatgtgcaagttaggagctgaacatttgactggaacaaaaatatgttggtgatctcatctttcccagagagtgtgttagcccacggtggtgatgctggtctttctggtgatggtctcggccctagttggggctttcctgggccccagacccttcccgtttggtctgcaagcttcaccgctatttatagtcgtgggggtgggagcaatagaaacacataagctgtccagttgaagatacacgtaagttgtgggggaaaaaaaaagctgcttgcttgtgaatgaaggttgactttgatttaactgagcaaagtttgtaaacttttaaaatcacttctccagcaggaacttggatactgtacaagtattgttcctattgatttttctgatgttcactttttgtggttttcatgggtctgtgtgaccacagatggactactcagtggttgactgcgattgaatgggttataataaagaccgacca

SEQ ID NO: 89365 - DNA, 1987 bp, Homo sapiens
gtgatcctgttaaaacattctgcaggatgtccacttgtggtgggaagggaattgttttagctgctggagtaggatgacaagctgagcatccaggcagctgctgacacaggcatggagcctgtgtggatcaggctgcatcagggtctcgtcacggagagtgctaggtgtcgtgcggggcagcctccttcccctccctcattgcagtgcttgctgcctggtttctttccctctttgctcattggctttctctcccttctctatttctgcctttgtaggttcctttcatcctttgcttttgtgcttcctatgtggcctgtggtttgggaaccctgttgaaaaattaaaccaacactcacttggagaagcaattaacctgtttgacatgtagagtgttgggtttttaaagagaaaatgagtactcagaaaccaagtcccacaaagatgatgtgttcacagaggataatggaatagagtggtatgctctgagcctctctctgtctggcactgagaatatgccagccatgtgacactaaataaataaggacagcaacagccaaactgaccagaattagcagcacaggatagatgcgggtcgtatcaatattttattttccattataataatgaaatttcttattgaaaactgaaatttcatctctctattcttttttaaaaaatagcccatttttatagtttttcctacacttagtttttgacttttgagtatatttttgcacagttgtgatcaaactgtgtatattatatcctgatgttttcatttagcctatattatcatttttcgtgttgtcacttataaaattggtaatcatttttaagggttgcataatagtccattgacaaataatatatcatactttcgtagccatttccacatttctacctggttaagtagtttttagttttctaccatgatctaaataatgttccactatttgcaggagctttctggaaagaaaaagaaaaaagataaataatgctccaataagtatcttcctgtatgacattttcagtatataaataactataaggttatttccttatgttatcttcccaaaagttgacttactctgtcgaaggatacactcattttgaaatcagtttgctttccagaagggattccaatttctgttgatgggcgtttggactggattctccatgtgcaagaagctctttgtgtccttatagtgactgttggggtcccacacattctaatacagtgtccctaaccagttcggtggacggggtgggtcctgctctgtggctgggtagatttgcgaggcaaagctctctgagcctcattatttgtaagtaatcctgagtgtctgagcccatgcaagggcatcaaataatgatttgttttctgggagtgctctgagtgatgatacctaaatatggtctgctaaaggacgtctagtctgaaaaacagaaatctagaattttacagatcttgaaatttaacttgtcagacatgtctggaaaatcatcaaatctcatgtaaacctcatggctgtaattttggttcaggggaaatgttggatgaaaacatgaatacatgcacctctaaggagcaggccagtccagaaagcctggggacagtttctcctcaatcactgaacatgtgatgggattacatttaatcagtgaaattgatatggaaatactaaagtggaattttaaataagatgtttctttagccaaccatatggtatttcttacagacctgtgatggaattaacactaattgtgccaccatgtgaggcaagaaaaatcttcatggttcaagtgaaattgatttggatttttaatttatgttagcaaataattttaacgtacattttaaaaaacaggaaatgttagggttttatttaaaccctttgtcataaatcttgctgcctaatggttttagactttgggaaactcctcttatgagaaattatcagaaaaaaacagggaacaaacctcttta

SEQ ID NO: 89366 - DNA, 1048 bp, Homo sapiens
tttaagcttctaatgatcctgttacccaaataatgaatgtattacctgatagataggtagaaaatagttttagattgaaagctgattctagctcatctacgtcttaacatagaccaactgtaaaatatatatagaatgtatatacattcctggaatacttctataactcccattcttgagggctgcttacatgtcaagcatgttgcttgctattttctgtctgttaccaccttttctcctgcgagcacactcacagtatgatacttttccccaatttacagacaaaaatctgaaacaagaagacccgaggcattcagtgattttccccaagcattgcctaggtaccggcagaccctcaattctaaccaaggtctgactggtgcttacttcagtacttttaatcacaggccaagcaactgaaacattaactcattgtatctccaggtcatcaccgagtggtcttctcacatcatccttcaggcagcaccaagagtcactggcagcagagagagagaggcggcggcaggagagagaagaaaggttgcagagaatagagcgggaagaaagaaacaaattcaggtaagaaggatcttaagattttttttaaatagtgagttaaaaattaaaggcatgtgactttacaactgtatacatttaatattggcattaaaggaagtaatgaaaattctgtctgtatttttaaggaagagaaagacatacctgaaataggctggatctggtttgttatggcttttgtttctctaaccatatggcaggaagcacagtcagccaaatacaattagggactcatgtattcttgggccctccattacctacctcgtcctatccaggccctccggatgacagagagtgtaattatcttaacttaatttgccatctcttcctaatggtcctcatgttttattcatattctatcagatgcccaaaaagaaatgcttttcccactttctggtttgctttttgatccctgtaacaatcttcaatattttttgtaaacaataatctcttgctatgtggggggaaaagt

SEQ ID NO: 89367 - DNA, 1021 bp, Homo sapiens
tgactttgcactgttaacctagcatgcagagagactgtcgattaaaatataactgcttcacctaaaaccttacatagctggcattttgcagaacagagtgtactagttacctaaattttccaataaaagtatggagttgtcatttggtgccatcatggttaagtgtgtctattccttcaaatgagcacgtttatgttagcataatgacatagggcatatatttgaaataccctgcaccaccactgctgagcctggactacatgttcctaatgcatgcttttatgtcacatggtcagcactccttcaagaaatattttagtatccacactgtgccaggcagcagctgggggcactagatatatctgagactctttctggatgtgcctggtcacttacctgtctccctactgaactgtactcagctcctcgatggcaggaacaatgcctagatttcctttatttccccagtacccaccacagtgcttggcatgtagttgggacttaggaataatatatggaatcagtaaatgagtaaatgaaccaacagctttatttaaaatattcaagctgtaaactactttatttctttttttcattttaaaaactacttcatttatggtacgaatctttgtggtttgtgatgctaactagaaaatgcatgaatacatttttaaatttctatccacagaatatttgtatacaattttgtaagaaaaacatatatgagatacattactttataagattaagaagtatgttattaaaatgttgctgtaatattcgaaccagcctaggtcatataacagagcagctcaaaactctggtgttgatcagtagtatatttcaatggcaacatgctttgaatctcaataaaagatacaaagatgttcagtgtctaataaatgcagagaaacagtggaaactggttttacaagtagactggcaaaagacaagttttcacccccagctctttatagcctgcagttgtcccctctaccaccaggtggggtgactgcatgga

SEQ ID NO: 89368 - DNA, 1056 bp, Homo sapiens
taactttcagatacaaatacttggaacagttggcagctgaggagcacgagaaggagctgagaagccggagtgtgagccggggcagagccgacctctccttggacctgacctcgccagcagccccagcctgcctggctcctctgagccatagcccctcatcttcagactctcaagaggctctcacggtgtctgcctcctccccaggaacccctcaccatccccaaggtgagtacagggagagtagagggaaaatgaacaggttaacatcagacaggcttcctcagggcagtagtgatgatttcaacctgcaggctaatactgagacagcaactatgggtacactttgttgggggaggggggttgtgactgcaactgcctggtcactaacaaactagacgtcttcagagccacttatattaaagcaaaatgattcatcaaagttgtcaatgtatggccatggaaaaaggagaatatggaaaataagctttactttaacatttaatcctaaatactggaatattcatttaatactttatcattttgagatgtgggtctgcccaatcaagtgaccaacattcgaatgttcttacccgaggaactgttagtctggtttaaattaaactgaaggagaataaaattaattacagcaagcaaagaaaaatgtggacctagtgaaaatagaaggtaaatatggaagaaggaaaataattcaaattgtaaaaattactggcacatggttggatgtgggtgtgtgtgtgtacgtccttatgtacagacaggcaagctctcctgggagatattctgtcttcttcactttatttggagaggcgcgatgatattgtacactgcagccttgagcatcagctgttttcctgcctgctctgcatactgtgggtccgttttctttcacattaacacagggatggttctcagcagcgtttacacagtgtgtgttgactaaccctcctgctagcactgtttgctttagtcaagtgttatggcttacagcctgatgtagacttagccaattgaagacagcagaggcattaagctttt

SEQ ID NO: 89369 - DNA, 1039 bp, Homo sapiens
atattgcacacagaaataatacatcacagatacatttgaaaatgatgccacactatattatttttatttatgtcaaggaaaaatacgtttgacagtgatttttttctctacctgtaattggattccagggtatttccaaatgtctgattgtttggccctggggatatatacggcctatatggccatggcctactcaccagcagacattattgacaaaggttaatgatacttcctgtcacagatgcaggcatttaaagtatgggtaaatatggcgattcctgtagcctcctgatcctcaaacctggaaataaaatttagacatagagtatcatgaaatgtttagtttgtctaaatgatttttcctgtgggcatccatttgtccttttggctgtcatcattgttagcgttgactgtctttgtcatcttcgttgtggaagatgttctgagtctccttcaggtgtagggactctctgaggttatctaatccacacagcagaaatcagaaacatctggtatcctatttccaactggcacggtagcaatggaatattgtccatcatcagcctaacactgcatgctagttctcttgcataaaccttttggatgcctccagttcagtgtttcatgaattggcaggaaactagattccttgtggttctatgactcagggctgcctccctccctgcctcacctgactgctgctacttgataccattttgtcaattggacaaaatctttcagcaactctacccaaggctgaggtcctacctgctacacctgctgtgggcagcctttgcaaatcatcgagtttttctgccttgccatttctcagtctctaaaaatttccctttttctcctcatagaaatgacagttgtctgaagtgtgtcttcttgcatcatatttggaaacattaattgggattgagtccttctgaagtagacaaagtatataccttaagtaaagataggcatagaatggcactggaaaagttggtaaagaagagcattatttctaaggcaagagaatagcttgaaccca

SEQ ID NO: 89370 - DNA, 1023 bp, Homo sapiens
aaaaagaaagtgcctcaggagctacaagacctcgcctggagcaggcacttgggatgaacaagtttgctgcatctggagacactcacagagaatctggcttgttggctgggtgagacatctgcacctttcatcccaggtgggagccttgggtcagtgctttcaggtgcagtcaggaggctccacatgtcaggacaatgagggttcttgagccacagtggtactttgaatttccagacaatgactgagactggggaaattagcaaaggagaataactctggggctccttctagcatccttgtccatgctcaagatcttaatcactactctgctatctccaccactccccctttcccttcagcagccctgctttcccccatccatctttggaacacatttgttcaaaatgatacaacacctgcagtatggcaagacacactcacgttgactttctggtacctgaaatacactttttcaggagaacctctgggttcagtgaccatgcagtgtgtttcatctgcctctgggcatgatatgcatctttggagccttttgaatttgtaacttctgtgagaaggctgcctctgccagatacatcgggaagttcaagtcgctttttgttgactttctggatccatccccctctggatgcctctttgtcctctagatcatctccaggctaaacaggatagttgccttttgagtcgcgtgcatttctcattgttttctcaacatttgtcttagtcttttctcattgtttggttgcaatcctctcactgactcctcttctgccttttcactacgtggtgggtttttctgaagttcctctccagctcctctctatcttcatacacatcctctcactgggccctcgcattccacctgtgatttttacctacctcccatatgccttgaatccctgaggtctgtactgccagccttggcctccctgagctcagggcgtgtgtattgcacttccccagccatctccactaaatgcccctccaactcttcagacccaccaa

SEQ ID NO: 89371 - DNA, 2051 bp, Homo sapiens
cccacctttgttattcccagtgcttggagcagaacaagcattcagtacatgggttatgagttggcgaatggtcaagcatgacaaaagaaagcagactcatgaatctgcagagacagctgtttcctctctacccaggaagaaatttattacatgagccatgggtggaggacacatctttgactatgcaggccactccataaggactgaataaatgatgttggtataattaatagagaggaaacttttacagagagttgacatatctgggccatttctttctgaggatctgactctaatagaatagtcaccctatatgttatcaatatgagaataattgaacctgaaattgcttcttttttatcctgtatgatactacagtagcattatatacatatttaagcaagtgaacttaatcagaagcgtaatctgaggggcaagagtgggaagtggaaattctaatttaaatagcgcttttaatcctgtctaacattcatattaagtgcatgtccctgagggagcatgaccacaaggagcatagatcttttcttcttttccttgaaccattcctgattccaacgtgccccttgtcgtatgaacaatttgctgcttcaaatgtgagtttagagtttacagatttgtatttgggggtaacacagcccatgaatgcaatcccagcacttaaggagttccactgacgctaaattaaaaccgtgattgtcaaaaccatggagaagttatgggatctataaggtagcactgtccaaagggacttttgaaggtaattttgactatacatggtcaaaattgttcgggtcaagcaggttcaggcctaagccatctctgaagtcatcttcagtggggcttaggtctgaacctctggaaaatcaaactctgaaacttgaggacaaagcatggcttaacttttaaggcataaaaattaggctattgaatcagtattttgcaagtgataagctgtctcttttgtgaggcttgagtagaatttcttttgtgaagctgagtttgtgcccatcctcatgcaactattcctgtagagcagtgattctcaaccaggggtgagtttgctctcctgggggacatttggcagtgtctggagacattttcagttgccacaatagcagaggagaagtggaaggttggtgctgaagcctctagtgagtagaaaccagggattctgctaaacatcctgcagctcatgagacagtctcccagaagaaggaattattcaacctagaatacccaggtacccaggctgagaaaccttgctctagagtgaatccaagtgaacaacctaggaagaactggtctaacaccaaaggcaaagtctaaaagattttgaaagttgtaagcttttttctcttgggacctttttcagatttctgtgattaaaacacacgtctgtagtcaatcgtgttagttattagctctgagctggggaggtccctggaatctacacagtttggagcaactattatagaactggctggcccagcccttggtttcataagacctgccagaaagccaagtcctggcagagtcatctagacactaccacagattgaaatcaactgaagccacccagagatgtatcaagttcagaactttctaccaccaatttatcacttcaaagaaaaattgcataaccagaaattctaattggacactctgaactcggctgtcagggacgtggatgaaagcaacattgaaacattcctgcccactgtgtgtgtgtgcgcgtgtgtgtgtgcacgtgtgcgtacacgcttaattccaggaatgattatgtacttcttgattgcttaagtcacccaccacacagtatagccctgtgattaacagcccgagctttgcagtccagccaatccaggttcaaatgcaagctctgctagcatgagctctgcttagcagtgaggtcctgttggtcagagggttgctgaatatattcagtgaagggactgtttacagaggtatagggaggtcatgggaccatcaaaatgtggtgatgcttcacccagagactagcggtcgtggga

SEQ ID NO: 89372 - DNA, 1199 bp, Homo sapiens
ggacttcatacagggaccagctggccgaagtcctcaggccggctcgttcctcatttctctcctcattttgcgacctgcatgaggaaagcatggtcacattctccatctgacggggcagcctttatattcttacacctaagaaaagcacttagtttctccccccttccatgggttctcatgttgatgggttcccatcctggtttcccaaaccccactcactccagtaatgtctgtttctttggggtgaagaattccttttagtggctgtgttctggttatgggtccttccccacagggtggttggtgacagcccagtaccctgttatgtctctttgaggataccctggaccccttcttttctattacttcttccaccttgcagaaagtatccattaccacatccttttatgcagtttagtgttgattttcttctttggcccttctattccccctaccccaaccttcaaatctagctgcaagccctcggagccaggtcagtgcaggctctggccaaacacatttttctggtctttgctaagtgcatcctagcgatgctgagaccccatcgatctgcgctcttgggctgtgacccaggaagacagatcccagttttggatgcctgtaatgttaccaggcattccttgccatgtcttccttttatttccaaatgcacgcccactgctaggagaagggttgcctgggcacctggcccaagtccttcctgcagttcccctcctcccttgcacagcccaggagatgcaatcagatctttgtgtccttcctccatccagggtggttatggacaagcatggtgagccgtggcatctcttgacctgctgggtttggggtatcacagtcactcctgagcctcccttgaagatgcttagaggcattacatgctggggaagggacactctgctccttcctgcctggccaccctggcacgggccttcactgttctctcctggcctcagctttctgagggtaataccagagccctccccatagagagatcgtgagggcttcggaaggcagttcctgtgaagtgctcagtaaccattcctcaaagggagccagcagccctgcggaactccctgccccgctccggtgtgaacacggttcctcccccagctgatgtctgggatggaaaaacctcctgctgttcagagtctcagtcccttacccatgtgttcttccag

SEQ ID NO: 89373 - DNA, 1009 bp, Homo sapiens
caggtcccttccagcccctgccatgcgtagaccctgccagaatttctgtgttgctttgagcagtgtgtacctagggttcaagcacacacccttagagtgcattgccagggttccagaagagtgggctttgctcagcctgagggcagttcccttaagagtgagccaccctcctccagccttcatgtgtggcagttggctcagaattttgtgtattctcgatcattttgctacacatccacagctcatagctgagggttttgctcagaaaaaataaataaataaaaataaaaaaattttaaaaaagcataagccagattgtgccatttccctgttccctagagtgtcacacgagtgagaacatgatcatcttacctcagtgacagcatcaaatctccagcgttgataggtttgcaaatagactgtgaccatgagtgattcttccaaactgctttcaaaatctcaaactaacttcacattatgagcaaatataacccaagaaaagggtgatgaacctcactggttcagccaactgatttcaggacacattagctgtttttcatcagcttgatccaccatggattttgtttctctttccctaaacaggcaaaaaggttatatattagtttcgtattgctgtgtaacaagtttccacagacatagcgattggaaacaacactcgtttattatctcacagtttccatctgtcagaagtttagcacagctcagctgagctcttgaccttgcctgtccactgccacaaggctggaattaaggctgcggctggctgggctcttattgggagactctgggaagagtccacttccagcctcattgagggtgatagcaacatccagttccttgtgcccacagaactgaagtccctgttcctggtaggctgttgaccagtggtggttctcagcttctagaggccacctgcattccctgtcaagcagcagtgatgtggcagatccttctcctgcttcgaatctctgacttccttttctgctgc

SEQ ID NO: 89374 - DNA, 1062 bp, Homo sapiens
tcttcttgcccaagagcgccttgtcagccacggctttgactgctcatgcagtgtcttctctgaagtcactcccatgtgtcaggctcacttattctcatcgattctctcatggaagtgaggcccccttgcccctttctcatttttctctcccatgtactttcaggtttgtggcccgcaggtgtccaggatgcaggtgtaaatggacagtgtggcgacatcctcaccaacaaacggttcatgcttgacatgctgtatgcccataacaggaagtctccggatgatgaggagaagggggatggggaggctgggaggacccagcaggaggcagaggcggtagccagccttgctaccaggatatccaccctgcaggccaactctcagacccaggatgagagtgtcaggagggtggatgtcggctgtttggacaatcggggcagtgtgaaagcatttgctgagaaattcaacagtggggacctggggagaggttccatctcccctgatgctgagcccaatgacaaggtcccagaaacagcgccggtgcagccgaagacagagtctgattacatctgggaccagctcatggccaatccaagagagctcagaatccaagacatggatttcactgacctgggggaggaggatgacattgatgtcctagatgtggacctgggtcacagggaggcccctgggccacctcccccacccccacccacctttctgggtttgccgcccccaccccctccgcccctgttggacagcattcctccccctcctgtccctggtaatttattggttcctcctcctccagtgttcaacgctcctcagggcttagggtggtcccaggtacccaggggtcagcccacattcactaagaaaaagaagaccatccgtttgttctggaatgaagttcggccttttgactggccatgtaaaaacaaccgacgctgcagagaattcctgtggtcaaaactggaacccattaaggtggacacttccagactggagcacctgtttgagtctaaatccaaggaactgtctgtctcaaaggtactgctagtcttc

SEQ ID NO: 89375 - DNA, 2368 bp, Homo sapiens
gggctgaagagattcgttctgtataaaatactattttgcattgcttttgctatttggtaaaaagtccattggtatgaaaatttgatctttaatatagtgttccttctgccacatgctaggtgtaggctacatgagtcagagacccttattagctaacatggtcaccagcttacttatattaggcaaaggagctttcaaagaaccagatagccctgaggaaaagacaaaaatggtcaactaaggaatgtcagcatagcccaatagcagatattgatgttaactagagaaagtggacttgctgactcaccaaacacgggatatgcttatttaatcttaccttcattgactatgagtgatagtagtagtttgaactttatctgtaaccacccaataagctcaaaggcaataatccaactgacatttctttggcttggccctgatcaagccagcattctgcagctatctagttttccagcagccgtatatttggcatcctgtcaatattacacatgcctctagatttagtattttggataaatgtttgagagtcctatagccactgctgctgtgatagtaacaaagatgttataccacttttatcaatggaaacactgtacataaagttattgggcaccaaaggttaagtcatggttaatttacactgataaactgcaagatatgggatcacagattttatatctaattccctacattagtagagacttcttcgcctatcttagctgacttttaaaaacccattctggatattttccagttttaaaacaggtttaaggttatctcctcttttaaggtataaggggtaggagaaagcactttgtaaagcataatttagaataaacatgcaagagcttataatcatgaattaattttaactccctgcgttgctgcatgcatttatcatctttttgggtgagtatgaaactgtctgagtcaggtttccagcaatgccatttgggcaccaattctgtatcaaaattacatgcaggatcctcagaacaagtgagcccttcagacgaggagcacagtgacagagttagtgcctgtcactgctgtgggatgttgacaggccagccaggggagctgtagttgatcagcttcctttcaaaatgtgctgggattcttaagctgcttgctgcccttcactgattggtgtttaccccagtgtgtgtttctcactcactcatggcatgagtctaaatcatttccagcctcaggaatctcctcaagtcaaaattaaagctttctcatttacaaatctacaccgttaggatccagtgtaaaaaatcatgcccaatcagtcctgtccttcagttgaaagtagacccagcttttgtcctctccagaaaataacacctaagaaagggttgccagacacccactcttggtgtgtctgtgtcctgactttctaggactggtaccaagtggtgccgagccatccacatgccccgttccaattctttttttttttttttttttgaggcagagtcttgctctgtcgcccaggatggagtgcagtggtgtgatcttggctcactgcaacctccacctcccgggttcaagagattctcctgcctccgcctcctgagtagctgggattacaggtgcccactgctacacccagctaatttttgtatttttagtagagatggggtttcaccatgttggccaggctggtctcaaactctcaacctcaggtgatccacctgcctcagcctccccaagtgctaggattacaggagtgagccactgcgcctggcctcccccttccaattcttataggcagcctgacatttaggagaagaccagccacgattaagacagcagtctgtggttgctagaagttacccatgacctgacttgctgacaccaccttccaacctactgacctaattggacagaatattcctcctccccctccttctcctcctcctcctccttctcttcctccttcttcttctcctcctccttcttctcctcctgctccttctcctcctcctcctcttcctcctcctcttcctcctcctcttcctcccctcattgcccacttggctggctgcacctctaggcttttcgtggttcccgatcaggttgctgggaagaagctgccccttgactcagtattgggaggaataaaatggagtaaaagtatggaggtgaaggcactcctagcttcatttttacaagattaaaagtttcctcgagaaggcccaaaattaatgcttcacctacctccctccttctcttggtcccactgcagccaatttggtccgtgataatattctagcctcttttgtctcagcccaaagttccatgattgcctgaagcaggtagtgacctctagaacaat

SEQ ID NO: 89376 - DNA, 1484 bp, Homo sapiens
ggggtgcatcctctgatactagtaaaatactctttaaaaatgcaaaggggcaatatgatgtggcaacatttcaggaagccttaagcttaatgactactattaactatttaaatttttctttccacttcttttcctaactgcaacctgaatcctcactcttctttttccaaaacggaatgtctctgagggggaagttaggtctttttctttcccaggatgcctactgaaactaggttgtggtcactcttgcatgatggtcactcttttccaataaccattccaaatcaagtttgagtctttacttgcagattcttaaatacttttacttggaggtttaatttgttctatccgaaagcctgactcgggcatctcctctgcatgggcattttgccatctgtgtgcatcaaggattggtgtctcaccaaggatccacctgggtagacttgtggctctgcagtgcttatatccagccgagcctaaatatctggcttagcggttctagaaaatattcctattaccatgtgtgactttctgccccacggagtggctgagtttgcaggctcctgcctcctggggctgctggttctagaaagcggactcccaacccaggtagctgcccaccagctgaatctggggctgccgagaacaggcacagctcttcccgaagctttggcagttgacagtcgctgcctccccttctcaggaatcctgtgactcttctagccttgagtgctgtctgtttgaagcctcaccctagaggggctcacctgcatcttcctagaagctggacccagtccctgagttgccttaatgaccgccctcctgctccctttgagtttcctgctcgcctagacagcctctctttccacaaagggtaacctctgcctctccctcatcttggctgtgcacacccctgctccctctccctgcagtgttcttagccaagtcaaaaacaaaaacaaataaaagccttacatggcattcatcctgaagcttttctccggagactgtctttcctccaggggagaagggctactacgggcatgttggaggctcccggtagttggagctccgaaggaggagctctgccgtgggcgttcagcttaactaggctttctggaaccaaaacagagcctggctgcttcccaggcttctccctacacccttaaagaagcaaggtcctctctttccttgagcacttctggacatatttgggaaagcagcatgttcagagatggccctgccatggtttcccacacactatctcatgtccgcctttttgctgaccacccaaagatagttgttcctgttttcacatccagccaacccctagtctagcatcctgtacctggagcctgggctcaggcacctccttccatcatcacttcctccctgagagttcttggaacttgctgaggaagagggcagagctttggctaattgttcttttatcgacaaattaagacaaaaaacccaatgtcctg

SEQ ID NO: 89377 - DNA, 1050 bp, Homo sapiens
cgtgacctcatctaaacctaagtatctctaaaggccctacctccaaatatcatcactttgggggttagggcttcaacttatgaattttgaggggacataaacattcagcttataacacgtgcttgccaagctcccatcttttgctaattctgggctggctgcagagataggtgaagcccaggacctgcctctgaggaccacacaggccacctgggaagccacacataaaagggctttgagaatgccaggacacttcttattccctgctctccttctaggcctctaagctggttcgtcccctattcatcctcaccagtgcatgccctttcctttcttttccttggaaggctcctcttcattcatctaccaggcagctgcacagaggcctaagtgcacaggaaaggtggaggtgctctggtataaggggcatggaatgtttgaatggcaaggtgagggctttgagacagtacagctgtagatctggaggggctgacaggccaatggtgctgtattctccttattgatcctctcttctcagcatgtaaaccagctctctctgggcacgcaccatatgtatgaaggccaaccaagacattcggacacctcaaagcccacaagaaaggaattctgaaaggttttgattttgttttcactgcttctatggaaaaaacagatttttttttcttgcaaaatatcacattttcccaattgaaggaaaatccattttatttttgtatgtgtctgactcttgaagttctgttgctgacccaagcttggcagcatctcagaactaatccctgatactttctgtgctgaacagtagccagtccttctctgagctgaactggggccatttgttttcatctctaaataagtagtgagtgcttttaataatgaaatgcagaaaggacccaagatgatgcattaatcttggattctccttttttatcactaagaaaactgctgcagatggaaaaaggcaagagatcattgttctggattccaagaggagtaacgccatcaatattggtctgacggtgctgccccctc

SEQ ID NO: 89378 - DNA, 1077 bp, Homo sapiens
aatatagtatgtctctccatgtgtttattatttgtttctatcttcgattgctttcatcagcattttctagtttccagcataaagacacttaacaggatttgttagagttatacctatgcgtttcactgtaaatagcatttaaaaaaattttagtttattataaatgtatagataacgaactaataagatggatttttgtgtattgaccctatatcatacaacattgttaaactcacttctttgttttagaaattttttgtagattccttatagttttttatgcagacaattatgacatctgtgtgtatgagcaggtttttcctttccagtctgtatgccttttatttcttttatgtgcctggctaagatttccatatggtgttcaataggaatagtaggagtagacatgagaatttttactttaaaaaatgtaatcacaaaggaatttgagcgtaggagaatcataagtattctggtgcctttttgccttctctgccttccacaattgatttttaccagaaacaaatagaagtaaaaaggtatacttttttattagcttgtatttatggataccgtcatgattttttctgcaatcagacttaagtttagtattacttaaggtactatcatttctatgtaagttttgaaatacagttaaaatgattatatgtcacatgaacaaaagtcaatctgagttctttgaaaatgattcatttttataagcttttaaattaatgcaggagaagtgctacaaagcatatcttttttacatgtcttactctacttcctagggaatagggagctgttctctaatcttgtgttttgtttttcatctttctctcacctctcatctccctttcttgcctagaatgtcctatgtgtgtgagaccctgaaaatttgggtcaagttgcttcaagtatatttggtttatgacaatataacacctgtacatacctctactacctggttggaaaattataatatgaattttataacattgaagggacaggggagggtccatcactaagagaaaatatactatatcatctcctatttccagaaaattctaacgatga

SEQ ID NO: 89379 - DNA, 1549 bp, Homo sapiens
taccatagtttctctcttttcaaatgtatatctggatctttttcagacctttacttgtttgttgttactctccttgtttgtaaaatacatgcttaaataacatttccaatttatatgttaagtttggattccctgtgcatccaaaaacaatgctctagaaagtgtaggataaagaatcttgggttgtacttatgtataaaataggacccagaatgttaatctattagaatgaggtgaagtggttagctagctgcaggctgatggattctcccctcaaatcttcctgcatacagatcttgaatagttgttatattatactgtactgtcctatcctaatatcatatcatatatctaatatataatgtcaagtggtaataacagccaggaagaaaaaataagagtataaatggttaggtagtgacctgacacagggtggtcatggaaggcttctcggaggaggtggtattttgggcagagacctgtggaatgagtgagagccatccatgcagctgtcagtagggaaaacattctacacatggggaacagctggtactggataccttgtcaggcctgtggtcctaccctgtggagtggcctcctcacccctccccacaggccctgcaggctctcagttccttggcctctgtgtccctccagggctcctgcacactacacatggtgtctggggctctgaggtgggctttttcagggaataaccaggattccagtgtaactagagtcacaagagatgaagtcagagaggtgatagggctagtcgtccagggccttatttggaaatgctatatttagtttatccatgcattatatccatccaatgctatacttagtttatctttccatggacatttgggttgtttccactttcagctattgtgaataatgcttctatgaacttttgtgtagaaggttttgtgtgtacacatattttcatttctttttatgcaaatgagaaaaattgctaagtcatgtaataaactctgtttatctttttgaagaactgccagatcattttctatggctgctaaaccattttatcttcctaccagcactgtggaaagggtccaatttctccacatcctcaccaacatttgttctagcctgtctcttttattacagccatcctggtgggtgtatgtggtgtctccttgtggttctgatgtgtattccttagtgatgttgagcagcttttttcatgtatctcttggccgtgtgcatatctttttaggagaaatgtctattcaaatcctttgtccattttttatttgtctttttagtgttgcgttgtaagattcctttatatattctgacacaagtcccttattagacacatgacttgcaaatattttctcctatcttttagattgtctttttagtcttgataatatcctttgaaacacaaaagtttttaagtttaatgaagtccagtttatctactttggtcacttctgctttgggtatcatatctaagcacattaatccaaagtcatgaagatttctactttattttcttctaagagtcatgtagttt

SEQ ID NO: 89380 - DNA, 1032 bp, Homo sapiens
gtgtggcttgttggtttctttattattattattattattattattattattattattatttattttaagttctcacattggtttcttactgagagattttagacaagtaatttttatttcttaaaacggaagtcattgctattactgttttttccttgcagattccactcctttttactctttatgggccatccaccttatgcaattcgggaagtgaacataaacaaattctgcaggattattagtgaatttgcactagagtatcgcacaaccagggaaagggttttgcagcagaaacagaaacgggccaaccacagagagagaaataagaccagagggaagatgatcaccgatgtaagtttcacacaatccctctccttatgtcattcgttttcaaagtaagatcagtcaggaatcctccccacagttaaaagctgtgcttttttttttttttttttttttttttttgactataaaaaattatctcttttaaaaagtgctcttaaagtactcctccaccatttctgtgaaaatctgctaaataacaaggagctaggagatgtaaagttcagaacgtgtggctagaagaggaacatggaacccattttggtgtgttgcatgttgctgatgacattaaatgtttgattctatttttgtcctctgtgatgtgggtaaagttggatgaagacaagtaaaatataaaagataatgccgcttatcatagaaagacaaatgtactgattggggcattgattcagaattttaatcatcataacggtgctgtgtaaccaatcagttgacacatggaccacccattgtgggcatctgaataaactgatgtgattgctccaagatacaatctaatgggctcttgccagtcccttgaatcacaggacatcagggtggaaagagttcccagaggacagtgaatccagtaggagtttccccatagcaccctggggagcccctgcacacttacatgtctcccctgctcccgggctctttccccatctctcctgtctcagccccaag

SEQ ID NO: 89381 - DNA, 1825 bp, Homo sapiens
actcgtgaggtgggctgtgagaacccaggctggtcaatcccaggcctcccacgttggagggcagtggtaatcctgggtgagacccttaacccttctcaatgccagcttcctcttctatagaaagggaatgatgattacttttagggatgttgagcgggccaatattttatatatgtagcaccttgaacatgtgtgaatttctggaaaaatgccagccatcccaggttatataaataaactgtaagaattttttaaaagagagtaatggaacaggactgttgtctcttgtcacaatgccatttggatgaggcagcgtggaatgttacggactggaagtggtttgtcattttaacttccaaaagcatagttcattctcaaaacacttcaatctgatttgctggcctggccctgtaacctcacagacactcctaaattgaaagtgtgtttaatttatgatcaagagattgacatgacttttcactctcaatttatgttagaagagagatattttatttaaagtaacttaaagcagtttagtgctaaagtaattaaaagtatggagagtcagttcaggtggctcccatgagaaacaggtgagatgttaaaaataaattaatttcatgctcctgaggagagagtaatgtgaacacgctgctggagcagttgtctcacttgtcctggctggcctgcatatggaaggaccagcggtagcccagaaccagcagcctgggcagggagggatcctgcgctcgggatgggatgggagggccggcagctgacaggcagagccaagcaaatggaagccagtccacttagaggggccttgatgactgtcaggccgtgatgggttcataaggatgtggccagccaagccatatggttcacagagcaggacactctcagcacgatgcacagctgcgagtgacgttggtggtggtcagggaatcgagttagctgactgttacctcagggacagccccagaagattggcccggagccgtgtgagtccctctggtcatgggtgatcttggagttcacacaaggagtgtccagatgaggacaagagggtggggcctggcagctcccaactcaagaggatgtatcctggttgtggtgaccagtttatttacttggaattttatgtgacattgcgatgatctttttgctgacttctgtgccttctaagaatcccttctgtcttttccgtcctgtcctgtcctgtcctctcgggtagactgatgaggaggaggaagttgaggtatgaccatttatgaacatgaagaatgccacattttaccacctcatgtatgctctggtctaacctaacataatcagcatgaagtgtcagcaccattcagtgctttaaacaatgcatggacatttttctggttggttttcgtgtgatcactaaccacctgacaggggctctcatcatgccacgtttgccagggactgaagggttaaatgcattttccgagctgtccctgaggcccagctaatcagtaaccatgtcacaagtggcaggtttagcaggtctctccctgctgctggaaaagtggacagagaattttcctttggcaacttaaatatgagaactagattctggaataaccacatgaagagtcctgaaatcaaagaggaagtggggcagtggccaagggccaggctagagtctctgtccccagccagtaggcagcctctgatgtgtgaccatttcctctgctggtgttaatggctcccatgggccaacgtccatgcagtggcagatggcaggggctcttccctagaccctggatgcaggtgcgagaaccagagaccaaggggg

SEQ ID NO: 89382 - DNA, 1064 bp, Homo sapiens
acacagtgggtcaaatacaatttgtaaattaaggaaaatgtaattagccaccctttcaaatgaagacttgtcttgggtgaggcagctacctcctcattcacccttatccagcctttattttgatgttgaaattgaaatactaaacaatgggaataccatcatgccaagctaaacacaagccaattctaagtcagttaaatatgagcatccctccagttgccaactgcaaccccccagtgagagtggtcattggccattcttgagtcttgtgtgttccatagaaaacagccaccaattccagccagaataagtttggcagtttgctccttagcctccattcctcgaggagccactggttattttaattattgtctctagaggccttttagtgagttgaggctaagacccacagtactcatggagagatttgtcctcactgctgccccttgccctggcttcatgcacttgctctgtgggtcttgagcatgtccccagctattgttggtcgtctgttggatttgtgaggttgttgggtcttgtggaacccctcgctgtgcactggttgcctcacctcatttgtattagtggagcttgcattttcccctgctctggaatcaccttcccagctctgatacactcctcatactgggtagatgctgaggtctctcctgccctctgcacttctgcagttcacccccttctcagaagcctcgtgagggtgagcctctcctcctttctctcctctttataagtgcccgcatcactcctctcggccctccaaatcagcacctgtggcattgttaggccagcctgtgtagccccaaacttttgtcctggcagacagactgcagggcacttcagcaagagcaggaaggtacagagtgtgaaccctctggcttctctggaagtccctggggagaaggggggactggagtcttgactgccctgtgccttgctgctcatacttccttttcttctcatccctttgggtgtgacctgcaccaccactgcagtgcgaagaaccctgaagagcggcctgaccccagaagaagccagagccctgg

SEQ ID NO: 89383 - DNA, 1005 bp, Homo sapiens
atcaccagtgacattgtagctgtcataatgtcatagtgcactgcattactcacgtgtttgtggtgatgctggtgtaaacaatttatgctgccagatgtataaaagtgcacagtaatgtcccaggccttcacattgactcaccactcacctgcccagagcagcttccagtcctgcaagctccattcataataagtgccctatagaggggcaccttttatctttgatactgtatttttactctaccttttctatgtttaggtatatttacaaacacaaataccgctgttacaactgcctacagtattcagtcagtgacatgttcttacggatttgtggcttaggagcaacagactgtatcatatagcctaggtacataataggctgtaccatctaggtttgtgtaagtatagtctataatatctgcacaatgatgaaactgcctaacaacacatttctcagcacatatccccatcattacgtgatgcatgactatactaagcatgcgattctgaggctctctgtacacaaagctttacatttccattttgttttggtgatttagtaaattttttgagaaaatgaattttgacataagaggccaatgagtgagttgtggaatagttcagatttgtaaactgctgctctcatttttgcttccatatcaggatggggcaaaacaaaccacacaggtaaggtgatagatgttaggttaacaacagctaacacgtcctgtaacaaggacttaggcccaattataaaaggagtttcaaagagcacactgttgatgttactcactctattaacaaaatacagcccaaaggatctgaaggccgttccaagcgagggtgcttctgaggacactgagaagagttttgccattctgaagaggcgagcctgtggaactgtttaaggtcctgttcccagaagaataaaagtttctcattatggcattaaactctatttatttagtatttgaaacatggtgtacatgtatgtatttgtata

SEQ ID NO: 89384 - DNA, 1347 bp, Homo sapiens
aactcttggaagcccaccctgttctaagcaggagactgcttgtcctaaggatggccagggaccaggcaaagtgaggctggacaactcagagctgtgaagaggcaggcagagcaggtggaaagcttctgttaacagtgtctggcaccattaaaactctttctttatgaagagttgtgcaaaacaatgtttgggaattttttgtttttaaatggtaagaataaagtatagcagaagtacaccttctttaaaaagttaataaggaagataattgtggaacgtgtacaaacatcataacacaaaactggaagcaagaaacttcactggaaactgatgaggaagacaaactttataggaagctgcaaaagaaatgagcagagcgagatatttgtggtaagggatacaaagaacatacaattgtgtacttgagaggtttcatggaacattatgacccatccaatgaagacatcaacattaacaacaaaaattaattgaggaagagcagtatgaaaatattctaatgcagtgctgtccaacagaactttctgtggtgatggaaatgttccatatctttgtgctaatacagaatctaccagccacatgaatactcaaaatgtggctaatgcaattgaagaaatgaatttttcatacaatttactttaaatttaaatagtcatatgtgactagtggctcctgaatgaacaatgcagttctaatgcttcatgggtcaaaaccagtggtttctttgggggacctctctaatcaatcagtgctaagggattgagggttgagtgttgaagaagaggaaagcactcagacttatttgggcacttacacaagattccaaattccccattgcttccagaggcaggggacagcacaacctgctctggaggcctcactacgagcctggctaatgtcggtgggactaaaagccttacaattttggtcattcaactagaaagaggcctacggtccacacgcaaaactggaggtcacccctagggccatctgtgcatggaaaccaccactctggagctggtagggagttggagggaggggtgctcacttccgggtggggtttccagagccagaggaggatttagaagtggaggaagtggagggaccggagggtcctgagggccctttctggccacctgcaggctgcacaggccctttcttttttgggattacgatcttgttcttgctcttaaacactttgctgggatctagcttattcacaaaggagtcggtctcttctgtgagcaggtttgtgttgtaggtgataggtttatacatgctgaaccattgctgtaaggcagaattggaagacaaggtcacaattcaaag

SEQ ID NO: 89385 - DNA, 1037 bp, Homo sapiens
ctggggtctgaagtgctgttagggggctaggtggcagctgctgcttgagggcagagaggcttttaatttcccatcaggggtctttggtctagtaattcaggtttttattgctgttaattggcctagatatagaagtataaaagataatgtgttttctggatgcttatctagtacatgaacttgctgtaggagtctattaacaaaatgcctatttcttttagtttttactcccatattctaatctcatcaactatttggcaataactcacaaatgaagatggataaaaggactaataattagcccaaagggtgatgctcagagagaaccaaaggggtttttgggtttgggacacacaaggaacctgggagcatctcaagaggccaaggaggtatgtgtctcctgagccatggctgacaagcaaggtcaggcaagaccctagccaaactacgggaccacgcttgtaaacaattcttacctggtttcccacttttgtagacaaggcaaactttcccactgccattgcatgaatccagctcaaatatcacactgcgagagtcaaagtgaggcttctctggctgatcatcactggctgcaaacccagaagttaatggtaatgttcaaacaaactcaactcaaacacatacctatatatccaactttgctaggtggaaaaaacagaaggaaaaagccttatctcagacatatacttaagtagtatttacaaataaattctgtatttgaattaaagccctaatctcattcatggactaggccttctgtctgggtttctctatcagcaacagacaatgtcagggaatctgggaaaaggaggcatgagaaagcaaacttcttggaagtgggaccacagagcaatctgaatggcttgatgctgacataacttcatttcctttcctgagattgtttattctataaaagtgggatagcaaacacattatctgaatctttctttcttttttttttttttgagatggagtctcactctgttgcctaggctggagtgcaatggcataatctc

SEQ ID NO: 89386 - DNA, 1024 bp, Homo sapiens
tcagccatttgcgccacttgacaagaaaacagattaaagtgcctgatatggttttcagtaatctatggatgtctccttaataatctgtatatgctcaggaaacttttttgcttgttttagccatgctaataaaagaatagaatacgaatgtgagtctgaatttatgggctaatgaaagacagaagccacaaagagaaattaggggtatagtgaattatttagcttgtagaagagagtgctaagggatgagttgatatatgggtttaaagtaaatgaaggggtttccctgaggtgtccagaattgatttacatttgcagaaggataagtggaatattgattgatctttctaggaggtattaggatagaaagaattctttttgtacaagattgcaaaattaagtgacctcagaaggtctttttcaataaaattaatgaattgtttgcatagctggggaaagcagtgtcatttttgaagacttgaaaaatgaatggctttgcaaaatactatagtttgtgctgaaagacgctgataattctctatacatgcatttgcattttgttactgagactttttaagatagggagaggtaccatagactaccgcacagattgtactgtagacctggtctttaaaggaaaaaagtttcaaagttttagaacaatgttggccacaattgcaatttttgatgtatatgagctatgttctaagaagccttaaaaaaaccatccagtatttcatgtcctaagcccatactgtcaagtattgcattgttccccagtgaatacttgggcactaactcatttgaggacatggttcttttttagacccagatacattgatttttcccagaggacagtttgctatttgtacttgacatttctcagaagaaaaatagaaagtgtagcaccattactttcccgttgtaaaatgaataaatcattattattttatatttattctggtctttatttttttaaactgatcgtaacttttttgttgaaattaaatgtacattgattgcg

SEQ ID NO: 89387 - DNA, 2412 bp, Homo sapiens
aatgctgggtattggtaccaggaaaaagtaaaattgcctatgtatatttagtaaaatatttaaagtacatattttgtttattttattaataggatttaaataaacttatacaaaatgtaaatcaaaatcaattgattgtacctgttttggtaacaaaaaaatgaaacccatgttttaaaaatcggaatatatttctgtcctggattataatttggcacctgcatcctttgtaggactttgcatatttaagatatctctgatgattgaaaacatttttaatgtaaaaattgcatggatcttttattacagaggtgaaaaagattgccttatgagagattaagttttttaaaaagcaacaacaaaacagaacagagtgttcctgaagaattcggcatacctttggaagaagtctggttttgtaaactgcagctgtaggcacatatttaattttattctgatagatgttaaaggtttttttttttttatttcagagtaagtgaggaaaaggaagtgacagaggaaagactgaaagctgagcaggagtcatttgagaagaagatcaggcagttggaagaacagaatgaactgatcatcaaagaaagggaagatatccttttgaaagttctcttttttaacgttcaagaagtttgactatttctttttttttttgagacgaaatctcgctcttgtcgcctaggctgcagtgcaatggtgcgatttcagttcaccgcaacctccacctcccggttcaagcgattctcctacctcagcctcccgagtagctgggattacaggcacccaccaccaggcccagctaattttcgtatttttagtagagacggggtttcaccttgttggccaggctggtcttgaactcctgacctcaggtgatctgcctgccttggcctcccaaagtgctaggattacaggtgtgagccaccgtgcctggccagaagtttgactatttcatgaagacaatgtaaactccagagaaataattgttctaatttgtaacagggagtaaatctgcatgtgctgccatttctaggcaatcagaacgtcacttaacaatatgtgctatagcttcctttgtgcctgataaggccatccagctgttctgctgctgctgttaggctgctaagcacatacttgtcaactaaaaaggacaagaagaaatttgggcattgaagtgtagtgttggaactttattaaattctgttgcactgctgtaattgagctggaacctccttgtatttggtattctttctagttaaagctttgacagtcctaggaattctgctctgaaatcataaaaattaaaaaaaaattgtttttactgtatagatgttgtaattggtaagtgtttacacggcagcataatgctgccaaatccttcttatggagcagaaaactattgggtttagacctagaggggtgtgtgtgtgtgtgtgtgtttgtgtgtgtgtgtctatagcattatttgtaagaagataaagtaaaaacatattttaggggtgtgttaaaataagctatttctgaattttcttttgaataggtagaattacttatctttgggtattgtatgcagcaatatggatgtagaagagaagtccctaaagttagagtgatggatctgccagctaaactagtgtgtgaatgcgtgaaaccaccattgtttttattggcggtatcatcattaacttgattgttaataattgtttcaaagattctgcaaatgtcgaaaatggtcttgtattgacagtaactatgcctttgtgaataccagagaaatggaagcataaagataaattacaataattagcttgaaaaatacaagactgtagctataaaaacagagtcctgaacttttattttccaagcagtgggagttcatgataggaaattaatacaatcagaattctcagaattgatttgctgagtataacatgaataaggcttgttggcctcacaagtctagatgagtgctttttcaattattaattttttctacatctctagcatttggataatcatctccaactttctcttttttttttttttttggcccactttgacttcattgcccttggttgttgaccctcaagatagtcttctgtgtttttcttcctgctacttttttctctagatttaaaggaatgctgtttagtcagaattcataacaaagtgctcagccagttttatttactcttctacttgaggagtagtactccaggtcctagcattttttagaaatggtaggttaggaatgctttcatttgcaacaaaaattcaatttacaggctcctttatttctcacataacaagtactctggagattatggagattcagtggtttaacattttcagtgctggcagctttacaattctctcaggtttttttaatggttgctc

SEQ ID NO: 89388 - DNA, 1056 bp, Homo sapiens
gcataaaaagtggatgtgaagacatatttgatatatatctttcaaatgttatcttttatttcagatgttatcttctatttgaagatttttgttgttttgcctttagagtcctcattcagatttctgttgcctgaaaagtaactagctttctggtttttgaaaagataatatgctttttgaagcaaaaagtttttttgattatttgaggagcatcccttttaattttctgaagcagttgtaaggatgtttgttgctaaaaataagtcagctaggaattgctaaagagtcttagcatcatgtgttctgacaaggcatagaagagatctcaaggaaaataatgcagaaatcaagctgagaaggctctgattagatggaaccaacttgagaatgttttatgaaactatatcaggatcaatcttccttgcacagataacaggaaaggccaaagtgacagtattcaaaaaaagatatatgtttatttcttattcatataaaactcatctgctgccagcaattttaggctggtatagtgacgccgcagattatagggagccacacttttttaaagtcttggcatttcaagcttcaccatgatttgcaattctagtcagcagaacagagtctgttaattttggaaagtttgttctaactttgattttaattttgtttttccattgttgaacttaaaaacacaattaagttttgtatgttgattttatatcttttgaccttgctaaattctcacttattaattctaatagttgctttacacatttcttaggattttatttgcagtcgtgtcatctgcaaatgaaaataattttagttcttttaaatctttatgccctttatttgtttttcttgccttcttgcaacacctccaattaggtattaactggaagtgatgagaagagaacatcttcatcttgttctgtatctcaggaagaaatacatatttcatctttaagtttgatgtcacctgtgggtttttgggttttggtagatgccttttatatcccattgaataatttctcttttactcttagtttgccaaga

SEQ ID NO: 89389 - DNA, 1685 bp, Homo sapiens
cacttggtgggggaggcatgtcaaatgtgacagcagaactaatgtggaaggatagatttatggcaaaactctctgccttttggagcactatcagcttgtccatgtgcactattagcttttgtttctccaacacttgtggatgcttttgtgaatgctgtcagtcagatgtctggaaaattttaaacaagaaccaccaactaaagaattgttttgagagttgattcagatctttttggcagtgagacagtgaacatgaagtcactgccagtttttggtctttgtggaccttttcctttcttatgtctgacagctcagggcggcattttactattgactcttaatggacctgcagtgctatagctgagtctgcacagttcaaaatgcaaggttggcagtctagaaagattgggtaaagaagcagctttgagaggagttcctgccccaaattacttgctaaaaatatgttagaactgatatagcataaaactgatacagcataaaaggattatttggatagaagtgttatttggcttaacaggtcaggaggcaacataatttttgcagtgacttctgtttcttgaggagttgccaggcaagaaatatgataaggattttgaagaaactactatagaggtggagtttcatagctgtttatttttattccagatttttcatttttttctctataatctcttaaaatggtctgagattagcacttttcacagttgttgaatcttctgaactatcatgttggaaacattggatgtgctcttctatctagggaaaaatgtagccttcatttttgccacatgtgttgccagaccggacatcatatgaaagttgcaaaaaaaaaaattctgaaaatccagcctcacttagaagtgaggcaatattttcatctctttataaagctatttgtgattgcgttcttcaccaacaatttttttttgctggaggggtggtggtaggggcagtttgccacaaagctgaagaaacgcattctgtcaccaaaaaataccatttacattttttctccctttacagatttcttctttttctggaaaaaagtttaacatttaaatgaaaatttcatttgcctttttagtattaacgtgccgtgatatttagtctaacaacttgtccctgaatatctctgttgctgtaacactttaccaccttcaagacagcaaaggaggtgtgttttaagtgctatgccactggttttcaatccttgacctcagaggaaaaaataattctacattatgttttatgacagcttctctgtatgttttttgtaaagttaaatattctagacaaagtcaggtattatccataagatatcaaacaattgggagaactttacctgcttggttatatttatttcctcttttataaccagggaaacacaattaccacctcttttttagagatgatgaaagtgcttagaaataaagctccagcacccttaaatgcctgagctccacctattctacaaggctgtggggactctttggcatcctctgtgttgcatcttttcactgaaactttaatttgaatatttgatttttcaccaaatgtattttctttattttttccattgttaggataattacccttagaattctgtagcttctggagatatttacaaatatatatctgttaatctttccttaactctatgccta

SEQ ID NO: 89390 - DNA, 1083 bp, Homo sapiens
gttttatgattttcggggagaaatacatgtaacttttatctgaagactttatacttatgactctcgccaaatatgattgcatttctggttctgttttgtttattggaatatgaaaagcagcattgatggatgcagtttgaatcaatttttcagtttttttcccttaatttgcaatctcacctcttcagctacagtatagagaatgccaagaacttctaagcctgtatcagaaatatttatcagaacaacaggagaagctcaccatgtctctctcagaacttggtgctgctagaatgcaggaacagcaggtaagcatctttaattttacttttcttgtcttcagtggatcagcaagatgtcagaagagccatttgttttttatcttaatttcctcccagtatataatattgttttaaaacatgtagccactgcgtgtgattgagttgatgtctttccctccccctttcctttctcctcctgttcctggacccaaaggtaaggaatgattacttgaagcagtctgtgtgggtcagtggggaagcttctggttgtatgaaagcacagccagaagggtaaagaaaacactgctctgttacttaatgaagatcaggtgggctgtttgttactcattgtccttatggaaatcacaaataagcctttcttaattcatgtttattttttagaataatgaaagttaattgtggacttataaaaactttaattggagaatattaggatattttgcatatgcttgcatacatatattaatcacataagtatgtaggagagtatttatataagcgtttgtacacttatcaccaaatggtatgtattatatacttaaatgaatgctcagaaccctgccagatgtgatgtgaaataagccctaaagacccacttctggttgggggatttccgtttcctagccaagggaagccattacagactgtatctggaaaaacaggacacttccacccaaatactgggcttttcccacagtcttagcaaccagcagaccaggggattctctcctgtgtctggctgggtgggtgtcatgcccacggagccttgctcactgctaac

SEQ ID NO: 89391 - DNA, 1048 bp, Homo sapiens
aagtatttagttcatatgcttagaaggtaatctaccttgatgatcttctagcaaaatctgccagcagaggagagttaattgcatgggggaaaatgaacatttatttgggatgagactttggcaaaccacacagtgcagctgttgcatcacatattttctgtcaacttgacgactggtccatatatgcctagtgttaaaaatgcatcatgtcattctgtgccttcttttacattaactccagatgctctgggagatacaacgacctggcccacacagtagtttaggtttagaaatatttatttaggtcttgaaatactgacttctcaatagaataaagagcagagagggaaattttgaagttacaaaactgagatttattcattcttataaggctgtaagtgggaatatgaggattgttatagggtgcttatcaggataggaaattattatttatcattagagaatgaatagcaataagacctgttggtactattgagtaatcctgtggtgaacaactcataaatgcattggaagtaatcacatcctaaacatctaaagttaataacaacctgttataagaaattattactgcagtttagttcacctctttatgagactgaccaggcctataaaaatgatttacagaaacttatagaacatcactgtttacttgttgatgggatttcacaaagtaatactgcaattgttttttgacatgtgagaacgtgagaaaatcctggcttatcataagaatagtatgtgatttttggtatgtgttcatatatgtgcttatgtacatgtgtatgtgtgcatacatgtatacaagatcatatacatatttataaataggcattgttttctatgcagtctttaaaacattgtatttttaaaattatcttaaagatttagaaaatatttttctaactcagaaatttatttatcttcaatattagaaaatccttcattgtatccaaaccaagtctctcacaggttttttttttaatccttgttcttttgtcattagtttcttttatctagtcattagcct

SEQ ID NO: 89392 - DNA, 1040 bp, Homo sapiens
tctcttcattctcatttaaatagaaatcctttagcattactacagtcattcaattaaaatcttaatcactgtaatacccttcattcttttatcataggataagaaacatgatgttgctgtgtatctctgttagttgatactttttacccatcagtccatcatttgcaactattgcgaaataaattggtgggatttttctccccttatactagggatctcatttattctcattcatttgttttatgtctgtggagtagctagctatttcaattgttttaaattactttttatttaaaaataggcatggtagactgaaagtacccccccccccaaatatgaccatgtcttaattcccgaatgtcacgttatgtgtcacaagggactttgtaatgcaagagactttgcagatgtgattaaggctctcgagagggggaaattaactgtattacccaggtaggcccaatcaaatccaagcggtccttctaagaaggagcagaaggagtcagaggagaaggcagtgtgtgatgatgatggaagcaggagttggagtgacacaccgtgaagatggaggaagggctataaaagtgagaaatacaggtggccactagaagctaaaaaaggcaaggaagctgattctgtcttcagagccaaaggaactagccctcccaacgtcttgacttcagcccagtgaaacagatttctaatttctgacttccagaattgtaagataatacatttgtgttattttaagccacaaagtttgtgctaagttgttatagccacagtaggaaactaatacagtagttgtaatatatttgtttactgaaaaactcatatttctcttgcagcattgagcaaataagcttccccatagcatgcaaataattgtgtgtgaaaagtgagactatttcagaggatatggatagaagattaagaatttttgcttgtttggttaatataagtgttcaatacacagaagattttttggatttgtttgaatagaaatagaaaatggcaagaaagtacagtgttaacataag

SEQ ID NO: 89393 - DNA, 1951 bp, Homo sapiens
cagggaatttcacttcaactaaattcatgaattaatatctgctatacacaagctgttgtttatagtgctcaggatgttcaggaaaaatattgggaaggcaatctaattgaataccaaatgagtagcacagaattgttatagtagttcagaatcttgggacgagcttgtcattttagaataaatttggcatgacattggcatttacttaaattgtaattaatgattcattctgccaccttgttactacatgattgccgataacaactttcgaaagggtattatttttgtgagtcactttccagactgatcagagaagatttatccagaatattattcatgattgtgccaagaaccaccttaaatcatttttggagcaaagtagtgtatgtataatgaataaaaatcaaggctaatgataaatatttacctttgtctcccactctaacaatatgccttaatacatgtactctctacctaactgtaataaaattcagtgttcaccagtgaaaaacgtgtcaccttgagagagttatgtgcctggcccagccctcactttagtaatttataaataggtaatggtaaaagtaactacattatagagtggttgtgaggatcagtacaatagtatatataaaatgtactccttgaaggtagttgctgtcatcaagatcatcactactgctgtagaggctactgtgactgatattattgctgccattttttcacttttctcataattccctgatttgggcattttgcatctacatttacctacctatgtgtcaccaccaaatattagtcttaagctgtaagctcctgaagggaattaatccatgtactttgtacattaattccaaccagttagttggaattataggcatgtcttttgacaatgatgaaaatgacaatattgttttaataatgtttttacacttcagagtttgatttcatagttaaagaatatacttttacagataaccagagaacatttcttaaaagccgagagaataagtgtcacatatttgataccagtgattaacactcaactcccggtagaaaaccttttggctgagtttttccatggctttccctcctcagtacatgtcagtgtagggctaagtaagcattgatggatacagtgtcttccagttcttttggaagaattcatctttgactcagggaaaatatgttggttagtgagctgtacccctaattctttgaaatgtcagtatgagaagtgggtgcttcccatataaatgttggtcagggtcagtgataattagagttactagaattcacattgagacactggtgatcgcagtacacttgcttacaatgaatagagggaagaattaactttctgcggcagagatttaaagtgctcctattgaagtatctataattttgaatttttaaatgatattctaaccaacttaatcttccctacctttcctttaaagaaaatttaagttactatgaaatcaatttgtgtttgtttatgtatatttaagaattactcatttatttttgactaagttttaattggaaaataatttctggggatctagctgaaagagcatggttttccaaaatttatcattcaggttatcaggcttcacaagattagaaattttttaaattaatttttacaggttaaaagctcaggctctgtttaagtcgagagaactggttgctgaaaaacagcttactaaaccccaagaactcaaactggatatgaatggcagtgactctggaccaaggtaaacctgaagtctcagttaaaacaagaatcttaagggcataaatatttaggatacgtttggtatacttttatagctctatgttgattaatacagttttgtgaccatatgaatacgtacattcctgttatacaattttgaaaaatatagaaaaatatgaaaaacaaaataaaaatcattcataatcctac

SEQ ID NO: 89394 - DNA, 1487 bp, Homo sapiens
ggttccctgtgacttccctgttgaattccagtgcttctctccaagaagctctatttgacacttagttatttatttactgttttgatccttctttgtagaggaagtgagttctgggtgactctaggtattcattttgaactattcttttgtgttttgttttccctgattagttgcagaaggttttatatacttattatttggatttacctttctgagagttgcctatttaaggtagtttatcttattgattcaagagaacgtctatattctggatgtattacttcgtattcatcatcttctgatgatttcttattataccttcaattgaggctatttcaagtttatcagcatcctcctccccgatgttctcctcattgccatctttcttaggagatgacttcctttcatacttaactgagaaagattgagatttaaaaaattagtgctccagtcaaagagatggacatgctctaaggtctaggggcatctgggcatgtatgacctaaatttaaataattatgacaaaaatataagactatacacttgcttccaaaaaaatgtcctaaatgcctctgagaagaccatatacctttcaaaatcatacattataaggatttcaagaaactctggcaagtgcttccaagtctgacagtcattggtaagccaagaattctcacacagcagtccttaattatttcatctaatgtgaggttgaaagaagtaaagacaatgaatttaatgtctatttgattccacttgctatggaaatgatgttgtctccactaacaccaggaacagttagagataagtcaggggagaatactatagagccttgagaagcctttgtagaattattaaacaaaaatgcccactaattttagaaaatacaatcaagaatggttacgagaatgatccatttactttgtaccttgcaggctctttggctttaacactagaactccctaaataaaatttaatttcaagcaaattttatttatttggatatttaaattatcttagtattaaaaatactgtttttaaaatattaaacttaagtgaggcattaagaatttgggactaaaataaatgagataatgagaaagtgaaaactttttttataattaacagttcattttgagttaattatagacaattaccaaaatctaattgcaatttatttcctattgtctgtgggaagaatcccaggcaagggaatttacattgctgccttcctgcataaatgctaaagaatgaaaataaataataagtgaggccttaatgacaaataagagcaaatggtagggcacagctgagccaaaccattggaagataattatcacatgaaagatggtaatgatttcaaaagtcataagttgtttctaagtcctccggtttcttttttagttagtttgtttgatgctaatttattgcttacacaaagatgacccttaaaaatgaacagttttgtaattttgcatactccaata

SEQ ID NO: 89395 - DNA, 1076 bp, Homo sapiens
agtgggaactaggagcaactgccaatggatatgaagtttcttttaggggcattagaaattaggttttaaggatgattgcacaactgtcaactaaaaatcacttttttttttttttttgagacagtctcgctctgtcacccaggctggagtgcagtggcgagatcttggctcactgcaacttctgcctctcaagttcaagcagttctcctgccacagcctcccgaatagctggaactacaggcgtgccccaccacgcctggctcctttttgtatttttgatagagactgggtttcaccatgttggccaggctggtctcgaactcctgacctcaagcctggcttggcctcccaaagttctgggattacaggcataagccactgcacctggcctaaaaatcactctaaatgggtgaatttcatggtatataaattatatctcactaatgctttttaaaaattgttccctgtgtttcgtattgttcaaaatccaaaacgaattaagtgtcactaagaacaaaataatgttacaaagctttgcttacttttagagtacataagcttttccccttttctcctcaagattttcctgccacttaccccttacactagttgggaatcgctttttaaaaactgaattcttggccaggtgcagtagctcatgcttgtaattccaacatttagggaggccgatgcgggcagatcacttgaggccaggagttcaagaccattctggccaacatggtgaaaccccatctctactaaaaatacaaaaataccaggcatggtggtgcacacctgtaatcccagctactcaggaggctgagacaggagaatggcttgagctcaggcagaggctgaagtgggccggggtcatgccactgtactccagcctggacaacagagtgagactctgtcttaaaaaacaaacaaacaaacaaaactgaattatctaagatggcttatcagaatccctttctgtattcataatagatatgataaaacaaatgagaataaatactatctaaatcctctttatgagacctatgtcctggtgactagtaatactatttttaaaa

SEQ ID NO: 89396 - DNA, 1041 bp, Homo sapiens
atagcttccatttgcttttctaactgcattgaaatagtttctttacattgattttgggattcagcacaactggatacacttaggatgaacaaacaaacacaaaaatttaacaaacattcttttatttgtggaattttctggatagataggatgggcaaaagtttatgtgaagatagatgaaaagaaataattactgtttctgagcatacattttgtttataaagtgtctgagaacatggttgcaatcttattggcttatggcggtttgttttaggtggttgccgtctcagaagaacttgcaattacatatgaaagagtgctaatttttaataatcctacagaaaaaagtttacattgaactcaactatatttgtttttcacattgctcctgtagtgaagaggattgatttctgcattacttttgcaatttggcattgtgtcctttggtacttggtgtgtgcaagccttaatcctttaaccgtgaacctgagccctgggctatttgatggaaagactttctttgttacgtggtatggtggagtattgtattagtctgagtcaacttgagaaaaagaaccagtaggagatatatattataagatatattgcaaggaatttgcttacacagctgtccatgctggctaggcatgtctgaatccataggcaggctatcaagaagatcaggctggaacttaggaacaggctgaagctgctatccacagggagaatttttcatttttcaggaaagcctcaggtctgcctttaaggcttttcaagaaattaaacagacccatcctgattacctaggattttatggactttaatcacatctacagaataccttcacagcaacccttagattagtgtttgattgggtaactgggaactttagtccagccaagttgacacataaagaagaccatcatagcccataacttgtcaacttggcactcatacacatcatcttaagccatacttaaccttcaaataaaaacattaaaaatgattattggaggttccaaaatggccaaataggaaaag

SEQ ID NO: 89397 - DNA, 1046 bp, Homo sapiens
catgtaaattatatataactgttaacattaaggtagcatgattgatttaaactagtcacactcgggggtaactagagactctcattttatccttattcatactctgaggcttttcatactgttggagggttctggggtcaaatgaatgccagggcatacatagcccatacaaaagacaagaaatccaggattttacagctcaaagctggctgctctattatgtgtccttttaagtgttttcttaaaatctctttaaaatgctattaatttatttttgccctgctttctattatattcttatttacttttagtggatgatggttttattaataggacccaatggcaaaaaaaaaaggagagatttcagaattgctgtttatttacccaaagctgccttctatctatgtccaagggccatttttgaggcccctgtgatggaatatggtgggtatatactcatggtcatattgtgtatccgaaaacaaaaggtcttgtagcatgctttatttagaatttttatagaaatttctttgattctacatgttactttatcagcttgattgttgttatcgagtgtaataacaaaagccctacagagagatttttggtactgcttgttccaaggagacaaggaatcctcttgctggttgctttatttagtagtcaaaacataaaacattattctgtaaatgccagagaatgggttatttttgtaatgcacattggtcaggtgaggtttacgtccatctattgcatgggcagaagagaagggccaattggaattggaactcctggtaaattatcaaggagcatattgggaggtaagttgacttttcttcagtaaatggggaatatgcattcccttaaggtaaattacatagtctgatttagggaactttggatggtatttttaaagtttatcacaagacttttattgataatataggaatagggctccttttcaaactgctattatcagtggtaagggctggaagatttcttactttacctttgactgaaatgttaagagttgcctttagttaact

SEQ ID NO: 89398 - DNA, 1057 bp, Homo sapiens
ctatgtactagatattgctcttaagccttttaaatgttttctcatttaatagtaacataaataatgataataatggaagccagcatttaggtagtgtatatgtgctgagcattcttttatacatcttatattaattcgtttaatcctcacaacaactctgtgagttacatactattaataagttgttttatagatgaggaaatgaggcccagagaggttaagtaacttggttaagaaattacatctatcagaacttagaaatagctatagaatagccagttctgtctgacaccaaagctaatgttcttaaccactctgctgcccttagtgctcctcggggtgagactcttctctttcctacaccacacatctaagttacatctttctatctattgttgtccagagaccattattctacccagtacatctaagggatttggcataagtaaattaatcactatgatggtcacattttttgaagccaggaaccatgccagtgtctttgcataataaatactagtaaattattattcctttttactgacttttcttacctcactcccttcatgaccccgcccccattctcctcttcttgcaagcttcctgtttttgttacctgcttcatgtagcactttgcatactgccatcgtaacacctgccacattatgtattcattgtttagttgcctatttcttcctttttacctgtaaatgtccaaaggtagtcatttactcctttgtgtacctccatgcctgaatacagaaccgacacatagtaggctgtcagataatattattggatatatggaaataaaatttatattgataattttggagttggaaggcagaaagatttgacagtacatggaatatttcatgtatgaaattttgttcttttttttttttttttttttttttttgagacgaagtctcgctgtgtcgcccaggctggagtgcagtggcacgatcttggctcactgcaagctccgcctcccgggttcacgccattctcctgcctcagcctccctggtagctgaaaatacaggtgcccgccacca

SEQ ID NO: 89399 - DNA, 1067 bp, Homo sapiens
agtgaagtggcatgatcttggcttactgcaacctccgcctcccaggctcaagcaattctcgtgcctcatcctctgcactagctgggattacaggcatgtgccaccacagttggccaatttttgtatttttagtagcaatgggattttgccgtgttggtcaggctggtctcgaactcctggcctcaagtaatctccctgccctggcttcccaaagtgctgggattacaggtgtgagccaccatgcccggcctacttagatatttttaaatttaactcagcaatgccatatagtttccagtttaccagtcttacacattttttgtggaatttaatgatatagaaagactattggtttttgaagacttagtttatatattgcaatttgttaaatggatgtagtctaccagtgtttaagtttttgtagattccttaggatattgaaattcacaatctcattgcctgtgaataataacagctttattgatgcctttccaagctttatgcctttttttctttcttttttttttttttttttttttgcttattttattgtctaagactttcaaaacaatatgaaagtgttaaagaagacatccttatattgttcccaatcttagggaaaaggcattcagtaattaaccagtaagtaaaatgttaaatacaagtttttggtagctgtcctctataaaattgaaataagtttccttttattcctagtttactgggagtttttaatcataactttatcaaatgctttttcggcatttattgatataatcatgtggttttgctccttttttcttttagtggtaccacttacctgaatttatttttgaatgttaagccaatgttatattttgaaaaaatactaacttggccgtgatatggtaccattttatattattttataataacttaggtattacacagtaacaaaatacgttgcaaagtatttcctcctcttctatatactgaaagtttatgtaggattggcagtatttctttcttatatgtgataaaatttaccagtgaagctatctgggcagttttctttgtgggaacatctt

SEQ ID NO: 89400 - DNA, 1037 bp, Homo sapiens
ccttgtattttccttttcttttattctaatatggagctgttagcaaaattattatctatatgaccattaaagaggctaaagttgcccctttgagccattctgcccattgcacagctagtgtatgcagattatagtacagggcaaagttattgcattggcatttgctgtggcacccaaccaaatgggagatataaactttccatggatgcacagtagacttggaaaccctgtttatcataaggctgatgacctagcactaatcacctaagttacactgcttggttcatcaccttcttaattgctttaccctctttagtgtgtctgaattttttaatatacttttcttctgtcttacatcttttgtttcttttgctgttatcctttactcattaagtactacacaggacatttactacaggaccattaatctttattaccagtatcttactcccttacctctcctatcctcctcaccattctgccagctttatgatgctaaacatgttaaaaaaaaaaaaaagaccagactattgtctcaagaaacaaccttacgatagcaaagatatgtacagtattgtcaaaattacacttaagatatatagacttgttcatcagttttagttacttttattgagcaatgtcaaacagggagataatacttgggaaaatctaaacttgagtaagaacttttaaaaggcataaatctggaaacacctgattttcattcctcttttttcctcccttgtagcctcaaaacgttttccaccagcttgcctagaacccccctttcctgagcaatcatcgatattcccttttatgagagccctcaaaactgagggcatttttttcttgttatgttgatgggctagcagaggctgtgaagccactgagtgcgcagttttcagaactgaaatgttaaacctctgaccttggcactgcccattcctaagtcaggctgtaaaacctgactttggccgctcccttcctcctttttgttcctccttcttgaatctctaaattcccttaaaatgttggca

SEQ ID NO: 89401 - DNA, 1996 bp, Homo sapiens
ggcagttcaacatacaaaaatcaatcaacgtaatacacattaatagaatgaaggaataaccacatgatcatctcagtttacacagaaaaagcatttgacaaaatccaacattctttcatgctatctgcccaactttataggaaattgtttgttgactctgccatagtaggtcaccaaggacaaggagaggtattggaagaatacacatgaaaagttgttataggacagaacagaagtggcacatataatgtccactggctttccaccttaccacacgtaattacaaggaggattagggaatataatctagctgtgtacctaggaagaaggaaggagtacattttggtggataactgacagcatctgccacagcagcattcttcataatagctccaaaccagaaatactccgaatgtccctcaatagcagaagggataaaaagtcataaatgcatacaatggaatactacttagcaaagaaaacaaagaaactgcagtacataaaaattatcagcataggtaaattttgcagacaatttaagcaaaggaagtctcaaaaataatatacatatttctaaagttcaaaagcaacaaaactaaatgacatgtttaaccaaacacataaatggtagaactataaagaatagaaggaaataattattagaatagttggggcccctggaggcaagaaggaattgtgactggggatggatattggtattgtatctgggtggtagtgctgccagggcttgctttcttgagctgggaatgggttacactggttttgtctttataatttattctttaaactgaatagataatatggctcagccgtttaaaaaatataaaataaaacaaagggcccagaaacagagttttcttaaacattgaactctaagaaaaaaaaattgccgtgaaatatacccagttatatctaaataggacatgatccattataatcaattccatctgtgcatgtgaaaatatatgtgcgtgtttatgtaaatgcattcacatatattacatgtatataaacatacacatttatgtatgaaatcaattagcctagtaatattcttaacagcattttatttatttatttatttatttatttatttatatttttttttttttgagacagagtctggcactgtcgcccgggctggagtgcagtggcacgatctcggctcactgcaacctctgcctcctgggttcaagcaattcttcagcctcagactcctgagtaactgggattacaggtgtctgccaccaggcccagctaattttttgtatttttagtagatatggggtttcactatgttggccaggctggtctagaacacttcacctcattgttcacctgcctcggcctcccaaagtgctgggattacaggcctgagccatggcactctgccagcatttttatttatttttaagcatatgttgttattgtgtgtgtgtgtctgtgtttgtgtgtgtgtgtgtgtgtgtttaaatatacaggaatatagagttccatgaatatgcataactgtaattgttggtatacttaatattaaataaaatttataaatggaacaaatacaattaaaagctgatgtatagctttctggaaacgcaataaggaatagaacttagagaattaataaaaaagaacagttaaacttggtctgtgctttacagcaatcattcttatccttttcagggtcccataccctttcagaatttggtaaaagatatggtttctttcttcagaaaaataaatgagcacacatatatacattgttgtgccttacaattatgaggtatctgtacattcctgaagtacattcttcaattataaaaatccctggaccatctgttaaaattccttctttaaattgtccccaggtattctgtgatagtgaccaaaaatatatttatattctgtcactaccaagcatttcttcttccctttcacctcactcacaaatccctttcagttgtttctactccta

SEQ ID NO: 89402 - DNA, 1066 bp, Homo sapiens
ggtttagagttacaaagtgctggaatctttcttatgaaagttaaagggagcaaaataaaacatcccacctccttgggcattttcacagtaaaccaagatcagcagggctttgctaggcaatcaggtttaaaaacaaaatctctagttactctgtcactgcaaaaatgtattttcttaaagcgcattatagatttcccatgtttacaaaactgaagtgagtttttcatatgccattgttacatttcagggaaacaagtggcttacctttgaagcttggacattcctataatgtcttataaatttactaagagtgaacttttccattttcttttactgaatgcccaaattattttctttatttttcatatagggacagtgacaggagttagaaaagatgcgtctacatctcctatgccaacaggaagcctaaaggattttgtcaccacagcctcaccatcattacagcacaccacctcccggtaagcttcagagattctttagtttttaatattctccctatgagagcatttttttgaagtttatttaataaggaagggaaaaatcttgacaactcttagtaattctttctcaagagaggtccttcttttgaagcatctagatttggccagtttgaaccacatggagtccttttctttatacatgcactttcttagttgatcatggtaatgtaagggcttccatagaaacctaaagctaaacctatccttcaccagaaagtctgtttagcagcagggctttcctaatttatcacagaaaagttatacatttagactataagtttaactagctgaaatcattgctattgaacattatagtggcttttgtactagttaaaggaataccaacattaacttaagaccagacacatttgaagggttaagcatttgatcagccttttctggagtcagggaaagaaatatcttattttaaatttcccatgtctaatgaaccaactcccacattatgcaattaaggctgaatatgtaaacgtcagtaccaaaagggcttggtttatgtttcttcagggatatgattggttttgagc

SEQ ID NO: 89403 - DNA, 1036 bp, Homo sapiens
tgtaagagctgttttacttttcacatgatttttcaaatgttctacaacaatgttatattccataattttagaaacaatgtttaaaaagaagacaaagggaacacatttataggggacaaacccatttcaaaattttacactcagtagttccaagtagttgcaaaaaccctaaagttactcttggcccatatgacataaatatcttatttcctttgtcaacccagcaatagatgaggattatccttccttgttgtgtcttctccagggtactgaactctgaaaactgctatgaatggtgacatctgttcagtattgccagttcctgctgtcatttcacagcttttagcctcatgaactgccattttagagttgttcatttggtccaaggttatcaaattcccttaacttcaactttaagaaatatttttaatgtctcttccttaggcactttaatgcttttataaaaattactttatatgttacctaatgtaatccttacaaccataagaaagtaaagctccaagagacaattacagaacaattaagagcccaggtgtaataattataactctgtggtttataggcctaggtttgaatgctagctatgtggctttgaacaaatcatttaatttaatctataaaatgggagtaataatatctccctcataggtatgtcatgatgattaagtaggatagtttatgtaaagtacgtagcacaggcctggtgcatggctaagtgctccataaatagtagttgtcattatagaacttcccagggtcactcaagcaatcaggaacaagctaggatttggaccttgctcttgtgattccaaactataagtgtatcccctaacaaagagttaggaatagggttaggttcatctcagaggtgggcagtttgattatattttttatattgaccttgcaaatatgcctgttactttacctccatttgcccaattccttatgtgaaaatatgaatattaatagctattttataaatttgctcataggattaaattcaactatgtatgca

SEQ ID NO: 89404 - DNA, 1352 bp, Homo sapiens
tttgagaccagcctgggcaacatagtgagaccttgttgctactaaaaatttaaaaaattagccaggcatggtagtgtgcgcctgtagccccagctactcgggaggctgaggtgggaagatcacttgagcccaggagttagaggctgcagtgagccatgatcacaccactgcactccagcctgggtgacagagtgaaaccctatcaaaaaaaaaaaaaaaaaaaaaaaccatgaagggaaatgcatgaacattgttattttcattaggcttaagatttctggatctatgttctcaccaaatcatctttactatgcctttttagaggatataaattaactttttggtgtacaaatcctaacgaaagaaagaatgacttaccatgaaagaaagattccaagttggttttgaagctcaacagcaattggccaacacatttcctatttgcttattaaggctttcattgattttcttgttgtcatgggtgcatactgaaaaaagtatgactattactgagattaaaagcctatcattggccaggcatggtggctgacacctgtaatcccagcactttgggaggccaaggttggcggatcacctgaggccaggaatttgagaccactctggccaacatggcaaaaccccatctctactaaattagccgggtatggtggtgggcacctgtagttttagctactcaggaggctgaggcaggagaatcgcttgagcctgggaagcagaggttacagtgagctgagatcataccactatactccagcctgggtgacagagtgagactccatctcaaaaaaaaaaaaagtttattatcgtgttgcttggaacccacccccaaatcctaataaatgatcaacttggctggaacataagcctcttagcagacaagggaagagtgattaatgttgtacgtgagaggctgtttcttccgatgggaaagctgggagattctgaggtgcgttgggatttgtattagaatagggaccctgcatcaagctcttctcaccacatgggctacttgaaacccagagccaataattagagtgaaaaagaaaatttcaagccaaatatctgcatagcaagatagaaagcagacaaaattgtatacagttgcatgtcttgtacaagccttgtgtacagttgtgtttcttaacatacatgaataacccatcctttctacattttgacagttgaaagatatcctggattaatgctcatattaaatagtaatatataataaagaagataagataaaagccttccttagctaggaggattttttttaatgttttactttgaataaataaaaggatactaggaattgtacctcagggtttttt

SEQ ID NO: 89405 - DNA, 1059 bp, Homo sapiens
tatatatatcatttatacatgtgtgaggatatctgtaggataaattcctagaaatggaattgtgggtcatagataagtacattttaaattttgatagatgttaccagtttgttttaatagaggccgtacaactcatgtatcatctacaatatttgaaagtgtctattttctgacaccttttacaatgtaatcaaaaagtttggtactttgccagtctgaaaagtgaaaatagtatcttgtagttacaattgcaaagaataaacttttatgtttcagtcatttatattttctgcaaagtattctatttttttgtccactttccactgttattagtctttttcttttttatttataggtgcttgttacatatgaagaaagtaatcctttttgtaatatgtcaaaatgtttttccaagcttgtttttagtcttttaacataggttgtgtagcattttttccaggcagaaaattctcccatacaaatgatttttttggtctttcaactggttatagatttatctttaattatttcactctgcatctattcctataatagtttgttatggttgctttgttttgttttgtttttgttttgttttttgagacaaagtctctgtcgcccaggctggagtgcagtggcgggatctcggctcactgcaacctccacctcccgggttcaagcgattttcctgcctcagcctcctgagtagctgagatgacaggtgtgcaccaccacgcccagctaatttttgtatttttagtagagatgggatttcaccctgttggtcaggctggtctcaaactcctgacctcatgatccacacaccttggcctcccaaagtgctgggattatagcatgagccactgcgcccagcctatggttgcttttttattgatatatcatagttgtacatatttgggtggtacatgtggtattttggtacatatatacaatgtataaggatcaaatcagcgtcactgggatatccattacctcaaacatttatctcttctttgtggtgggaaagaattcccaattcttttcttctagctagtttga

SEQ ID NO: 89406 - DNA, 1049 bp, Homo sapiens
tccaccacccaagcagggtctccctactttttctcactggcctcgttttgacccagagaaagcctatggaagttatgcagtgcagacctcatcctgtctgctgtcttttctcccacagagctcttgagatgggtccttcagcttgcagtggtccctagtagcctctcaagctaatggggatgatgatcctggtttagccagagttcaaaactctccagtcattgaaagcaaggggagggtgtgttcccagatgtgtattacttgggaattttatttgatctggagggtgtggctttttttctctcctttttaccaaccccaactaaactgggagtaagacttagtcagtgttggtagacaaagtcataccacccagggcagcctgcatgcagcgagtctgcgtggcttccctgaattactcttttaattaaaactagattatttcaatctagaaaagccttgttgagcagcctccttatccagatagatccaaagctcatgtctcttcaggctgagactggcgctgtcacctccacccagccttctttcacttggggttttttattctttggagtagaaaagaatggagcccactaatattatatttttcttctgaaataaatataaagtcaagactaactagttataatcattcccttaaaaagttggaaaatcattacagattaaaatttctttataaagttcacctctgagagtaaccaaatcggtttcatcccatatcaaaaagcctttggagtgtggagctttctgtggtatggcagaaatgggtggatggcaaactaagagccctcagccattttttcagttaaagttaggttgccagaactttcttttccttgccccctgtgtcatgactagcttaagtgtacttgactcccatagactactcccatgcccacagtcacccattccagactccagtgtccttaaaactctggagtgagaggatgccagaggatcaagaaaaggatcacagtttcttgaagaagcttgtttgcctttagaagaatcgtaaacagagtctaaac

SEQ ID NO: 89407 - DNA, 1036 bp, Homo sapiens
taatgtttccaaagtgacacagaaggtattagagagaactgtgattttaatcctggtctgaagtcaaagtccatgcctttttcactctgataccctaatccttccatctcctctgctagtctgggaaagtcctggttagagctccacaaagggcagaagcagagatggagatgctcagagtttcctgaagaggcaaacagttaggctggcaggaagagggagaaagggtgatacagagggccctggggagctgatgctggctctccaggcttccactctgtcactagcaagtcccggggcacctgggagtgttggggaccagagactggggggtaaccaaggggagaacttgaggagagaagggagggcagcttagagaaatggagggagggtcagtagggggaggaaactagaaagttaaaataaaaatcttatacttgcaagcatttatctggggatgggagggtgtgttgactatacacttattccacgtgctgtcactacttaaagagtatttccagaacagctgcctctttgggacatgccttcagttgtccgtaatttgtccattccttccttccttattcactcattaatgcaggaatgaatcaatattgactgaatatccaacttccagaactcactagtctgttgaaggtagtacatcaatggtagctaataatttttatttgggggtgggttccatttgggtaaatagtcaaatggcattcacagccaagtctgatgctgtcactttgggctgggcttcctaagctcactgccatatgtcccttatccactttaccaagtgggcaagcaaggtggggaatgtttatctgtgttttatccactgtaattcaaacactagccctgcagaccctgtgctatggggatctgcagctttgcccagatgactagcagcagtcctggaggatggaggccttggcagtgcttgcatgagtggggaagctctagtatgtcttgtgtttctctctaccagtgcttagcatgagggacggaggtgtaatcctgctca

SEQ ID NO: 89408 - DNA, 1077 bp, Homo sapiens
tttcatttaatgctcccatctccctctgtgtttttctaaagatctgacctttttcctgttctgagcaggattacacctccgtccctcatgctaagcactggtagagagaaacacaagacatactagagcttccccactcatgcaagcactgccaaggcctccatcctccaggactgctgctagtcatctgggcaaagctgcagatccccatagcacagggtctgcagggctagtgtttgaattacagtggataaaacacagataaacattccccaccttgcttgcccacttggtaaagtggataagggacatatggcagtgagcttaggaagcccagcccaaagtgacagcatcagacttggctgtgaatgccatttgactatttacccaaatggaacccacccccaaataaaaattattagctaccattgatgtactaccttcaacagactagtgagttctggaagttggatattcagtcaatattgattcattcctgcattaatgagtgaataaggaaggaaggaatggacaaattacggacaactgaaggcatgtcccaaagaggcagctgttctggaaatactctttaagtagtgacagcacgtggaataagtgtatagtcaacacaccctcccatccccagataaatgcttgcaagtataagatttttattttaactttctagtttcctccccctactgaccctccctccatttctctaagctgccctcccttctctcctcaagttctccccttggttaccccccagtctctggtccccaacactcccaggtgccccgggacttgctagtgacagagtggaagcctggagagccagcatcagctccccagggccctctgtatcaccctttctccctcttcctgccagcctaactgtttgcctcttcaggaaactctgagcatctccatctctgcttctgccctttgtggagctctaaccaggactttcccagactagcagaggagatggaaggattagggtatcagagtgaaaaaggcatggactttgacttcagaccaggattaaaatcacagttctctctaataccttct

SEQ ID NO: 89409 - DNA, 1961 bp, Homo sapiens
taacgcttcaatgcttttaaaacagcaagataatagttctttgatactttgagaggcgctttgatgaccctcatccaagtctatgacactttcctatggttttctgtattctatgtctggatggagctgttaaaagatgaacaaattggtggatatttggggaaagcaacacaaatcttaaaactcacccgtgaagtgtgagaaaacaaggaggggaacaaatgggacttaccaagcaaggtcattgttgtgaaaagtctgtaaatgcttctaactcttccccctcttaaaatcataatagttgtacagaattttaaaaaggaaaagtttaaaatacctatataatagaagaaaaattagaggaaagcaaaaaataaaaaaaaaaaataaaaaaggaaaaaaaaaacctatagaagttagcattactgctaaaatcccagatgttgtaggactgtacttttgtagagtttagacagagcatcaatcccttctccccgcgagtgcagtcggatgccgttgtccccaagggccaggccgaactcgccccacacctgcgggcgcctggctgccgacgccggtggaggccacgccgtcggtcgggaacggtcgcgtcgcccgggtcgccgccgccgccgccgccgtcatcctcgcctctcgcttccctctgggagctgcgcgcgcttcactcaccttccgcttcactcgccttccacgcttgctccagagactttccgggcaagggagaactgggaactttcatcttaaaacaactagacaacacacacacacacaaaaccttaaaaaagagagagaaaaataaacaatctttgaagaatttctgaaactgtttacaaggaattttgaaaaacagggatgtttaaatgatgccggctctgtttttctgtaaataaatttgcatattttgtaggacttttaattgtaatgatagagaaaaaaacaaggaaaactatttaatgaaagcacgatatttatctttggtaaatgactttagagcagttaaagacattgcttaaaaaactcagaatcagaaaaaacactgaattatttaagaacacatatattttaaagtataacatatttattataatttatttgcacccttgggaagattgctttggcattctgccttgattccttctcattgatgtccaggtcatctggaggccgggggttctcagacctaccagtttccctttagaagaacaaatttccagttcctctagggcctcctgcctttcctttctttctgtcaattttgttgttgttgttgtttttcattttctttttttctcttgactcctccttttaggatgtccagatgtaaaaaaaaaaaaaaaaaaaagaaaaaaagaaaaaaaaaagaaaacagctgcagttcagtacaactgctcttttcacactcaactccctaaaactccttgtaaccttctgtaactattggatgacgctttctccagcttagccctaaataaagcacagtttaaaaaaatatttcttcattggtctgtgcctctcggactctggccagctgtgcctcacagccccaaggcttgcccactggaagtagctttggtcctctttatggaatctgccacacaggccctcgttctgagcctcagcatgtgaggctcttctgggaggtgatgggaacaataaaaggaggtcctgttccactctaggaagaatctctctggactggtgtgtgtctctgaaagtccccactgcaaattcattcttctgggttcctggcagaggtggccacagtgtccaagcagaacagaaaggaggctacctaggccacccgacctgaaggccgagcaagtgttgggttggggggggaagttatgtgacaccttagggaaggaggcagtggagggaagaggccacaataaaggaagaaggatgaggatgcaactccaaatttaccagcaagcatcttg

SEQ ID NO: 89410 - DNA, 1075 bp, Homo sapiens
gaggagtgggctgggctgctagatttttcctatcttgtttgctaggcttctgtatacatattgtatctgggctagatccctcagagacaagtttaattatgaattcatatcccgcagtcccaaattctccccttagatgtagctacccccaatccagaatgctaaagtaacccaaatcaagaaccttctcccaacaacgaaacctcagctacaaccatcaccactagacctcccagtggtttctactctgaatagaagagtatatttctttttaatgtatcatgatcatgactaattctcatactggtctctcttccttccctcccaccatcccctagagctcccatcctagcccctgaggcaggttcctattggtgtttggatgctgtttgtgttttccctcttggcttaatcagccctgattttcttcattttagggcaggatgctgaacgggctacattaaaaaacaaacctctctctatatatatttataaatgagaactgttggatgacacctttgacatatcagccaatatcaatcaagctgaagactccagacactgtctgtgtgactgtaacatttcttcaaggaaagtatagcgtctatggagttcagagggcacgtgtttgggggaaaatatatatgacatgaagaagaagatgaagaaaaatgagaaaaaaacacacaaaaggcaactttaaaacaaaatatcacgagcagacggggaggctgaagggctgggagctgggaggagacgctgcttaccgatcccggggcttttccagcccacgggcgcctgacgcaggctggggcaagtggtgcgtggggcctggtccccaaggggcggctgagaggccgccactgagcatctctatctgtcattcctttagctatttagggaccaaaggaccaaactttttattgcagatgtgtagctctatgtcaaatagagggggaatggaggaccccctccttcctgcctcatggctgttcttgaaacagcttagagcgattctatgaaaaaatgtaataaaaaattaaaaaaaaaacaaaaaacaaaaaaaacaacaaaa

SEQ ID NO: 89411 - DNA, 1091 bp, Homo sapiens
gcgtttttttatgcttctctagatgtcacatagagaaaaaaacaaaacaaaagaacaaaaaatagtcaaaataaagatgaattcctgaattatcaaacatgggatcatttacctgtgcaaaccattatttttttcttaaaaataaggaaaacatcttaaaaatatctatgcgtggttgatttacttgcacttgaaaatattgtgattttatttttttctagaaatttgggggcctttttcaattgacactttcctaggtctggtctttttccagttaggctattttcaatctcacttcaaagggaaaaaaaacaaaaacaaaaaaacaaaaacaaaatatctacagtaacagaatgataaaaaaattctaaaccaaaaaactagagtacaaagccagaggcctctgcaagagagcccggtaacaattgtaaggtttgtattgtaaccacttctgctaaattaaatgtggggaggggaggctggggactgggggctcgggagggttttttttggttggtttggaagaaacagtactaacaaaagcaaaatgcacctttttgtttacaactgaaaaagggtccttgacaagtgttttttaattttattattattttatttggtgttgtaattgtttagactgctgtgtacggtttgctgtttgttgaatcaacagtgtgaaaaacctgccagcatggattgatatacgcatgacgttgtcccctcaagtgggggctttgcagttctaactttcttgatgtaaccagtcacccccatgtataagtggaagctgcttgctagaatggagatgagtctcatttgttaattcacaatgattaagcattcgccttctgattctagtcagatcatgatttttttaaagcaaaacaaaacaccaaaaagccaccattcaaaacaaaatcaagcactgtctgagttaatttatttaagtttgataattaaatctcttctgaccttttttaggttttcccatccactcccttgaagttctgaattcctctaaattccctggcatgtatgagaaaagtattatgtgtgtgtatgtgtgtatatatgcatatacatacacacat

SEQ ID NO: 89412 - DNA, 1091 bp, Homo sapiens
agtgcaccaagcatcttgtcctgaccccagtgagtcctgtgactctggctctgagtatgcttttggagagtgtcgggtccaggctttgcaggcacaggtgctttgggtctgacctatacagggccaggctgtagctttcggcctggccctcctttgcttgagaccagctgattttaggacctgagatctgaattggttcagcttggccataatttcctcacccagctcggtgagttggacttcaccatgccggtcagtgatcccactgccacacctagggctgtgctctgtgagcctccaccccgagagtggtcgggaaggggtcaccctgcaggcagaagaggagctgctgcctaatgaagacagtagccagctgagcccgtggagtcttgggggctcctcagggactgagtgtgagggtgtgttatgtgtctagggccacacatgtgtgagagatgagggtatgtgtgaggaagttccctagattgagctttagggacaggggctgtgtgctattcaggtttgtgctgcagtacacaggacagtgcctggccctgacaagcggttgcactctaaagctgggagaggagcaggcagagtgggaaggagtaaacgcccatgaagggctcagggctggaatggagggagaaagaggagagtcccagggagtccctgagttgcagttgccacagcccccatctgatggcaataccctccttagttccttaggcctcttctcccgtgccaacgggagctgcccgttggccatcctgggtgggtctaagggcttctgggaggagttggaagtggcatttcaggacttggtgggcatgggacggtccctgatctgggggaaggagatccagtgttggaagagcaaagaacccagccctggtgggcaggcaggctggggtctgcagaggaggagtctagggtgcttctgtgaaggttgagctggaggccgggcttgggctcagcttctttgcccctcatccacagtgatattttaagatcccaggcctcccttcctccctccctccctccctgcaggaaagcataaagctgagagtgaaagtctgctgtatgtagaa

SEQ ID NO: 89413 - DNA, 1070 bp, Homo sapiens
acaggaaggcccagcccataccctgcctcacgctgctgcagctgagggacactgggctaccactggtgaagtgggggtgggggtggtcccctcatcaggctgcagccctgggcctgccttgcccttgccttccccacagtccaagccttcatcagtaagaccagggccacaaggggtggggtccaggagtccccatgttgcccgctccaggtccagaacagagagctgtgcctacaggccctgatatcttttctcccactggtgccattgtcagctccctgaatcactctggcctattggctcaggggtctctaaatcctgccccacccttcacacagccgtaggtcaatggcaccctgcccaacacacatgacagcccctactgcaggccttaaactgaggcccccatgggccctcctgcccctctcccaccctacactccaccatcccatatgtgtagctctgaactcctcctcattccttctctccatctctgagcagctgcaattcctgcccccccctcccccaccccacacacacaccttgctccctagtctaggccctctgtggccagtcctggctccagcctctccttggggtggcaggatctgctgctattgtccccattctcccaggccatggtccatgggttgagccaccccagggatgcaggggatggggaagagtaatgcacgataccaacagagccgcacagcatgggcgggtgagagcgcggcactgggagtggtttgtcaggaaggcttctgtgggtctggaaggatgagcagaggttggcagcacatagagctggggaggcaggaggtccaggcagggggaacagcgggattaaaagtgcagctgctgcagagtccaaggtgagcatggggccagggagagacaggcgcaaggtgggctggagcctggccaaagccgtgtcccacagagttgtccgagtcatgaacaagaaagaaggctgtgttcctccaaccctgccaagagttggcttctttatgtcatggtcccctccccatgtggaatgtcatggaaataccaggatattctggtggcag

SEQ ID NO: 89414 - DNA, 1067 bp, Homo sapiens
gccgctcgtcagtcgccggccggccggtcggcccgccagcccgctcctgctccccggcaaagttgggagggaaaggtgtactcacctttgtgcatgcctgtgaacctgtccttcagaaccgtaagctcgtagattttgccaaactcctcgaagaggggcttgaggtccttctcatccaggttgcgggggatctgcccaatgaacagcttgatggcatcgtggtccttcatgggaatggtcgacgggttccccgggctgtggcttaatccgttcatgtgcccggcactgcccgggctgctgccgagcccgttggtactgaggcttgcgttgtcagcctgtccgtttgctaacgtggccatctttatatacatagagaaaatcttctttccttttattctttctcgctcacactctctcgctcctctctctcgctcgctcgcgctcacacacgcacacgcatacacacactcgggttctctccccctcggtttctctacacctcgctctccgctcgctctctgctctctctctttctcctcttctctcgctcgctcgcgctcgcgctctctctctgctctcccccctctctctctccctccctccctctcctctctctctccctctctctctccctctctctctccctctctcctctctctctcggtctgatctgattttttttttctttttttcttttttttttttttttttttttttttacattgaacagacaggatctctgtcctttccgtttaaacaggctggaccggttcaagttcccagccagaccaggggtgggggtggcgagtgtgcgcgcgcggaggagggcgcggggggccgggaatgggcgcgctgtgggggcccgcgccacggcgggcggcggccgggggcagggcggcgtggggcggcggccaccgcgcctcccccgtcggcggccccgcgccgtggcgatggtacagtccgagacggcccccggctataaatagcgccaggcgcatggctcttcgggaggcgctgagattccgggcccggcggccgcggggagcgggtgtccgtgaggagccggg

SEQ ID NO: 89415 - DNA, 1041 bp, Homo sapiens
gataatgtcagactgagagaaataaagtaatttccacaaagactcatagttattaaaatttgtgatgggattaaaaccgtatcatttctaattactcaatcagtaaccacgctacccatttgctttgattgttttctgaggtatgatcccaggtaacgtgtatatggattttgctttttttccacataaaaattaagttttcaggatttctgctttcagtattcaaataaacctttacaataagacaattagaaaaagtggactaaatgctttccttcttaaaggtattagacagttataatgaagtgggaatatatgggtaaaatattaggacaatggagtaatttagaaagattaactcagtttttggatctgcattttccttaaaagggtctaccgatattagaagaggtggtgaagaagctgcctaatactattctttttactttgtatgtatttgaaattttctatgatacataaaataagaaaaaaaagctttccatgaatgtatcctaacccgcttttcaatcccaggccctactgcttattgatccttgaacattgtttgctgtttcctttgcctggaatgtcaaatgttcattttgcataacaaaatattttcatttttcatagtctgaagtcattttctccatgaagtcaagattgccacacaaatgaaaatagcctcactgtgtccacttgccactttatttgactttcccattgcactgaacgtattccctttcaagtatgcatatttgtgtatgcctgtcacttcataaacatttttttacagagaaagaactatgacattctcatagtttatatccctctgctttaacaaacacaggggtaaattaatttctgtggaacctgaagcttatgcatttgcagagacgaactctttagtaaaaagaatacaaaaatacaaataagaaattagatagagtgcttgggagactgtcatgcaagttaggattcctgaaaaccttagcttcgatatatctacagtaaatccatttcagctaaacatattacaaa

SEQ ID NO: 89416 - DNA, 1038 bp, Homo sapiens
ataattagcaaagctaaaaaaaacagtgcttggaaatttaattaaaaattaaaaacaatcattcccaagttaatcaatttaatgcatttccaattaaaattccaattggattttttgctttgaacttgacaaaatgatggtaaactccatggagataaataatagaaaatagtagtcaagaaaaattagaaaaagaagagtatttggtaggaacttgcctgtatataataaaacatcatagatttccatacaagattgcataccaaataggttttcacacccagcttctctaaaatctccactgaaacaatgaaatgaaagctttaagatatgacaaggaataaaccaataatagtggtatggaagggagccacgaaagaagagagagtacaaagatttgggcaagataaaaatggatgaaaatgtatttgtaatacaatcaaaggaatgaaacctccatgacctggtataatccagagaaagctggaatccgtaaagaattcccacctttcagaatcctggatggaggggccttgggctcagtggaggcagatgctagatagtaagtgtgagaagtagggctgacaacaaagacgctgattaaagttctctgaatctagcaggtgaaccaagtgactttttcacccctcttcccttctattctttcctgctctccttccttgaattagagcaaaggtagcttgatatttatccccaggcacaacactagaacattactgtcaacagaaatgggtcgaatggttgaagagagtggtcacattgacaccttggagtaaatccgggctcactctgacatttgggaaccttcagccttggaatgaacatcatcttgttcagagaaaattagaaaaaagttgtctgaagaaattctgtatcccaagagataaaaacgtccaatactggtatgtgagatctctttagcatatataacaagaaccctaaagcaaaattgtagctccaataaaaccagggagcaaaggaggaaactagacccaacccaggagaccatttaagaca

SEQ ID NO: 89417 - DNA, 1076 bp, Homo sapiens
tttggaacaaaaggtcaatataagcatagcacgcatatcccatattcttggaatagtagggtcagaagacacaatacctttaagaccagaatacttctgaaattgatctatagatccaatgcaactgctagcaaaatgacaactggcctttttcttgtcttttgaggaaaagtgaaaagaaattaaccagctagtctaacattagcatgaggatgcatgaaattcaaaacagccaaatcaatctcgaaaaaagaacaaagttggaagattcacactttccaattccaatagttaacactaaattatggtactcatgataatgtaatactaggataaagataggagagacacagatgaatggaatagaattgagagtctgtaaaaaaaaaaaaaccttacatttataaatgcatattaatagagacaaatgcacataataattgaagatttcaacactcctcacccagcaatagacagaactggtaaacaaaaaacatatcaacaaggattaaaaaaaaattgaataataccatcaactaaccagaacaatttgacatttacatagtactctatcaacaatagaatatacatgaaacattccccatgataagttatattttgggtcataaactttaacatgtttaaataaactgaaatcatacaaagtatattttctgaccataatgaaaagaaataacaggtcaatgacagaaaacatgaacatctccaaataattgaaacgtagaaaacatggttataaattattgatacttccagggaaactagaaaactttttgaacacaaatgaaaatacaacatatctaaattagtatgatacagctaaggcatggcttagggggaattacataacatcaaatacttctgttagaaaacagtttctttgaatcaataatctaagcttacacctcaaaagactataaaaagaagagcaaaataaacctaaagaaactataaaaggaagaaaaaataagtccgaaacaaacagaaggaaaaaaataacaactagaaactgaaagcaattacataaaaaccagaaaaacaataaagaaaattaa

SEQ ID NO: 89418 - DNA, 1088 bp, Homo sapiens
aatatttcttaatgctgttaccttaccaaaagttttagataggccctgtattcagagttttgtgcatcccattctttccaaaataacagccaattctttgggaagcatggatgacttttccaagcaccatcatcggtggttgattaggagattccttttgaattggaaagatggaaattgactatcgtggtcaaatggtttcctggtctccctaccctctacctcaatagcatttgttcccacaagtgctctttacttgcaaatgttggacaatgtagcactctccagcagacagacagattaactataattagctataattttcttaatgataaaaccctttgggggctaatttatacatcatctggttttggcactggaatcctttctaaacatttcaaagggtgtgctcacactaacacaacacctgaagcaatgctttgcaaatatctggtattcagtaagaggatctttatattgaaataaatgcaagtcacagctgtatgcattgagaaaacaagcagaaaatatttatcaagcactgtctgaatactcagactaattttgtgaaaactgaagaaacattataaaccttccaggtagttagaaaaaaattgactgacttatgaagaataattctaagctgagttctggagtgcttggtacagatgatgtgcactgtggggaacggcaaaggaagactttgaattagagatgactacagtgaaggatctgaagtggacctttaatgaacaactcaatagatggagaaaggggagcagggaataaaggatatttcaaaggggcacattaccagcaattgtgctgaggcatggtggctcttaattattttgatctgctgctgctaactttattgagcatctctcatatgcaagcgttctgaagaataaaaggatgagggagatttctatcttcaagaatctctctctttgaatgcagagctgacaagagaaacaaatacacaaagctgaaaaatacaagataagaatagggtttcactggctgaggttcagaatcactgggaaagtcttaataaaacaggtacctggggctcacctaaaagtttc

SEQ ID NO: 89419 - DNA, 1066 bp, Homo sapiens
agctaacttcttgaagtattagaagcaaacatggtgtgttgtcttgcaattgaaaattaagttccgagaaggtggtgtatctaactttggttacatccatcaagttagaagtgaatgatgaaaaacacccttaagagggtaatggctacaatggcaagtttcttgattagatgataggttggaccacatgatctttaaggtattttccaattcttaatggccagtcctagaacactacaatccatgcaaggatatgttaatttactgactgaattatgctgtgccacctccccacatcacttggcctgtatagtccaaactccagtgagtttaacaagcatttagctgcttgttaagatcaagcttctggaactttaattaacgattgacttgttactagttttattttatttgagactctgacttttcatttgagggcaaattatgctcatcatttggcaaaaggtctactctggttatctgatggcagccttttatgtagcacatttttatgacatgtcacattgacatgatgatcacttctctacagctttgcacacttagaccttaggatttatacttttcactgagttctttccactttatataaagtgtatggtaattcagaaaaatatgagatgagaagaaaagaaaaaaagtcatgcagtgttctggctaaataaacaaatgaaatgttagcaatgaagtgagcacaagataggaagggaaaaaatgatctcatatggcctgactatgatgaaaactatgtcacctaagagtctgtacagaagacatcattcaaagtcatgtgcaccacaaacacacgcacacacacacaaacacacacgtgaaacatactttatactaaacgaagatttgatgaaggcatttcctttaaaattaagtaaaagcaaatatgtctgatatcaccatttttattcaatattatgccagaaggactaagtagcacagaaggccaaaaaaaaaaaaaagaaaaatgtgtgaggtttgtaaaggagcaaatatatacctagaattgttcaaacaggaacaggatataattgaa

SEQ ID NO: 89420 - DNA, 1094 bp, Homo sapiens
tattttcccttgaaggtggtaacatatggagcaataattatagaagattttcttccatcattaccgtatttaacacttttttttcacatggaatattcatttctaacttggccaagactcaatgttttcttttcaaatgagtaaacctttgttgagttttcctgtactgtatgatataggcttagctaatcagcttcacccagctcatatattataacaaaatgttgcttagaacaactcagtctagtggcattgatgatgaagctattggatttaatggcctcatttcagatttaccctttcaaactataattttggtgtctgtgacactaatcatttttcttctctcctatccctctttctcctcttcctcttaaacctcctctcctcttcattcttcttctcttcctctttgttcttactgccttttcttctttctcctccctttttgctaagtcacatggcaggcagtcatgacatccttgctgatgattgtctttaatccataaaccatgacaaacaatgtgaattccctgattcttcaaacagactaaatttgggtcaactctctctaagagctacagggtttgtcctatctccacaagtttcttaccctctctcctgatttactcctagttcagtttccaccaatttgcagaatcctttccttactgctccaaatggactggcattgtcaaattctgcatctctgacttctctgctttgctaatctggcccttgccatgttctgtactgcactgttcatcaactttcacgtgggtaagatttaaggtatctagggaagaaaaggggaaaaaaactcattggtgtgatcctctaccacatgtcaggcagtgtcaggaacttcacgtagattatcttctttaatcctaacaacaactggatgtggtgggtctcattaacctatttatttatttatttatttatttatttgagacagagtttcactcttgttgcccaggctggagtgcaatggtgcgatctcagctcactgcaacctccgcctcttgggttcaggcgattctcctgcctcagcctcctgagtagctgggattacaggtgtgcacccccac

SEQ ID NO: 89421 - DNA, 1104 bp, Homo sapiens
cccctcatgccctttccttcctcaaagcccttttctgtgtggtgaattagaatcctttcaagccccatatgttccttccctcaaacactgaggccgaaaagtgagttaatttttcctcccaggatgagaactccctcttatatgttccccatttccaacagtattatctcatttccttacaccagtcaaactcagaagaagtggtttttcattctccctacagcctcttcaactaccagatccttcagagcagccagcacaactatcgcttcagcttagttccttatcctgtccctagatggatgaaagcaatggttgctagtagggtctggctgctgcccatctctccctgatgtagttgcacactattgccaagttgttagtctaaaattactggctcttttcttctgaataacccaaatatctaaacctggcattcaaggcctccaatggtgtgtcttcaacttactttttccacattcatgtcccacaactttgctaacatacttaatctgctccagccagtaatctagtttacttactgctccttaaacatacgtcaaacgttttggcttccaggtttatttctgcacccttcttgcagcctagaatgctttctttttccctcatcttcaagaccctcatgaaactccaaatcatcacaaagttaccccttatcaatctggcctggcatgagagcttgttcttctgcagctaagaacacttattctggcaatatgaatgcagtcacatttattctgtgttttagttcattctcatgctgctaataaaaacatacctgagactgggtaacttataaagaaaaagaggtttaatggactcacacttccacataactggaggggccacacaaccatggcgaaaggtgaaggaggagcaaaggcacgtcttaacgtggcagcaggcaagagagggtgtgcaggggaactgccctttataaagccatcagatctcatgagatgttttcactatcacgagaataacatggaaaaaaatctgcccccatgattcgattacttcccaccaagtcccttccacagcatgtggagattatgtgaactacatttcaagatgagaactgga

SEQ ID NO: 89422 - DNA, 1028 bp, Homo sapiens
atggatgctgcaagtataatttagtaggattatagaggaatttcttaatacctataggcattgatcaaatcatttgaagtagaaacatactcagataaagtattatgcatgtcagtattataactgcaattgaaatagaaatggatttatgtttgtagttagcatattgacattttgataagcacttgactgatttacatgaccaaaaacaaaaacacgtctgtggcattttaaaattctttaccatcctgtgctcttgaatgcataaatacttctggatagtctgaaatattgtccaacctgatgtttggagctcagatttttagagatagatctattgccatcggttcagataaaatttttattattattttacatatgaaactaatttatttagattcatagtttattcagcatggcacattagcaagaccttgtcaagatgcagggtaaatataatgaacatgaagttcctgtttttttcagaagagtattgtggatccttaatctgacttcttgacacttcttatttgatagactatgtagtgcagttctgatgtttgatcagcgagtgttattcagcactctggtaggctcagtgtaggatacacaggctgtatgcttttaaggaaggagtgttcatggaagacaggatgtgaccacatggacagccagactgtgccatagagggttcaaccctgtgtgtcccaggtgtcacccagtgtagctggaaagggttttcaaacagcagaagcctgaactctggtgatctggccatatcgaaaccaagtattttaatggtgtaatttcttcagtagtctttgtggagagatatctgtctgtctgtctgtctatctagcctatctatctgtatatatatatgtgtgtatatagatatagatatatatgtatatagatatgtgtgtatgtgtatgtagatatacacacacacataaaaaatatatatatatacttaatactttttattctggaaaattttaaacctacaaaaatagaataatacagtg

SEQ ID NO: 89423 - DNA, 1051 bp, Homo sapiens
atacagatgtgctttgaaagcataaagcactaatagcttaatgttatcagtattaatgaaatcatttgaggaacagaaaattctcgcataagaagtcacatatctgtctggagcagtctggtaacttcatgtgataaaggtagtagattttctactttgagtttttgttttgattgttttttttcctgatttattctcagaagtgcttttgagtatgagtaattttgattattttatcttcataatgtaaattgggttttgaagagtggttaaagaaaatcatggtttgtttaaaaagttctaacaggttgaaatgttttcccaggtttttttcgccattatattatctggtgtcttggtgttttctgagttttattaaaaaatttaacagagctgtttttcatgagctctattaaaacaattatgtttttatttaaaatggaaagttgcctttagcaaaattgaggtgactgccatattattttttagagtctaacaacatttttggaaccttttcctctggccaaaactttttgtgtggtttgttaatttaaaagaaagatatatatatatgtatttctgatttatgttaacttcatttccatagctggaatgaatggctgaaactaccagtaaaataccctgacctgcccaggaatgcccaagtggccctcaccatatgggatgtgtatggtcccggaaaagcagtgcctgtaggaggaacaacggtttcgctctttggaaaatacgggtaagcattctgttggtctcatctgtaggagtgtagcagctttctgacccttttctttttcggaatgagggaaggctttaatagtttatgctcagtctccagtgtaaaccagttaggtacatatgatttgatcattccttacactgattttaacatatatttcctacaggatatacagatagattaggaaatacaatttatattgctcttctgttggtgatttaatgtgatttctagtagaaaatagaagtcattgggaaatagaaccttgcttttagggaaaagtgactatgacatata

SEQ ID NO: 89424 - DNA, 1054 bp, Homo sapiens
atttaaattttgattttagtcattgtaaatgtggcattcttcagttggttaggaatttgatctctgttattccttagatcttcaccaaagtgatgaaatgtgtgtgctcatttctcatccttctctccttccactctctgtgtagaattctctgtcatagttctgagcgcttggaggagaaaagaatggcatgtgcaaagcagtgtgacatggattttagttgcttggttaattgctttacattccattgggggcttaaagcttggcagtggagatatacatttccatgtatagaattctctttatttttaggaatctaaaatttcctgtaatgaactgtattaatttacttctaccctgaacattctctttttccctagcatgtttcgccaagggatgcatgacttgaaagtctggcctaatgtagaagcagatggatcagaacccacaaaaactcctggcagaacaagtagcactctctcagaagatcagatgagccgtcttgccaaggtaaaaaaagtcatttggaacaggtgcaaagctctgactgatgtctattgtagtatatataccttgacattatgaactctgtcagatttttaaaaaatctaaatcttaacttttaaataattgttttattgagatataattcacataccataaagttcacccttggaaagcatacagtctgatggtttagtaaatttacagacttgtataatcatcaccactatataattttagaattttttcatcacccctaaaagaaaccgcaccattaacagtcactcccattttctgctccctgcagttagttccaggcaagtactaatctacttactatctgtatggatttgcctgttctggaaatttcatataaatggaatcattcagtatgtgaccttatgtctggaaatctgtcaggtttgaaaatgtggagcgttggtgatattttcaagatgaccacccactttttctggtgacatagccttaaagttgttagtgtaacattctagagaagcttatgccacttggaagtgaagatgactcagac

SEQ ID NO: 89425 - DNA, 1033 bp, Homo sapiens
tctgttcttaggttgcacacttttcttccttttgatttttgttacacatattgatttctatggtttagtcatataagttaagggtgaacttagcttaaaattgttagaaggaaaaaccattctttttatttttgaaataaaatagttctcatgaacatgtgtgcaaaataccttcaagattataaacccaaactactgaataaaccaaaaatgttaaatttgagaaagcagttataagtgcatagtagacactactgaataaacagtagtgctgtctataataaaataatagtgctgtgtaaaacacactacatgtatataataaaataaaaatgtgttatgttttgacttgtatttgatagatacatgtattactgaattaggaaaaatgatacatactgatcctttaagagaatgttgaaaataatcatttttcatgaaaatcattttttttttcagagtgaaaaacgaagttctaatttcatgtacctgatggttgaatttcgatgtgtcaagtgtgatgataaggaatatggtattgtttattatgaaaaggtatttcccttggaactgtttttggtctctaaagtagaggggagaggaaacattaaaaaaatattgttgttcctgctgggatgaattatttggttgcagggtagcagcagacagctgtcagcagcagctgtttatgtatacagaaatcaaatcatataactacaacaagattacaaaagcctatcactcatgtaatgcagttctgggttacagaattcaataagtatgcaagtgattaaaaactttgtgattaattgttctgcaaattggcaagtaggacactaagtaatggcttcatttactaatattatttatttaaaaaatgaaagggggaaattatatttctaagtggtaggctatttattgaaagttaagagtctgtttgttatttgagtgtatgtgtaatgtctatatgtggccctcactgaagtatacttatgaaatacttcagaaatgtccatttgtacaatagatgcaa

SEQ ID NO: 89426 - DNA, 1031 bp, Homo sapiens
ttgtgattattgtccttgccctcagtaactgatagcttaaataactgctaagatgataatacagtgacatcacaaggtcattagtagctgacaggaggaaggaatgctttagtctatgttgtcagggaagattttacagtgatggtgatatttgattggttagaggatatggaaaccttgaatatgtggagagtgaagggacgatgttttaagaagctgtaatgacgtgtgtattatgggactagtggagtttaaggcatacttagtttcccagtcttgagaaggatacatatttttaagatatgtagaagactgctaaagttgtatcagaacaaaacattagatattattaaatgctcctaagtaccttttctatttatgaatagcttttgaaatttccttttggtgaagtttacattgtcaatattttaaaataatttgtaggagaatttagttgagagcaaacaccacaagcttgcccggagtttaagaagtggaccttctgaccacgatctgaaacccaatgctgccacgagagatcagttaaatgtaagagaattatgaaatattaatttaaaaatagttaaatgggtgttctggttgaaactgatagctatcacctcacttaaaaattatttagatgcacattttctccaggttgatgaatcctacatcatgttcataatttcacagatcagcagttctgttatcatttggggctttccataaatgtgttatctctggagacagaactgcatatactgtatactttcatgtcagtagtattcttagaagctggccctaagacattgcctgagaggacttagtgtgtacacatgccttgttgtatgcattgactttaaaagagtttattgtgtgcacatttttcctttttctggtagaagacgttgttattttgctaggttttgtttctggttgaattaaatgaactctccagttaaatattttcctatggaatatgactttatcttcttttcttctcctttaaactgcattttggacacataatt

SEQ ID NO: 89427 - DNA, 1187 bp, Homo sapiens
aactatatgctggctatttatatacagttatttatcagttaatgacagggaagtgttctgagaaatgtgtccttaggggatttcatctttgtgcagacatcatggagtatacttacccaaacctagatggtaaagcctactacacactgaggctgtgtactcctaggttacaaacctgtatagcatgttgttgtactaaataccttaggcagttgtaacgcaatgctaagtatttgtgtatctaaacatagaaaaggtacagtaaaaacagagtattataatcttatgggattactgtcatatatgtggtcctgtcttggctgaagcattgttatgtggcacatgactgttcatgtaaggccatcagggaaggaagaacacttttttgacaaaaagcattgctggattttgggctttaataattctttatagatagactaatccagcaacttgttttcttaatttttatagggtgaatatgttcttaaacataacctaatagtttatgctagccagcagtactttatgggatgtggagtaacttctcaagcttcaatatatatagcaatgtcgatcgcatagaacaactattatcaaatacctttttaagagggaggggacagtgagatcattttgaattagtggtatctgaatttcaagaagcaaattaaatatttattaaagttgatcattgtatgtgtgtatttaattatggtgaaatttaaacactaaagtaaatagtataatgaaccccaacaaataattcatctgtcttcagcagttgccaatttataaccaatcttgtttcatctgtaacactgctcagtctctccaccccaaccccctaacctctactagattacatccttctgacttctggcctactggctttaacaaatcagggggctcccataaccctctccttgggtgtgataatttgctagaatgactcacaaaactcagggaaacattacttactattgatttattatgaagggtatcctaaaggatacagaagaacagctagatgaaatgataatttgccagaatgactcacaaaactcaggaaaacattacttactactattgatttattatgaagggtatcctaaaggttgcagatgaacagctagttgaaatgacacatgggttgaggtcctgagcacaggagcttctgtccccatgga

SEQ ID NO: 89428 - DNA, 1079 bp, Homo sapiens
gagccaccacacccggccttaaaaatcatattcttgaataaactgcttgcgttataattattgagccaaaagatatctgctttttacattttgcagacaatccccataagtctttttacccttgtcttatacttttaaaaaatttgttcctttataatactttaaatatatgactagacaaagcttttcttctttccttttttttataattttatttacagtttttttacatttgttctttccatgaattttagaataattttatcattttcttaaaactgcaccagaatcttaagtggaattacattatgtttgcatattataaaaatattgacacctttatgacatatcttccatcacagtggcatatgattttttattcactcacttatcaattttactaaaatcatatacattcttaacattttgatttattccctggcaattatattattgttactattataaactagcctaccccatttatcttttatttacatttcttagttaaaaggaaaactgtttctgttacaatatttgttttatctcatcactttattgacttttcttactctaatagatgttaggttgcttcttatattttgtaggtatagcattatggtagctgaaaagcagtctagtttttcattgcattagctaaaagctgcaagtaataatggtgaataaaagtagttcaatattcatctttgtcttgttgctcattgtgggtacgcttttagtatttcactctaatgtgtgttgcttactggtttcagtcaaatgctctcatttatgtttaaagtttctccctgtctctgtttgttcttttctttttctgtgtgtttaaatcaagaatggcttctatatattatcaaacacgcttttgacactcgttcatatcatatagtgtctcatttttatcaatctactgtaagtatgctgatacatttcctaatgttttatcagccatacacttgtaaaataaatctcaatactgtctgaatttgatttgttaatatctgatttaggatttttttaatggctattctttatcttgcattattttgaaatttttaaat

SEQ ID NO: 89429 - DNA, 1036 bp, Homo sapiens
aagggtagaaggggatggcttggatttgaataataccatattgacagtttcaccatttagaactgctgttttttgttttaatgttcggctttagattcatggaccacaaattgaactgagtgccaaggaaagtttgaggtagtgctatgttctctggtttggctgcagccccacttctctgtctttccttctatttaagtgattcaaacatttgtttcctgcctgccttttgagaaaatttggagtttgtgaaccctgctacatgagaattcctagcccaaataccttggatattgttagtaccttcgatagaggtagaaaaaattcaatttaatgtgataagtttggttttacatgtgttcagttagaaatgacaaacagtgtcttgaaaaggggatctggtccttgaaaattagagtgcatgaatgtgaaagcaggtcatgtaatggaattcaagattagaccttagatgtaaaaaatgaatatgtatttatatttgaaaattatcaataatgagatagtagctaaatccacaagagtggaattattcattcaacagtaatgtattaataatatgttgagcatctattatgagctagacatggacgtgctgaagatatagtggagaacaagacaggtaagccctcagctctcatgaagttgaccatctgaatggctgaatacagagtatactctcccagaaatagtggaaagcataataataagcatccgtgacttgagatttgggaaacattgtcagttaagaaggtcgaaaagtttcacatgtgttttaaagataaaacagtgtgaaagtcaacttagtaaaatcaaaaaagtctgacctgggagcccaaagtcctgggtttcaatctcagttttacaatcagtcataccaccatagacaagacacagcccctctaagtttcactattgatgaagcaagcaagttgattgagattgatggttttcaaactacacatcatcatgatccactgaaagtaatttaaagtttcacagtctagcatttgtatttaaa

SEQ ID NO: 89430 - DNA, 1070 bp, Homo sapiens
aaactggatgggaaaggaaaaattacttaaaattttattcatcttttgaaaatataagtgacaagaatagcttcagagaggttttcagaataagagagtcttatgtaataccaaagtattacacagattatgaaaataatagtttttgttctcgagttactcagtaaatatgtgagcttagatgatttctgaggatgttaatactctacctcataaataggagaaaatgcttgttttggtggcaaaagttttagaaaatttgggatattacacaaattaaggcattaccactcttagtttaccttttattgatggttgtatgtgttcctctttaagttttcacttttaaaagtgatgataaaatgtgttttattactccaattttattatttttgcatatgtaaattaatctgttttagtgaaatgatatgagtatttacaaactgaatctaagtttcatttcacatcacatgaatggctcaaactatttttaaggtatgtgatagtggaatgtgaagatcaagatactcagcagagagatccaaagacccatgagatgtacttgaacgtaatgagaagattcagccaagcattgttgaaggtaacccttaaatgtgagggttggcaaactgcagcacatgggccaaattcagcctgttgcctgtttaggaacatcccatgagctaaaaatggttttatatatttatttttatttttatttttttgagatggaggcttgctctgttacccaggccggagtacagtggtgccatctcagctcactgcagcctctgcctcctgggttcaagagattctcctgcctcagcctcccgaatagctgagattaaaggcgcccgctaccatgcccagctaatttttgtatttttagtagagacggggttttgccatgttgggccaggctattctggaactcctgacctcaggtgatgcacctgcctcggcctcccaaagtgctggcattacaggcgtgagccactatacctggcctggtttagcggttgaaaagaaatcaaaagaagaagaagaatttgtgatacatgaaaattatg

SEQ ID NO: 89431 - DNA, 1046 bp, Homo sapiens
cagtgaaagttagaaagtagggttatagtttctccaagtgaattaagtttcctttttaaactcaaaaaatgcactggggcagcatagtgaaatttttgcttaatatttggtcatgcaaaattaaactttgaaggaaatttcagtttctctctgtggcttcacaaatccttggaaacagaaattgaatctttaggtccaacttgaataaattcctgattctttgtcagctttagcaagtgaaatgtattctgtatccttcctgtgaaaagtccaactttcacagtcaagcgattgtttggtttaaagcatgctgctgctgttgttagggattatttataagtgcttgtctctcacatacaacaccatctcctttatattattttggtgctttgcaaatacttttaagttaatggaatcaatttttatgtctttactatatgttttataaactactcttctattttaacctcattaatcctttctgatttgttctagaatgagagactacaggcattgcttggagataatgaaaagatgaatttgtcagatgtggaacttatcccgttgcctttagaaccccaagtgaaaattagaggaataattccggaaacagctacactgtttaaagtaattgtgatggatatttaatgtgtatgattggaacctaattcttaagctagatcagagatactaccttggaaaactattacattgcagagatcacatctataattctagttgatttagtaaatgctagattgaagggtaccttttatttatcagtgtgttttgatttaagatcttcttttgttaccggtacatgggcatttttatgtaacatgtgaaatacttttatatctctgggttgttttttaatatttaatttttttattgttttatttttgtagagatgggtcctcactttgttatccaggctggtctcatactcctggcttcaagcagtcttcccacctcagcctcccaaagtgttgggattacaggcatgcgccaccatacccaacataatatttagtttttcaagctaa

SEQ ID NO: 89432 - DNA, 1052 bp, Homo sapiens
gcgatcttggctcactgcaacctctgccccctgggttcaagcaattctcctgcctcagcctcccgagtagttgggactacaggcatgcaccaccacgcccagctaattttttgtattttttagtagagacagggtttcaccatgttgaccaggctgatcttgaactcctgacctcaggtgatccacccgcctcggcctcccaaagtgctgggattacagtggggaaccactgtgcccagcctaagttaactaatttaaacttaatttagcttaacttcctaaatctttattacattaaactgctatactatttgcccacaaaactgtcttttaacagtctttacatttggttaatatattttaccttttgattaaaagctgttacggaaagaaaatctggacttgaaattgacaccttataaggtgttagccaccagtacaaaacatggtaagtgtattttacatcattattatttactttagtgtacattgtgtgtactttttcaaattgaaaatttttaagtatgttagagatacaaataaattccatttgtagcactgaagacaagttggaccttcctgcctgcttcccttctgtctttccttctttcctgtttctcagtaactactgattaatgtaactactggttaatgtagttactgagaaacaggatatttcagacattcctgacaatcctgtagacacacatacacatacacacacaccctcacacacacaaaccatttaagtcttttcgagatgaataatccctgggagtttggtagaagattccctaggaatgcttgcctaatgcttactgtaaattccatagtcttgctgcccttcctgctttatactagtagttactgagaaacaaaatacatgctttaggttcctatccttcctctggctactcccaaatctttttgatgccttaattactcttctcagtttcttctcagaatgatattttaaaaagtgcaaatgtgcatctttacaatcctgcaaaaagtcatttgttagctttcattttctctttggacaaagaccc

SEQ ID NO: 89433 - DNA, 1023 bp, Homo sapiens
acttcataaatgtctttaccactcaaatgaatgcatttggttttctatctgcttccatttcaagattatttttccacagacttaaaaaacaatttaaccctgcatttacttatgttatcttacagataacatggttacgagttatgggataattgacggttgacttttaactgtgtccaatttgatattagaattgctaggcccatgttataatttaaggtctcctgaacctaacttaagttttgatgcaagtgacttttgtaatttaacagaattctacaagattttctcttttaaatagtactttgagtttcaagtgacagacatgaagattgcatatttgagaattcagatgagaaaccagagacattagaaaacaaattgatattaaagttgcacaaactgcttttatattcagtagaatgtataacctggtttgcatttgttttcacatattttttttaactgttactgcagctggatattgcgtgatcacctatatacttggagttggagacaggcacctggataaccttttgctaacaaaaacaggtaacaattaatgactaccagtagacatacattgtatatgcccatggtttttacccctgaatctatgtactaacaagataagttgcggcctggcgcggtggctcacgcccgtaatcccagcactttgggaggccaaggcgggtggatcacctgaggttgggagttcgagaccagcctgaccaacatggagaaaccccgtctctactaaacacacaaaatttgccgggcgtggtggtacatgcctgtaatcccaactactcaggaggctgaggcaggagaatcgcttgaacccgggaggcggaggttgcagtgagccgagattgcaccattgcactgcagactaggcaacaagatcaaaacgccatcttagaaaaaaaaaaaaaaaaagatgagttgcgtaattgaagataaatcagagagtcttaaaaattcctttaaatgttaccttggaagaacatttagggaaagtcc

SEQ ID NO: 89434 - DNA, 1066 bp, Homo sapiens
agttccaaaattgtcagatattctctctgtaagtagaagttaaggaaatcaaaagatcgaacttaaggaatatgtttgtcattatctgggatgcagacatgagagagctagttcattgaagatacagccttagatgttcctccaccaaattgttcttgtcttcacttcttacatttacctctcttttacctcctgctatcttgtggctcaagcactctcagatcacctggtatacctccagtacagtgaagagacaagggcactgagctggggctatggattgttgcactgtttgtcatttcttctttgtagctttctagtagtgaaaccctatacttcaaacactaaatggggaccacactttatccacttggaatccccattttctcctagcctgtctttgagaagtatatgtgggttatttacaagagaaaggagtagtctgtaatggttgtgtgtggtggcgtaggattgtctggaagcatgtgccagttaagggttcttgagccggcttcgtgaattctctgtgcctcaatttctgcatattatcgatgagatattatctactgtatgtttgcgtatcagtcggatgaaatgttgcatgtataatatttggcatggcattttgcacaaagtagttcttcagtaacattgacttttatatatatataaaatatacgcacataaatatacatactagtttttctagtacttaatgctactgaaaatcaagtgtagctttaaataagactaaaaaaattattttatctttggaaacgatagacctattgatgtagttttgtgtggggatgtagggaaattcaataggaaaggaaaccttagaagatcacatttagtttgtcagtgattgacattgttcctgttctcatatagacactgaaggtatgggagaatattaatataatctcaccttgcttcatccaattcacaaggaataacaggaataaagtggattattaataaacattccacaatttaaatcatatatagtaactctagattttagattaaaaaaaaaggcacacctttagttaaaagagcagtt

SEQ ID NO: 89435 - DNA, 1046 bp, Homo sapiens
tgaaataaaccaaacacaaaataccgcatattgtatgatttcattcatataaaattaccagggaaggcaaatttatagagatagaaagcaaacatagagttgcttacagataggagtatgaaggggagtgagtgcacatgagcatagtttctgttttgaagtgatgaaaattttgaattatgttatataaaagttgcacaactctactaaaaattaaaatgggcaaatttatggtatgtaaattttacctcaataaaactaataaaaagctatctggaaaaataagatacatttgaggcaaaatataagggagcatgaacatttactgatacatgtgtagtgtgccttaattcttaagagattagaaaagaaagaaaatcacttttggttgagtgttagataattctttatggaaaaagtagccttctgaagtgactataaaggagtttgcatttgaattgggcattggaagataaatagaattcattcaagaggctttaataatttgacccaaactaaactccttaaactcatatatctattttttttaggactctagttttgattagaattccccactcactgtttgttaaatactagttgacatgcatcactctatcccagagttttactttgccttttagaagtacctttataataacaataatagcttatttctttgtattcaccaataaggaatctatcagattacatagtttagttagtgcccaataaaaaatacctttggttgcttaagtgaccaactgataccatgccaggcgggtagatcaaaatgacaggagtagggggtgataagccttgtgcttgatagagggttgataattcattggggcccaattaggaggctcttgaatgccaggtagaggagtttggcaattgggtagcaaaagagtggctaatacacatggtataatgaaaaacaaacctgccagcagcgtgagggtcagcttgtgggaggaaggcttggcatcaattaagacatgattttttttgtgtgtgatcatacattttaaagctcagttcac

SEQ ID NO: 89436 - DNA, 1009 bp, Homo sapiens
tgaagattttttacattgccagataaaaagtgttacttaaccaacaaacaaatgtaagactacaaaatcgttcaagagcaattctaatataatttacatatgttcacgcaaaatatgcttaggctgtcaaattagcacaacaaagaatgtgtttcactatcttttctaggctaatttgtcttgagctgttgtctatagagcagtttacagacttgtgtcttgtatcattttccagtgccagggttctgaaattcattcagaacctgttagattaaagctgcaccctgtgattatttgaaaagaattagcttgagagtaatgtcactatatttgagttcttagagaagtatgagtggaacttgagtacagttgaattattaaatatgcaagttagaaattaagtctactgaaaaatttacattttgagtcaggttttgtgtcagtactttagcagtttttgagaatgtgtttgatatcacagtgtttgtaaattctatgaaaaatgcattttccaaacaacttatacatgctttttatgactatgcctaatgtaaagaaaatgtattacattctgtatgtacaaagattaaaaatcaacctcttttttgtgctttaaaatgactttgggattaaaaaagcatatttcccaatcattgtcttcattccactacaaagtcacctcacagcatcttgctccactcggcatctctgtgaaagcaacatgaaatgaactgtagtaggtgtgtagtttggggaagtcaaatggccattttatgtatgtgcatttggtatcatgggccgtggaacagaatatatgttggacctctgaaaagttgtaaggggccaattctaagtattcttcacggcagccagaagttaatggtggtagcagctgaggtatggttgttggacgaggccgatttttttttttttaacatggaacaatgaaaccaacaacaaacatttttaaaattaaaatggataatttgtaaatagtttttagctttta

SEQ ID NO: 89437 - DNA, 1031 bp, Homo sapiens
ccgggattcggagagggcgcgggaggcaggcacacgggcccgaccccactccagcgctcaccggggacgcgggcgggcggcgacgggacgcggcgggggcgcggggcgggcgcggccatggagcagcagcggcggcggcggcggcggcggcggcaacactagcgaccgcgggcggacgagcgggcgggcagggccgccgggctcagcggaccgaactgcacagctcagcaaaagcgccctcgccctccgcgcgccgcctcctgcgagcccaaacccaccaacattttttaacgctccaacccatcctttgaagaaaagcaaaaaaaaaaaaaaaaaaaaaaaaaaaagcaaaaaaagaaaaagcattgatcggagagacggggatatatatatatatatatatatatatatatatataaaattttttttggctcctgctaaaattagcagggctcgccgcgcgcctgtgtgccagtgtgtgcgagtgtgtgtgcgtgcgggcgtgtgtgtgtgaatgtgattactccaggactcctcgggctccggagacgccattttcccccttgatatctctctccataaatcggtggcgcggcggaggcggcagagtcgggcgggaagcgcggggccggccggggcgcccgccgctcgccgccgcctccgcgcgcccgggggccccggcgccccccgagctagggcggccagctcgcggctcgccgtttgacagatgctcatcgccatggagttgccgcagcagcacctttgggggctcgggcgagcgacgggagccgggatctgagcgagcgccggggccagcggagccggagccgccgggacatgggtgagcacgcgcggcgaccttggcccgggagcccgggcgcccagcctccctccgcgccgcgggcccccgcactcccggaaccgggggcgacgtgtgtgccctgcatgcaaaagttcacgtcgccttgctgggtctttgactttgcacccggcgggaagggggagaccgggccgagggggcgggatgccgg

SEQ ID NO: 89438 - DNA, 1071 bp, Homo sapiens
attatagtcacccgccaccatgcccagctaattttttatatttgttgtagagacggggtttcaccatgttggcctggctgcgtctcgaactcctgacctcatgatccgcctgcctcggcctcccaaagtgctgggattacaggcatgagccaccgcgcctggccaagaccttggtttttaaaaaagtattgattaatagtagtgactaaaagggatgatttgatgtgaaatctctgtgaacctttctactcgttatactttagagctctattacgactggtgttttgatccacaaatatttattaaaatatcagcattgcagattgtgtgagccattgtgcctggtacacttgcttgggaaaggcctgctctgagatgtggcttttgccctgggagagtgggcagtgtatctacagatacgtgctttgctgaaatggaaagcattcttctgcagccaaagttggaacatgatcccaaatggaattttgctatttgtgtgatcaggcctagggtatagtcagggaagatttcaaagagtatgtgtttaggatttgatggaagatgtagaacaaagggacattcttggcgggtagaacagctttggcataggggcagcagtgggacagagttcaaatgcgaattgagaattgcctcaaggaaacaaatgcttatttcgaacatgtactgcatctggcagaagcagcatggccctgaagatgaaggtcagaaggctgacattgaggggcagacacccccatagcagacacctttgtggtccgaggtcttctgtccacagtgagaaggataaaacccagggccctctatgtcagactcaatgtgcctgttataattcaaactaatcaaccttccaactctctgaattagcaaaaattggtttgttcattgacattattattgattgtgaccagactctgatgggtgccatggggatcccaagagatggagtgaaagatgctctaagagcccatgaaaaccaggggaggagtagcagcagccagccatttaggtctaagtgctgaattgtagtgggagcccgaggggtttagtgtc

SEQ ID NO: 89439 - DNA, 1057 bp, Homo sapiens
tggggttcaaaagaggtatctttagaacaagaaatgaaattgtatataagcatttggaatggggatgggccgctctggggaacataaaactcttgtgatactggtacttatttccaagtgtttaatgtataattggagaaggaaataaacaagattcagtaacaagacaatgtttaatgacagtacaaggtagctagaggagatatatcacagagaaagggaagtggagctgatatttgtttagttctctggtatgcttagcatctcctttgcagcagaagcacaaacatatacgtgccagattacactttatgttcaaatgacaatgaacaaagcaatggcttaatcagacggttgagaagtcaaggaatttgaattaaaactgaacaggtagtgaggtgaaagagaactttgaaagactttattattatctgttagatggttcagtttatcctcattgcctccaagtatgtctaccaattccttcctcaatttataaatggtgtggtggaggaccagagttttcagggaccactaatacagaatatttgaagactggtggctctatggttcaaataacatttggagtcagacacaactgcccctgtgatttcaacaaatccctcaactttaattttcttatctgtaaaatggatgtgtctctgggttaaaatcagttagtaaatcagggttaaatagtataataaacttaaatcagatgaaaaacgtaaataaacttagagaatacctgatgtatgttaacaattcagattattttctttacgatgtgaattcctcctccctgcttggacaggaaatattatggtcacaattacttctttcaaatctactgtatttaacctattttggtattgtgctacacatattatttacctttttttcctgcaagattctgtgaggagaattagaaaaggcagatgagaaaactgatgcccaagagagtttaagtgacgtggcaattcagatggcacactggttttagaactcatgtatgtagaagcaactaacaacttttggtcaaaagttggcatcactt

SEQ ID NO: 89440 - DNA, 1036 bp, Homo sapiens
cattcagaaaaaccttgaaatcctccaagcacccagtcctgcaatggatgctataggtaatgtcagcattatacaactacagttaggctcaacctgaggctgagctgcaatcatgttagagaaataagatttatatgcccagaacagctagaagacaatacaaggctggtatttagtggcgaactatacagctgggtgcaatgtcagtccggccaaggagtgagcaccacggtctggagtttacagaatgttgccatggagaattgaagacttggggatgatctggaaatatggaaaggcttgggatctttttattcatttgtttattcattccttcgtgcaacaaacatttggggaacaccaattgcatggccggcattgcaaggatgagaggaagtggatataagaacagattctgtgtattttaaaaaatacagaaagaactatgtataacattgctgtggagactggtttgacttgagtagttactgcaagttggtggctaatttgctttggtcttttaaggcgagatcagtatgaaaagtctggaatagatgaattcctaaagattaaggctatttgaaactgcattactgttttacctacagtatttattatgacatactcacattgccctggtttgggtcttcaagcaatgtgaatgaaatttcagctgaactttcttatggccccctgcctctaacatcagattcccttaatccaaccctcacaccatgtaccagaattatcttcctaaagcttagatttgatattattccttctccactgccattccttaaatggcttcccattacctgtaagataaaatccaaactcgttagcacaacattcaaggaagttcatgactttgccatgaccttttatttccagcctcacctctcatagattcccagtttctaccatacttcctagccaaacatcaattccctgtttcttctgcataatcctgcacacgcctgcccaggacgtggcctcacgtcttccctttctctgctacgtcttccttcttcctgct

SEQ ID NO: 89441 - DNA, 1053 bp, Homo sapiens
tttgggacttggagatggctctagaagaagcccttttgttgacagagttttggggttctaggttgtaggtgttaatcataatctttgtcactctctccctgacatttgatcaattatttgggctctagatatgtggatcagctaaaaatggcacaaatgaatgaacttcttttctttatagcccgaagatattccatagcatttctgttaccattaggttttttttttttttttttttttttttttttttttttttttttttttagctttggggcagttattttcaataaaaccactaggaatcatattatttctttagcacagggcttgtgtccatccttataccgggtgttgtggctgattttgttgcatttaaaatccaaagaactggctagaagagactttctagggtgactgactcctcacagtttgcccaaaaaatctgtcctggtttcaagactgaaaattctgcatccaggaattgccccagttcctagcaaactgggacgattggtcaccttagtttaacattttggaagacaaaggaacttttagaaattggtttgttttgccagaacatagaggttgtgctctctcctcccccattacaactttgcagtgatttctggatactctgtcgtgaaaccaaaggtttaatctccacacatacagaaacttctgagattcatgcaagaaaatgcaacagttcaaatcaggctctgaaagtgaggctttgcattggagttgggtctcttaagatatgaaaatgagtatctttgtttctggccattgagttggccagttctttgtgtgttgttgtatttttgtgtgggtgggttgtcttgagtaatggttaccctttgtctccatcaccttcactgccaggatttaagcagcaacccacagttttgggagttcaaacccaaattcgctgccctaaaaagagaatacattgtcctgattaggtaccacttttcctaaagccactgattgttcccaaatatagctttctccccattggaacacaccagaataatgttttggaatctgtac

SEQ ID NO: 89442 - DNA, 1115 bp, Homo sapiens
cttacatttatttatgcctagcactgttactttccagaaatgaattaatacagctatcatcactgagtctcaattacttgatagatgacaggaacatcctctgatctctatgggatgagaatgttaactttattacccttaattcctgctgttttgcaaccagagagtaagcaaaggctaaagctgagggtgagatgtagaaaccttgcctactatgtgtgtggaaaagtttagtggcataaacttgcagaatttacttatttgtatgaatgagaaatatgtgatcagtaatttggctcagaatggatgaggatgagatttcgtaagcaacacaccagcatctaatcctgaaatcaccttctggatctatttttataagttgtaccactctttgaagcagtggacatggagtggcctctgggaagcaggtcctacactaggagctagaaaggaagccctgttaagctgatctttgagctgctagtgattcctactagggagtcacctgaatatatgtgctgactttgagctgctagtgattcctactagggagtcatctgaatatatgtgctgactttgagctggggttggcaaactgtagcctgtgggccaaatccagcctcctgcctgtttttgtattgcccctgagcaaataatgttttttacatttttaaaaggttgggaaaacatcaaaagaataataatattttgtaatatgtgaggcatatgaaatttaaatttcagtgtttataaataaagttttattggaacacagccaagttcatttgtttatgttttgactctgactgctttttcttatagtggcagagttgagttgttgtgacagaggtactatgaccttcaaagattcaactatttactctctgatccttacaaaaaatgtgcattgatccttaacttagggtaaggacatagagtttcaggataataaaggttttgttttattttgttttgctttaataattcagcctccaagtttggaggctggggggaattaggtgttatattatgtgctgctttttgttgttgttatttaagtgaaccagttaattttgctgaagtcattgcttgacagctccaggcaaagacagctt

SEQ ID NO: 89443 - DNA, 1070 bp, Homo sapiens
cccaggttcaagtgattctcctgcctcagcctcctgagtagctgggactacaggtgcatgccacaacaccgggctaatttattttgtatttttagtagagatggggttttgccacgttggccaggctggtctcaagctcctgacctcagatgatccgcccgccttggcctcccaaagttctgggattacaggcgtgagccaccgcacctggccttagctcttctgttctattaatatcaaaacagctcctgcttagtcagctctgtgtattttgcattggtagttagaaacatctgaaatcttgtgtctctcggggtgtgtgtatgtgtgtgtgtgcgcatgcacgtgtgagcgctctcctatccagatatactgtaacagagctgaagcatcttaattctagaagtacctacagagtttaatggggttttcagcctaagtgctgtgtagggtatagaaagatgttgctaagaagtattgatctcaggacatttagggaaaaacccagggcactgtatttaataagtaactgtcaaaatatgtgatccagatgatagtgcatggtgtggacaatcacatctgcccagcaccttgataaagtgtactcacatctgcccagctgttccttcttttgggtttgctcttcgtatagttaagcaaagttgttatttctccctgttttataaactggggaaaggactctgagggtttaaatggcttgcctgagcttacagctaattactgaggttggtggggtggggggtgtttgggactcaaaccctcaggtctcctggtttccagcagtggaagctatcttcgaaacattccaccctgccttgccctgctggggcatctttaagaagagaatagttgagtctcttgaaactcacctggttgtttctgctgcttggccctggctgtgggtaaactccagcactgcagcttcatcctggagacccacagcgcctttcttgactgcccatagccgtatccctgctagaaaacactgggcaggtcacagcggcagtgaggcgtggtacgaagtgatgggctggcagcagcacagggct

SEQ ID NO: 89444 - DNA, 1809 bp, Homo sapiens
tgccccataagtcacacccggatcctactgcttgctaaaggtgaggccttgctgtccttggaggttttcttgaaggttctttggtgtccaggctctttatgttttcttatttctgaaaaatgggaactgtgtatcagaagcataggtgagtcattctttttgtttgtttgtttgtttttgagacttagtctcactctgttgccaggctggagtgcagtggtgcgatctcggctctctgcaacctccaactcccaggttcaagcgatcctctcacctcagcctcccaaatagctgggattacaggcatttgccaccatgcccggctcatttttgtatttttagtagagaaggtgtttccccatcttggccaggctagtcttgaactcctgacctcaagtgatccacccaccttggcctccgaaagtgctgggattatggcattagccaccgcccttatccaggtgagtcattcttttgtggaacccctgaatcatagagaaagccaattggctgtgcaggttgctttcctggacataacaacagctgccattttgctacttagaggagctgagaactttgccaagcacttgacacacattgctaccgaatcttccccacaaccgcaatgtgatgttactatccccattttacagatgactcaaatgtggcatagagagctccaggaaattgccctgggtctcagaggcagccaggaggttgtgataccagtgccacaccctctgagctccaaggcagccaccgtggctcctcatgcggtgctcaggcagctgaacccaaggctggaatcagagtttctcacctctgactctgccttctggaaaaccagcagagaggtgtttttctggtccttccattaatctctttgtaaagtgagaccacaatagctagatgccagggaaacgagagagacagttgggtcgaatcttgagaaagctgtataagatctgctcccaaacttcatgcttttgtcctctttttctgtcatgttccacaaaattgatgaaacttgtctcaacagatttaggatgctcaagcacattctctcagattgtcttctgactttgcagacacagggctctgctggcctctggctctgcagggtctgccctcactgcacatactcccatgtctactttggggccattgcaagggattggccctttaccaacaaaagggtatattttgatcctttatggtgatgagagaaagggtcagggaatgaacatatgatgaatgcactaaattggtaaaaatacatgaaatccaaaaagctgttcttaaacacaccatttcttccctcctctcactggtggactaagcctgtgacccagagcactgaaggacctgaggattcccttagaatagagtataaaataaaacaaagataagagaaagacagagatagaaggtcagagaggttgaagttttctctgtttcttcctcctaaggacatagaatttttctagatgacttaaaatgcatatatgcatctgtgtgtgtgtgtgtgtgcttgtgtgtgcattttaacttcttaaaatatgtcataggttcataatagtgtggattataagaaatgtagcaactttactaatgaactcaactttactcctgaaactaataagagtttttgctcagcactttaccatatggaatgatctggtttttagtaaatgctgtctcctgttcatttttgaatataatccagatatgaaaacaagtcttgcctgaagcaatgagggagaaatagcagataggatctagaaacactggactaggtgagggaggttg

SEQ ID NO: 89445 - DNA, 1209 bp, Homo sapiens
atatgacccattcacactgtggatgaacgagttgcactttttctgtgttgaaaaggaacaagaatgcatatggccatgagggggacttttccttaccctcagaaggtgggggaagagggcaatggtgtgaaagaatgaattagttctggcaaatcttgttagtgtccattgtaagcagagaagctacctaagccatctgtggtcacttgcaaaattgttccttgtttgttcaggctccccaccgaagcaaatctttgtggcttctgataatttgcatattgtcacttgtttgccaactagagggtatctggacatgtgtatgtgagagggcatctgcgtggacatgcatgtgaaatctttgtggcttctgataatttgcatattgtcacttgtttgccaactagagggtatctggacatgtgtatgtgagagggcatctgcgtggacatgcatgtgtgtaccgaaaagagcccagcattggtatgacattgacatagatgtttggggggcctggatttgactgggctctaagctcagtaggagaggaaggaatcctgggaacctgtttatattattttgggatattcctagtcaccatctccggtcgcctttttgtgcccccttcccttgctgccctaccttcccatgagtcccctgctgccctaccttctcacacaattttgcctcaattcttgtgcttaatgggtggtgtgtgtgagcaagaggcagaacgtatttagggcagcttgttataagctaagggagatgttagagtagtatttgctaccaatggatccttctatgtcaaagatactgttgttttgtctcaattaattctacagtgtttatggggacctattgtagaccctcctgcagagcagcagtattcgggtgctgcagctgtctaaaggctgcatggccaccatgatttctgtcttccagtggtgagcatcacgtgctctgtggatgggatgaacaaaattcgggagtacgctcatgaagggactggttattgggttctgatggtcactaaaggattcccatctgagtgcttgtagaaggctgatgattgtgaagggcatgtcttcaggacggttctctagtaggcttctaggattccagattggccaaagaaaatggtaaatgcaaatctgcaaaaattaaacagcacaaataccgtttcttttcatcatcacaatatcctatggg

SEQ ID NO: 89446 - DNA, 1025 bp, Homo sapiens
aaagtcttctctcatttaagactcactacttagaaatatgctaattctgagagacagaataatgcacttctactccattgtgatcacttttgcacagtttggctactttattcaaattcctgtattgtactgtctgatttattccagagagcaggacaatcaagagacaggcagaagtagaaaccttctggagatttagcagttattcactgtcagagactggtggttctcagagctgatcatttccctggacatgatcacgtctccctgtgctaagtttatttgcaatctattaaaaactacacaaggcatgcgggtctcgggaaaaagtcactgttttgtttcaagtgcaggtaatcaaatttaagtgtgtttgggtacctgttactgatgttccatagggaccatttgttcattcagttaacagtggatgagtgtggattctaaggtagtcattgtactcatcattaagaatataaaatcaaataagacatgtcatttgcctttaagaatcagacaagcttgagtcagataggcaaataaaatggtaattataaaataatgtatcaaattcaatgaacagaaagtataatcctccaaatcctattgggggcagggagagaaagctctgggatggagggaaggtagtcttggagcaagttttgaggaacaagaggagtcagctagaggaagaaggagaacaggcattccaggaagaaataatggcatatgcagaggcatgggtgatgaaatgatagacttgactagaagaaatgcaagtagatccatttgaatgaatgatgccaaaggtggttgggagcagaggtaagaactaggcagtgggaagaatgcagctaagaactaactagtgcttattgaatccttactgtgtgccagatagagttctaagccctttacatgtgtatttcaagtagtctccataaaaccctaggcagtagctactattgttatctttaccttacagatcagggaactgaggcatagacacagtaggtcatctgcct

SEQ ID NO: 89447 - DNA, 1046 bp, Homo sapiens
aatttaagatatctcctaggtaaatggatatcactattcataaagaagggaggccttgaaaagaggatgctgcagcaagtcaatgtgattcctgttgagtttaaaggggcctatggggacacccatgtggtgatacttgttaggcagctgaatatttgagttctgcagattactgtgggctttggaatctgttaatagttaaaaccatgggtgtggcttaatttgcctgggatagcttgtaaagtcttagagctgtggagagatctttggagattacaagcatttaaaagataagcagaggcagaaaaaaaaagtgtttgcaaagagtggtctggctagagcaggagaaaccccaggaggtcccggggaggctgtggtttatgtcacacaggcttttgcaccgcagggtcactgtgacttttgagagagtgttttctgtggagctgtgagatcagaagccagtgaagaagatgcagaaactgtcatgtagactaatctttgcagaagcctgagtgtgacgtgaggtctagctatgcatctgtgtgagtcaacttcttgaaaactcagcgtggaacatctgcagaagcctagagtggtgcggctgagaccttatctgcccttgttatatgggtagcactaaattcccttagatacatattgaatacgacttgctttattctgtttggttctgtgcattttactatggagtatgaagaaaaattatataatataggttctgccctcaaacaagttttattctgtctattctacataagacaaacatggaaaactaagagtcaatatgagctaaatggtcaataattcagctgtcagatactggggaggtaagagtttgctggagtccttgggatgcaatgagtaaactctatcctgaaggatggaactacggaggattcagagaacatgcgatctgctatacagatatgtagatggggtggtatgcaggagtcagggaaagaaggcagtgaggaacctcgctcttttcttgaccctggactttttccagcctcttttttcaggaactt

SEQ ID NO: 89448 - DNA, 1038 bp, Homo sapiens
gatccttcttgctttcatcattccccactggtctaagagagacatcaaaaggagcagctagaagagttacagtgggggtgggagaaagaggaagcttaaatggtatcagggtttctagatgataagattgtcctgggagccctttatagacgagacacaagatgttctaattatctactgctgtgtaacaaactaccccaaaactcagtggcattaaaactagagccattttgtcatgttgtcagggttgtggatcggcctagtagtgatagttcctccataatcaggaactcagttggagtggctgtgatagtgtgacattgccccacttgtgactggctctggctgtgggcagagtctgtcagctcttctccatgtcttgtctgctgtatgaccctggtgactgggctgggatggatgcaacagctggggctgcctgggttccactctgacctcttgacatggctgacttgtactttccagccagcatggcaggtctcggggtagttggacttcacacatggtatcattcagagagaatcaggtgggagctgcaaggccccttatgtatgaccctcagcatttccaaatatcccttcccccacattctgttgactaagcacagtcactaaggccagcccagatgatcaggctttgcagaagctgtgctttttccacatggccacaggcgggagaggcaccactcgctaaactgacagaaaacagggtccgcagagaggtttatgagactgtcagaatccatgtgggtttttgtctactgtctggaagagccctgagttaggagccaagagacctgggttgtgattatggcttcatctcgatctaaccaaacttagaattgttttgatttgtgaataaaaatgttggtcatgatagttttatattttattctactagaccctggggctaatggaattattctgattttagaagggaggaaaatggttctttacacacacacacacacacacacgcgcacgcacacacacacacatatccttatatgctccataacct

SEQ ID NO: 89449 - DNA, 1131 bp, Homo sapiens
ctgaacctgtttttctcttcctaatgccttgtttgatcccatttttctttattatgaaatacccagtggctggtgtgtgtgaggtgcatgttctcagtttttgtgttgaggctgtctagttctatttgatgagcaatgtgtctgtgtgagtatgcaaatatgctggactctttgcatgaaggatttaaaatagaagctgacctaagaaagttgattaccactcagatagacgatcacataccctcgttatgagtcctgaattggttgaactttgtgactaaatatgatattcttggaatttagcttactgctccttgaagctgagcagggctatgcaattgtattttctttaacatgctacgacttgactgcagacgccctaaacccctgatgtcttctgcatgtacgatcaaaaattcctagctccgggaacttgctgtgctgagcagacatccagtaaaggaggaaacccaaagcctgtgtcccgacggatatataagtgaagacgttagtcaaaacaagacgttagtgctatttctcacccttgcaatggacaggagcagccatattgtatgttgcatttatttagacccttctgccgagaataagtgctctgtaaacatgccctatttagccctcaatgcatatactgctgcctttctgaggtcttgaagtcaatgaaataaattactctaaaaagaagtgctatgcagccccttagaacagtaaacaagaacagttcaggtcttttcaggaacctgaagccaagggatggtttgtttttttggtctccaggaagaaccagtacagaaggaggtattgacctcgctactttggctggcacccaccaggtcccttcctggcgctcacattccccaagtgtgtaactcaacacctgtccttctgcggcaaacagagcttacagtgatggctgagcccctcctgccctggccctaccggcagctcgcacctttcacttaggatttcaaactctcaaaaaccagagtcagagaataaattctccctcaggattctggtttgggccaggaaaaaaaaaataatcagaaaaacaactcccacaagaagtcctgggatcagcacagcaatctctttctagctccagacctagat

SEQ ID NO: 89450 - DNA, 1472 bp, Homo sapiens
ggggtcaggctgtgaataaaccactacgtggctgattttacatccttctctttcaccacaaaaacctcaatttccctttttgtggaaaacaaaaaccctctttcagtgttccatcaaggggactgtggcctttgaattgcacggtgtccctgagaaattttaaagattaatcagcttttttggggagtggctgggagaggccctattcctgtccattagggagtagcaggtctccccttctgttccttctgaccaggctgccatcttcatgtgtagatgaggaaattgatcagcctatgaatgatttgcaaatccacagatgtgtggctgagaccctgagggcattcatcacaggatctgcccggtccaaaagttcccttctcccatcacaattcagggccttcacagagctgggggagtgagtaatgatgggggcaaaagtcacacactgaagcaaatgaggacaagccctgaaaatcagaccctgttgaggcctggtccaggggctttctagtacactagttgagatcatttctaaaaggaaataacagaataaaatctcagataggcagtataagaatttgtaaatggtaaatgtgctataagggtgagtaagatgcattgcttattgcttgagaggatttctttgcccttcagtgtatctggatttgtcattcatgagctattaattaaattcgtactctctgctagtattcgtttcttccctgggccttcctgaagactgcatgtgtgtcctagctgtctgctattccagctctcctgtatattctgggagtgtgtatgaatcaacttaggcccttgttaataccattgttcttgcaagacataaaaagaaagtgaaaaaatttagtttgacattctaggatcttcccatttcacctgaaatgttatttaaagacttatctcttaccagtttctgacttccgtgaattccctgaccacacttccaattcccacttccatacttctgtttacattgctctgaccttaaatgtctcctctctctccctatctagtcaatacttacctctccttgaagaatccccttccttcctggtgtcctcagctcatgccttccttacctctaaacttctagagcacctctccgcagtaacagtcatttcctggcaaaatgtgtccctccattgttacgtttcttcttttggactatttaaaattcacttattttattacattttatgttgctttctcttatttaggttagaaattatcttggggataaagggtttaatttattggcatttcccacagcatatcacataggaagtactcaataaatacaaattgactctatatgattaagttttagacaatatcgaagtgtgttatgttccatttctactcctaaggagttttgctatccagtaagaagagagttatttataagtctacatagaattctacttagagatattcactaatataatatt

SEQ ID NO: 89451 - DNA, 1553 bp, Homo sapiens
cttttatgtgtaacagttgcccacaaacttagtggcttaaagcaacaaaaattttattattttatatttctgggggttaaagtcagaaatgggcctcactgggctcaaatcaaggtgttgacagagctgtattcatttagaagactctaggagagaatgtttccttttctttttcagcttctagaagctgctgtcatttcttagctctgttcttccatcttaaacctagtaactcaagtcgaatcattttcaacctgccatctctctggttctacctattctgtttgctcttccacttttaaggactcttgtgaaaacatttggacctacctgcttgatctaagacagtctatttcagggtcagctgattagcagccttaattctgttccgctttaattgccctttgccatctaatatattcacaggttccagggattaggacacaggacatctttgtggggccattattctgcctattacatcttattttagtagtgctaataacttggattaataaaacattaacaaacaactttaccttgcctttatctccttgatctgtgactgctcctccaagcacaattctttatactggggaatgaaataattgctttttaaacaaaaagcaatttgctataatttgtagaactgttggagtcataatgctttcaagatatgttttaataaaaagatacttgtatatttgtaaaagagtctgactaaatattttcattcatctgaggttctgggaaatctgattttaattatcagtgatatctgaatttggattcaggtctttcacatttaaaataccctgaaaggataattttggttattcaacttgtatcaaatgaatgacagatacagaagagtttggcaatgtgttcattaaatttaaaaaccagtatactgggttatcatccagcaagtgctaactgtgtcttggcagatgtctgatgtccgagtaggagtgattatggttactgtgtgaagacttgactctcaaggagttgcaggatcatacgtgggaagtggaggggttcccatgtgaccttctatgaagatcagaagaatagaaaacctgaagaatagattttggttggaagaatagaaagtctgcctagagtgtctttggaatgccagaggatgagatcgtcttgtttactaagagttgtcacggttcccctcacctcacctcccaaatcctggtaaggaaccaggacctgccaaggtgaagcactgatagatttggctggccttgaatctgcaggtgctaaggtttgggttattattctagagcgggcattgtgagtcatagggctccaaggattcaatggtagagttacgtcacctcctttgggcattgcaaagtgagcataggtatttgcctactactctgctgacagcttgggaaggttgcccattttacctttacgctaatgacgatattacctattacacattgtggccattacagtgtgcacaccaggggaggagacagcaagaaagtggttatcaggacagctgagggctggcactccttaacacttgt

SEQ ID NO: 89452 - DNA, 1048 bp, Homo sapiens
acactcagcccttatcagtgccattagctttgctccttggctactgaccatctcagtctgaggtcttctgggagattttgctctggtttcatgtcctctagttagcaccttttttgtctcctggccctggtccttatgccaagatggggtggcagagaggatgctggggcaggaggatgcggagcacaaaagtatagctcattggctggcattgcttttcatgatttgaccatccagaagcagctattgccatgaaagaagataatggcaggagaaaaggcaagatgacaaaagaatccctaccagaagatttgggaggttgttactgacttatttcagaaagtcttctttcttctctttttttcctgctcaccaagtacgcattagccccaggatgtctgtggggagggccagcctgcctctgtgtccttagcaacctccagggtgtctccctaagtatgtcccagggccctctgctagagctctgcctcagagttgatctatctgaacaggttaaataaacaggtctgtgtttgggttaattatcactggttctgttgctctccattactgctccatccgggactctggccaaggaacagatgggagaggctgcatcatcacccctgcctcctcattgtgtctggctctccctccttctctctctctctctctctctctccccccctgtcccgttacccctttctgtctcactcccttcctccttcccttcctgcctgcctctctcttcctccctccttctcttattctccaccttcctccctttctctctctctcctcttctctctcctagccctgcttccctgccttcccttccccctccctatttttgctctttctctctctctctctttctctttttggctgagcaaataggccagatggtggtgaggggaacagacaacaagtgaggcatggcatatggggagcttgtttaatttcggctcctgtagggaagtagattggaggaggtgagctacaaaagcagaaaatggaaaggggaagggtaagaaaaaaaagaaaagaa

SEQ ID NO: 89453 - DNA, 2943 bp, Homo sapiens
ggaggcagggttcagactctgtcttgtcctgaggatctcaaaatggggagtcaataaggagactagggccatggagccttggaagtgctaagtgagcatcaaaggagggagcaggaggaagccttggagggagaagggccatcagggaaggctcctggaggaggtggtgcaggattgttttgatgttcaaggtagttggtaagaggcggggtgagcaaaattatttcatagaacttgagtgtccagtgtagtggtgaccatcccttctctggcacccttccttgatctggaaggcacacacacacccaggagtgaagagagagcttgaattggggcagggagatgtggtcaaatatgcagggtagaggggtcactctgccactctgccatttctgttgggatgtcttgaaggtgtctatgttgtcagtcaggcagatgaccatttagaaggtggctgtaatagttcaagcaagaatagtgattaaaatatggggcgtcataggagagatgacagaggtggaaagggaagacatttatgtagtgggactgcctttgagaatcactggatgtaaggagttggagagaaaggagtggatctgtaatgatgcccacatttctgtaaaataggatacatgatagtacaatagtcatagcgttgctagcttggcacataataagcactcaataagtgatggtgataaataatcatgatgaatattactgtgttttttaggtgatccagtgagtggttgccttcaggccatgttccaaaatggagaatacaggaaaaagaacatattttttaagggggaggtggtaagaaaagtaggatgatatgtttttaacagaatcaagttcacacaggggttatcaaatgtgatatttggggagtggcgtctgagttggaatatctctttgttcccccataatgtttagcttagtgctcagaacatgcaaggcatttaatagatgtttgatgaacttgtggattaatgtatattctgactcttaacaatcaggaactatcagtttagaaataatcatttattcctcacatattaagggagtggcaattaatatcatgcatgggacacagtaaagaacaagcgggtggggtctgtgccaacatggagtctgtggtctggtatggccgtgaggacaataggaaagctacgtgcacatgtgattggagacgattctgcatattgtttctgagtgtgtaagcactgtcttcaggtaaaggtgaggaacaggtagggtgtgctatggatgcatacggcacctaagttatattgaaccagcctcatgtttttatatagtgtctgatggccagagatagaccttggcccaacagttagtcacatgccagccccagccttggctgctgtttaatgctgtgctgcaagcacttagggaagctgcatgtgaatggaggttcctggtgactccagcatcaatcatatctactctgaggcttctacaggtgatgaccaggtctccaaggtcctgcttcttccccatgcatcctttcagggataccttcatgacccccaggggttttgctcttggttctccttcatgtgggttaacaatctcatgagctttttaaagtttatatttagaacaactataggctcacacttctgggacctgctccaggaggtgttacagtaaggactagagtcattcagcatcccaggaaaagggaactgaaaagagcattagaaatcctcagaagaaaaaaaaaattctccttttattaagagtgaaaataattctagaaaggagaggtgctggcccaggccacacagctcgagaatggcagggaggagctttaacccagacatcctggcctcccaatccagagcttgctctactttttatgcactgctccacattgttgtgcatgtgtgagattaagtacgctgatgcctctgtctgtttcctacatttcccatgagaaatatgaaagtcagtattttacaatatgcagtctgtgtaactcagttattcagaatgttaagaggtgttagaggtcaaaaaaattctctgagcaagaaacattgggaaacaactggttcaacaaagctaatctgatgtctttgcagtaggatgtctcaaagcctttaatgttaataagcatcacagatcttcaagtgtggttgagtttatgttgtttcacaaatttattaggtcacaagctgatatctaggagatcagctatccctagactgcactcctagttctgattcttatgtagagacagcctccctggcagagagcataggtcaggttgtatttgtaaagatgctgcatggatctatgcttctgccttgggaggctgagtggggtggggaggctggcagtaccctgactgcactggagtacaggactctggagaaggaagcatcctgaaacaccaactccattgagtgtcactcctcctgctcccctcccactagaggaagaaatggagggaaagatagaagaaaggaaggaaggatggaaaggatggaaaggaaggatgggaaggaaggaaggaaggaagccatttcactgctctcaaggatcctcatgccctaacaagaagaaggggtgcaaatatatttctcagagttagtataaaagatgatctctctgtttcctatttacttaggaagaaatgtttagacatgtaggcctagagaggcaaagaaaataaggagagcaaacaagaacattggtttacttttccagaggaggaagaggagagcacacaagcctggggaagagcagaacatgatagttttatcagcttcagtctcactgcttttcctaacaaaacttcaggacaattcctgatcgtggtcaaacttcaagtagctcaagaggtcatgctttatgcagtgggtcagttgatatcatgaactcaatccaagactgcttgagatgccccttgaaagg

SEQ ID NO: 89454 - DNA, 2188 bp, Homo sapiens
ggtaaataaaaatgaaagttaaattatccagagttgttacagccatatgtgttcattcacttgttgttttctgacttctctgatatgccaatgcatggtgaagcatccaatgagtggtactgacagttgttgctttgagctcacaatgaagaaggatggctgggtgggagcagggtgggatagaaagtgaaggactcataaatgatgcaagattgagttaaggcttgaagaacaggaaagatttcaagtgggaaggcaagagggaggtgtgatggggaatgtctagctctgggcttaattgccaaagaggacttcggagaaactggtttattgataggagaagtaaaatactggtgtattagtcaacttgggctgctataacaaaatatcatagactggctggctttaacaacagacatgtatttcccacagttctggaggttgggaagtctacattcaaggtggcagtagatagattcagttcctggtgaaggccctctttctggtttgtggatggctgccttctagctatagcctcacagggcagagaggggaagctctgctgtttcttcattttcttataaaaacactaactctattatgagggctctaccctcctgacctcatctacacccagttacctcccaaaggccccacctcctaatatcatcacactgggggttagggtgttaacatgaattttgggggagacacaaacatctgtccgtaacaattgggaaccaatttaaattagatttgggttctggaacttaaatcattggacaaacttgggagatgttttagggtccaagtatggcagtcatccgatggatgttttgaaggcatttggccacctgagttggcatttaatcatgccagacaccaccagacttcttccgggtttcctatctccatttcactgctctttcagagttctgctttgtagagaatataagggaagggaagacatgacccctgctctcaataggcttagctaggtcataaaaaatatcaagttatgaaagattttaagaacaaaactagctaagatgcaaagtgtgtagggtactgacagtctgtgttataaatataaaaagataggagaccactgtgggccagttgagtaggacgtggctctttggggcaagtgagatttgtgctgggccttgaggttatgggctgtggttatgatgaggctgatggagtgggaagcagtatgagcaaacttaagtgcacaagggtcagcctggtatttgggggtcatggagaggtatggacagaagagcattatatttagcacttactatctcctgcaggacatggcaaagtaaagttttttgtttgtttgtttttatggaatgtgtagacagtgaaaagggtaggcaagggaggagaaagaagcaggaaggtaagggagagttaaacatgctttccacatcagcctcacccttctgttccccacagctagccactgctagtctaggagaacagttcacaaactcacattctttagctggaagaccttcacagcttacctagcgacaagattttgagagagtttgagagatagagcagagagctggaaggtaagaaagtagatgagagaggttatcagatcagcaagggcaaggagttcctaatttgatttgtgtccattctttactttccatgcccctttctctttttctaccactatttgacaatgaatcatatggaaattgtggtttctatttttattactatttatagttatttgcaggttttattgttatttgatttatcctttatttgtcattttgtttcttgcaatttcattcatatcttctctcttttgttataatgccagaaacttgaaaggaggaactatgctttttcgtatttctcaaagtgtaaacagttttctttttcttagtaaatccttaataaaggtaacttcaatacatttggaaaccaggcaggcgtattagtcttctcaggctgctataacaatataccatagactgagtggcttaaaaaatagacataaatttttcacagttctggtagctaggaagtccaagatcagggtgctggccaattcacttcttggtgagggctctcttcctggcttacaggcagctgccttctcattgtgtcctcacatggtggagactttctcttcctcgtcttataaagccactaattcttt

SEQ ID NO: 89455 - DNA, 1033 bp, Homo sapiens
cttatttaatcttcctaacaaatctgacggaaatatttagcagataatgaaattggagatttagagagattaaacgacttgtctcaatttcacaccaccgagatttaatcctgactcctgagtccagactcttaagaactctgtttgaaagtattataggaagcaatgcataaataacacagtgctgtgtagatcaagtaacattaatttgttgctaaacctatcacaattcaaaatgtgtcaaaggataataatgaggaaagtctaagtcccaagacatcccaggtacatcatttatgtttgttagagagatgtgtttctgaccgttccatttctagttggagatgagtctcttatacattgtctcagcgagtactaaggttgaggcggggtggaggactctcttatcaggagggagaacagggaaatcccagcttccatccgtcccatctattatccgtgtagcgtacagctctaattttgccaccgatgcagggagaggttagtctggacatagattactgaggcagccgctgatgtcaggacaccccagagctcatagactgagagtacacacacactcctgagctttagccaaattaagaagtttgatcaaataaatctgttctgagatcattttctttactaattggcactttccttggagcaaataaaacagctgagaatagatctcaggaccttaaatcttgagactccagaagtcacagagctgaaagaattttttttttttttttgagacggagtctcgctctgttgcccaggctggagtgcagtggtgcgatctcagctcactgcaagctctgcctcccgggttgaggcgattctcctgcctcagcctcccgagtagctgggactacaggggcctgccaccacgcccggctaattttttgtatttttagtaaagagggggtttcactgtgttagccaggatggtctcgatctcctgacctcgtgatccacctgccttgacctcccaaagtgctgggattacaggcgtgagccaccacgcccg

SEQ ID NO: 89456 - DNA, 1170 bp, Homo sapiens
agcctcacattcctgtgctgtatgcaatggctttaaactagattttagttctcaattctggctgcatgttggaatcactaggaaattttaaaagcagcaaccaaaaaactccaaaaaactgacgtctgcatcctatcctgtaccaattaaaccagaaaatcaagaggtgatttttaggtatttctttcaagctccccaggtgatttgtatgtgtggccaggttgggaacttctggcctgcatgcttgtggagaacctgggctccttctcagctgagcattgtcaggagttgtggtggtggaggctcttgttacaatagctgtaacagtactagggtaatacatgtccctgactggtggttccatttcctatcagacctttgcttagcttggtaaacactgttgctgaaacagaccttattttaaaggtggccatatagaatattttcacctttaacttctcactacttccttgttgagatagaggcctcctctcatcaggtctcagacatctctctctggatggggaagggaggaagctggtttacgtgggtgcactgcagaggcctgaaatgtgtctgtacttgaagatgctcagcttaacctataaattatcagccaggacctgtttagaagcccagttctgccttggttacccaagatctcaatgcagcagtggccagcaaaagccaaatctgaaatcttggtcaactgaccttatttctgtcatcaaaggaaggagtgaggctttgactgaagcccagtgcattttattacctttaagtttaaatgcttattcagaaccattctggctgacacacctcctctttccttttccttctctcttctctctagcccctgccaatccaaacatgacagaagcacaaaatcaaattcaaatttcaagtgtagtgtgcgataacaatacatttttcagttattttgcaatcactagacctagaatttgatttttttataagatgggtatggaaatagagggaggtgtatatactgttttttaactcgcagtaaaatatatttaaatagcatcgaatggtgatttccaccatgccatcttcagtttgagaaataaaggacatacaaaaagaaggaaggaatcttaaataagatttaagttatgtttatgatatcaaagacatttcaatcctttg

SEQ ID NO: 89457 - DNA, 1041 bp, Homo sapiens
gttatgtcagtgtatttcttaagacaacctactatatttttgttagagatttatgccatacacatattgcttttgaatggacctttggtaatcattgttgtatatgagcctcgtgataaccaaaggaattaggcagaacaattgtttttctttcctttttcctgctaaggggagaaaatcaaggcaaggagaaatcagttgccttgtttataggttttttgatgtccgagccagggcctggactcaggccttctgactcctgctccagtggtccttccatgacttgtgactcgtggtaggtctttgtgcatgacctggccccattgttgtaccctggctgaccctggccatctaaatgcacagagggtgctatattaggaccgttatgtaatgaactgggccagctggccagactggtctttcaaggtttacctctccctttggccaattgacagttctaccaagcttctaaacacttttttttttttctttttcctgcttcaggctttcctgacttcttttcccagttctggagtgctctccctggagttatcactctagcaaattcttccagttctttaggcccagcccagaacacacctcttcaggagctcttccttgacagcagcctgttcttggtattaccctaggccctgagttcttaagatattgttatctggactgtacaacccattaagcaagttgcacatacaggtttacattttgttcagatcttcaagtacatgtaaagctagaggtatttgtccattcttttctgtgtcccaggtatggaggtagaggtgggagtggtgctagcatagttctaagcacgcagtgcttagagcagataaccattgacttgtctcttgtttactatatagtattatctcaatggttgacagggtatattgtgaagcagaaagggaagatgtaattatttttcaaacagatatgggtcaagagtttcccattgaggctgggaatgtgggagtggtacccagggaaggaaaggcaatgcaagcccatgtctggggtgaaaaa

SEQ ID NO: 89458 - DNA, 1555 bp, Homo sapiens
accatgttagtgaggatggcctcgctccctgaccttgtgatctgactgccttggcctcccaaagtgctgggattacaggtgtgagccaccgcgcccggccatctctgttcttaacctgccttatttttagcatttatctgtaaatgcatactacatattttacttgcttatttgtttattacctgccatgctgtgctagagtggaagctttttgagggcagggactttgctctgctcacattgtgtccttgtgcctagaacatagtgcctggcacagagtgcatgttcaacaaatatttgtaaaatgatttgtgaagtaatcccctctaaaaatagaactcagaagagacagtcagggttaggatctagcccaggatgaactttgttaaaggccacagcaaaggaaagcccttaagttggaagccttgggttgagaccaggttttgccgcaaacaagctccgtgttacgaaattcacctagagctcacaaaccacactttccttgtgtgttgaatgggtgctgatatcttgcctataagatagaagtgaagatcaattgagtaggtagatgtacctttccctctgtaggaaaaaaaaaaagcagatttggttcctcttctttccttgcagaaggaaagaagttttcccattggttttgtttctctctctttggaacaagatagcgacacgagggttttgttgttattgttgtttccagctttaagcaggcattttgtgggtggatatgaaggcatttggttttattttggtgatggtttctaattttatcttctcttgtttatgtaggttttttgttttgttttaatgtgataaatggccagcaacttctctgagccctgtggaaatggtatccaggctacggaataattatttagtgaatggcggatccagtttatgttggcacagatcaaattaatcattattaatcatgccccaatgacagtaacctcatcccttgcagaagtgctattctttattaagcagtaatagctgtgaggaatgactgagctctactccggttacactctactatgcctttccctatttctcagcaggagagggagagcaacacacatccagagtgaaagtaaaaggaagaattaaaaacaaacaagcacccatgaagcatctccctcttcctactacctatgacaagaactcaagttccagcataagaaaagaaaaggggctttgcagtatgctgcccctcaaaaggaacagagtaaatgattataatagtaattagagttatacttaaggaagtggtgtttattagccagcctgtagtaggactaaatccacaggcttcctcacctagttcctctgccagtgcttggatcttgagagttgcaatctctaagctttttaaactcacttctatctgaaaggtacttcccattctggggtgtgtgtgtgtggaattgcttccaagaacaagataagctctttgcctagggaaagttggtaaaggaggcttactgttcagtttcagtccacattgaaatacaggacatatggaaaatagagcatgata

SEQ ID NO: 89459 - DNA, 1033 bp, Homo sapiens
gtctagatggtgcatgggtgcacaggtggtgtcaggtcccgttactgaaagaggaccctcaccagagtttctgagggtgaaactgttagatgagcagctaacataacaagcacaatgagaataggcagagagctcatccaaaagaccctgcaaaggggccaggcccagaccatccatccagtgatttctctttaactgctttgggctctgcaaaaggacattttttatgtaagtccctaagacagagttgggatccccacagaactggacacagggtcagagacacccacggtgaggaggacatgtggatgccattcatctcgggcctcccttgggctcagagggaccacgttatgcctgggaaagagcagaaggtggaggcagggttgtgccctgaattctcatcagcatgcagccctttccactcttatcaaaatcaacgtgggtatttcctgctcacaggcccctggaggtgcagcaagaacagaggctggctgggaagggaatggaggagaaactctgtattgtagattcaatatcagctccatgatttcccccccaagggataaatattgtgctttgcagcttatatgatggaacagacttcctatgtgtacgattccaggaagagagttaataaaacctcttgataccttgcctccccggcagcatttatttgtctagcagtgaggctgtgtgctgttcatacagtactggtgttaggttgacatttgttttgacctttaaactttatgcttcctctttccccatcctctcccccgccccagcctccccacctcctgttgttcctcagcatgtgagtttgatcttctgtgacctgggcttttccaaaggttgactctcctgggcttggattgggtggggtgcaggcttttcctcttttctttgctcaagggtcatcgtgtgactgtaaaattattgtctggcagcagtgcgagcgccatttcacatgtggggagtgtgtagagttttgttttttctttaaataagaaaaaggaaagaaaacacctcg

SEQ ID NO: 89460 - DNA, 1456 bp, Homo sapiens
ttgcaacgtcaatagaaacaaactgtcttcttgctcctagaatatagagaagtggtagtgggatattagagttccactctttaagtgtgtattcccaactgatggaaaataacacccaaaccaaaacaaacaaacaagtaaacaaaaacccagtccaaccactgggggcctgcagaatatctcaggctagccgaagagaatgtgataaaagtaggttcataccttaggttccaagtattaatctcaaccagcctctctctctctctctctctctctctctctgtctctctctgtttatgtgtgtgtgtgtgtgtgtgtgtgtgtgtgtgtctttcttccccctctctgactgtatgtcctcttttggcatggcatggtgaggtaaaaggcatagctcctaggtgacatgttaacatacttctagtttcctaccacaaccacttataggtgcctggggacaacatggccattcaatcagattgaaaacaaaagtttgagccagtggtagattatagttattgaggacaatgtgagaaagaggaagggaggcccaagatttatacaccaattcctcctagaaatttgtttggtttactatgagctgaccctgtgactttgaagattttaatcttaaaattaggacaggttttactgcctcttttgatgtacgcatggatcctggcacagtcaggagagtctcagtcagagtgaggggcgaagccatagaaaattgttccatctgaggaactttattgaaacatacatttctgaccttgatccttggaagtacccttcaggagagagtatatgtgtttgagtgtgtatgtgtgtgtgggtgtgtgtgtgtgtgggtgtgagtgtgggggtgtgtgggtgtaggaggcttagatatatgcatcttataaaataaatgcaaagacatgctgatgacccatcttggatctttatccctcctagcatgagcatcctctgatggatcactgctataggtggtgatcacaagtaggacgtgtagaggagactggcaagagttgtcatgtagaatgtgacctggcagtagatgatttgtggatagggtgcgagcacatgggattatgaaaactcagagttggaggtcacttgtgagtaatctaatctaactcttctacagacactctggaaaatattcttcaacctcagcccgaaaatagttatacagtctggaagggtcctagccaggatttgaacctgggtcacctgatcccagagcatatactgtcgaccctcattgagacaaatgactgtaccctctcaatttgagtgagttacaggtctctaggagtttagcaatagattcctgagattctatgcttttacttggtgttttttttttttcctttttctttttccttagtcagagcacttcaaatttgatataatgctttggagctaggctaatggaaaggttcctagaggt

SEQ ID NO: 89461 - DNA, 1060 bp, Homo sapiens
atggatgccgatttaaacccaggctagattgttttttttctaaaaggccaaagaaaatatgatttcaaaaccagacagaatctcctctcatttcatttagtgacaccgtgaggtggaactgtctggataagactccatctagcaagttaaaaactccccaaaagcacagggacaggaaatttcatggtaaatatttaagctcctgggctccagggcaattggaaagtgtgtgttaagaagctttcctctttccctctaattccctgtattcatcacttgagctgtgccatttgggcttatcctttatgcctaaagaagtcttgccttttaatcttttagccacaaaaaaatagtaaagaaatataaaacaccttaaataataatgccccagggagataatatcctaggaaatttagggcttaggtgttcctatggagcacacatgtgttcacagatgcccatctctgatgctgatcagttaatagaggttaatacttcgtgtaggatcagcagggcttgaggtcttgtcctgggcattctgctcctactttgtcgctgggtgactcagtttccacactgggagaatagggagaagagttttcccttaggctacctcccaggaggtggagaggattaactcagatgaggaaggcagagatgctttagaggccaaaatgtgggcaataaaataaggtaggccaggtgtggtggctcatgcctgtaatcccagcattttgggaggccaagacaggaggatcccttgaagccagaaggttgagaccaacctgcacaacatagtgagacccccgtgtctacaaaaaattaaaaaattagctggacatggtggtgtacacctgtggtcccagctactcgggaggctgaggcaggaggatcccttgaacccaggaatttgaatccagcctggtcaacatagcataactccatctcaaaaaaataaaagttaaattacttggccactatctcaccattctaagtggcagaactgggttatacactcaactcagtctttctctgaaactcagagtcaacccctagcact

SEQ ID NO: 89462 - DNA, 1038 bp, Homo sapiens
tgccaagacttgagttgtttcatttggctcaagtctggaggcattgatactgagctggccttgtatgaaacccacttgctggtcctgttcgtctgagagtcaaaaacgtaagatcctctggagtagagaacagtccctccttcccatccccctcttattctcagcctaggggggcctattctcaaaaacctggagctagaggggggtcacctaatcactcaccattttttctctgagttttattcggggtattttgtaaacttggacttagggttaagaagttcatcaaaagctttatcagtgaggctttgatgtcacttgcataacattttcctaaagaactgtcaagtaccaaatcctacatattgttgatttttatcatctgattttcttgatctcattatggtttttactaagaacacaaacaaacaaaaagcctctgttctaccttttctggggtcaaaatgtaattttcttaagttggccaattcagtggtaaggcactatagttttccactaagtgactcttttctagtactcttcaaagattctacttagtgtttggccccttccttttttgcatctgttcctgtctctttcagcctagctcagaggaggagtgaggagcctgcggaaggcttccatggagtggagaattatggaacttgtcattgtaacccaagggctggggcagaccagggatctctcccctgaagcccctgcaggaaactgcctgccaaggtctatttactcagccccagagcatttaatcctgcgcagtgtggggtggtgtcactgggtcagagccttcgagctgcgagctgagcagccgggtggaaggagaaggataaatggctggttaaaccctgaggtgttgggtggtcactgagcaatggttggagcagcctctggccaccgccgtgtgttgattttgtagtgagatcattacctttcctgggttgttaaatgcagtttaatcttccttaagacaggactggacaatgttgcttttgtgacttcagagagtcactagacagg

SEQ ID NO: 89463 - DNA, 1374 bp, Homo sapiens
tttatgtatccctattgcctaacacagttccaggcataaaaaatgcctaatcaatgtttgaggaatgaatgaatgaagaaatgtgtaatccctcatagattcccctcttgaaagaatttttccattaaagtttcccagattttgaacccatgtgttagagaggatggtaccacaatgcaaaaaactgaactaggaacctgggttctcttcccatgtctgcccttgagaagctgagcaaatggagccaagctgcagtttcttgataccctgttacttgaagtgtaaaatgaagaagtcaggccagagaaagcctgttaatcactggtttttgtgattctatgacttaagggactgtaatactgtttaaatcaaacacaactctcactatttgcaacccttaacgttttgagtttgttataaaatgtcctttgctagaaggatgtcagaaaaccaagcctacttatcttgggtattgcattattcccttctggtctggggattagggaaaatgaagtagctgttaggaatgcagaacgacctcaaccagaacatcagaagccacttaagaggcacactgcttccagcaggacatgggtagaaagaagggattccactataaagagagatttgtagatatgttttcttctttctccacgttaaggagagagaaagggaatgaaaggaaaaacaagatctgaactttcacaccctgataaggatttcctggtatttacaacatgtaaaataaactcttttttttttttccaaaaagaaatgtattttttgctacgtagccaacatgactggttttggggaaaaatatagacttttgattctaatatgtagattagaaagaacaaaagagctcacaactttcttcttaaagtatttatttacctcatagaggaaggaaagaaaagccaggaggaaagatgaagaaagccctgtcaagagtgctccagcaaggaaagtttcctggctgtatggaaatcatctaggtggggtgtgttgtttttccccctgttgggactccagaggggggcttctctcttaaaaaacctgggatggttccaatggagagaactagataatctttcaggctaaactcagtcaacccacagggattgatagaagcccattgtctgcttttccaggaatcctgggggttgcaaatatgtctaggtcagtctggaacttcccccagcttgtattcgcggtgggcatacaccactaactggtcagggaatagaaacgggcagaggaagacagcatgccagggtgatcttgtccttgtgataattatatcttaccactgggaagccctaatagtatttatatccatgaccccattttcttaaaaattaatttttgggg

SEQ ID NO: 89464 - DNA, 1096 bp, Homo sapiens
ttatttcactacaagaaatttgcaatataggcataatgaaccatttgcccaaggcttaatataaagaattagtgccattagcaccatggagataagaatttgaagtctcaacatccaggcctgactctagactcacctcttacaggtttttcaatcttggacaagtcaagttaactctccaggcctcatgttctgcatttaaaatttaaggataataaaaacaccttccatccctatattataggattgctgaaagaatcaaatatgctgatatacacaaaagtctgtggaaactgtaaagcacaaaacaaatatcattacccttgtcatttgtttttgtgcataggctctgtttaggtcattgactctgcactactgccagcattctaccatgttgcacaattaccattaccttggataaggcttggggtatctttctattttgtgagttaaagaaattgcatctaaggagctccacggacacttgatgatttatgaaatctgcctcatgaatatacttctcattgatttccttccttttcttctgatttcctgcagtggaagaagcaaccccagattataatggaaatacctcctggataaagatccatgagaaagattctgctaaaaacaagctgtggcactttgagcaagtctctaaccattccactaccacagtatgttttcaatcccaaaatgtgcagggcacttcttatctgtcccccaaaacatgcaaaatatctcataaatgttgatatccttgagttcatggagcaatttcaaatccattattttatttgatccctttagtaactttgggaaaagtgagaacagggataagaaaggcaaatttatatgggagaaaataaaccttttggggttatgtgcctagtccaaattcccagaaatctagatattcagacttcagttcagtgatccttgacgtttactaagcctcttccagtgaggatctagtgatgataaatatacacacctactacgtacccccaaaaattaatttttaagaaaatggggtcatggatataaatactattagggcttcccagtggtaagatataattatcacaaggacaag

SEQ ID NO: 89465 - DNA, 1046 bp, Homo sapiens
agatattttgcatgttttgggggacagataagaagtgccctgcacattttgggattgaaaacatactgtggtagtggaatggttagagacttgctcaaagtgccacagcttgtttttagcagaatctttctcatggatctttatccaggaggtatttccattataatctggggttgcttcttccactgcaggaaatcagaagaaaaggaaggaaatcaatgagaagtatattcatgaggcagatttcataaatcatcaagtgtccgtggagctccttagatgcaatttctttaactcacaaaatagaaagataccccaagccttatccaaggtaatggtaattgtgcaacatggtagaatgctggcagtagtgcagagtcaatgacctaaacagagcctatgcacaaaaacaaatgacaagggtaatgatatttgttttgtgctttacagtttccacagacttttgtgtatatcagcatatttgattctttcagcaatcctataatatagggatggaaggtgtttttattatccttaaattttaaatgcagaacatgaggcctggagagttaacttgacttgtccaagattgaaaaacctgtaagaggtgagtctagagtcaggcctggatgttgagacttcaaattcttatctccatggtgctaatggcactaattctttatattaagccttgggcaaatggttcattatgcctatattgcaaatttcttgtagtgaaataagtcatctcaagaaaagaagtgggaagccttgcttccaagcagttaatgtagaaggccacccttgcctgataggctgggtcctggaaggtcactgacagggacttgggtaagtcagtgcctttgtcttccgatctggaagatgaaggggttagacaattctctcttgcactaaaaattatgttttgagatatatggatgaaagatattctaattgtggactttcctaaagatacaatgcagaaaataggagttctttcatgtaaaataagcaggttctattaattcattttactttgtggactg

SEQ ID NO: 89466 - DNA, 1766 bp, Homo sapiens
tacattacttttaaggatgtccccatcttttttcattcattcttataacattctttagcaaggttggacaaaggattttttttctttttttacttcctctggctattcttgcctttctgttctttagacaagcctggcccagtgcctccccaaggggtctgcacttgctatgatctgttctctgccttcacatgacctaccccttcttgtcacttaggtttggatcacatgtcacttcctcagagggcctttgcagattcttgcagttaaggtccccaggccatgtctttttctatcacattgacctgttttatttccttcataggatttattgtcatctgaattgtgaatattattgatttgtttacattatcatggtctgtctttcctgctggaagttaagctccaatagacttatttttcttgctctacgttgtataccaaacacccagaacagtgctttgcacatagtaggaggttagtgcatgttgaccgaaataaacatcttatgagaaatttaacaactgctcaagagtacgtagtcaatgaaggactgaactagggccagagttcagtctctcaactcttagtttattgttcctttcactgatatgatgctgccaaaatgtatatgtatttatacatgggagttcctgataattactgataaaatctggagtgattgtgagacatttatgtgaaactgaatgcatttcttaagggaaatgaggaactccctgaggctcacaccattcagcttgtgacaacagaatttataatcgatgtactttgtatattgggaatcaatcatcccatatttgtttaattcatttttaaaggaagccaattttaggagcattttcaatattttttattgatgatacttgaattttaacaaataaatacacatcatgtacacacaatcaggagagaatataaacagtgacaggtgacaggccagttagattcttggtcaaactgcagagattttctctctgacagaggctgaaagggttttatgggtgaaactgttgagcatgtgaagttgccaggggacatggctgttccctctaagttcagccccagaagttgcattgcaggtgttttctagatggcctactttctctcaattacccatcatgaatctctcggttattagaacttttggagggatgaggtagtggatgtcacctagattacctcttaattgtattgtttttctttttttattcttctgtgaagcaaatttgctttcatttgctctatgttttctcttttgagcattaaggaagctttctctggatacaaatgtctgagtgctggtgaagaggagtatgtttattgattttccagtccctagacttgtcagccctcatctccccattagagaacaagtgttattaatctgtcattttaagaccattgttccatctccttgctgattttacctttggttcttccccttcgttatctcttgattgagacacaacatgctcaacagcacatggcgtttcaggttagggccaaggatgattttgtaaaaacactagcttctctcttatatgttgccactttgcgattttgcctatgggacctgctcagacctgaaaggatggtatcattgccttataagtacattttattaacccccccaccataaatcaaagcattatcttatgcaagtaagctctaatttgactcttttatttttctcactccatcacccaagagtttcctgctgttcccctctgtttttacatatgacc

SEQ ID NO: 89467 - DNA, 1025 bp, Homo sapiens
cttgataggagctgtggcctttggttaaggacacagctagcctggggtgacccagcatggaggaagctgggaaaacaatacttctgacctcactcacctcccttttgtgatctcctgctggtgccccttcttggctaaaaccaaagggtaaaggaacctgaatgtgtaggtatagaaatcagcatcactggctagatagcagaccaagaggcaagggcaagatgtcctgcccagtgtggaagctaccccagtctttgttcctttcatctccttttcaggtcagtaccttggaaactgtggacagctgttcatgactgacaaatcattccctaccagagttaatatttactcccctttggctactgggaccttaggaaccaggtgtgtgatgggcagggaaattgtcaaaactcaggctggtggttgtcagtggtttctctggcctgagggaagtggatttttattttatgctaggagacctcaaggctaattattcaccaagttgtggtggctaccgtcttagcccaacataaattttaaaaatgcctgctttggatgtcatttccttttgatgtttggggtaagtgatgcttctgctttcactttcttttgggggctgggagtcctttagaagcagcaatgaaaaaagcagggatttatattgggattctgtttataattcttgaaggatatctatccccattctcagatttgatcttcacaccaaccctggtggccttccgagcacggatccgacaatcaaaatgtaaataaacagtttcaaaatggcaagaactttgaagaaaacctgtggtgctgggaagggcaggaagctttcctgatgcatctgtgcagaggggtgagcaggagtgagccagtgaatggagaagggaagagcagcccagcaatgaggacgtttttccaaaagaccccaagagggagtagttatggctgaggaaattttgaggaactggaagatccatgtaggtccaatgaactgatgagaaacagtgggaaatgagact

SEQ ID NO: 89468 - DNA, 1048 bp, Homo sapiens
aactttgcttatttgatctcattcaactggaatgctctctttccttgtcagtaccccattcattcttcaagaaaggagtgtcttcctctgaaaaatattcctagacttcttagattccaggtgtatcttccttcctcagcattcatcttgagcccatgtatctattccttgtcccacccatgtgattgctttatgcacacatcataactgaatctgcttgagagagaagggaatgcctatgtgtggtttgtctcacaaaatctaataagatgccatatccagaacgatgactcatagttacttaatgaattattcaggtcaagcatggctttctcaactattcctagacttttcacttctccttagtaatagcaggtcttcatttctggccatggggtatgcacgtcggtaacctgccagtcctccaagaaccaagctttttgtttgttttttgtttttgttttgttttcagtaggaatcagctatgttcccctggcatcagaggaaacctgtaggtatttctgtgggtcatttgggcctgggtgtccttgagtagacgttgaaaagtattcttccaaagcacagagccccatgcggagttaaagcaaagatcagaaaaccagagaaggtctcgggagagaacacaccatataaggtaagggccaatatttgcttgcagggattgggggaagggacatccttaggaaccgagagtaatgactttggtcttctgaaagtgctgttctgttatatagcaggccattaaactatgttaacagtcatatcagttatgttcaaaatgctgctcctttgtatataaacacagtggagttctgtagctgtgaaggcccaggcccttggcacggctgttccagggtaggtagtaaaacgtttcttcaggactctgcagcagctgccctaatggaacactattgacttgagttacatcggagctaaatatagctggtgcagtcatgtccacaggattgcatctgatagccaggacagaatgtgcttcttagagacatgcacttcttagactgagtct

SEQ ID NO: 89469 - DNA, 1527 bp, Homo sapiens
atctgggttttcccctcccttttaatgggtaccttaaaaagaatgaatgcttttactaaaggatcccaaagtattttcataattctcatggtctatgagagaacatgcagttctatccactatgaggaaggcaaaagcccataaatatggttcaacttgccccaagcacacaaacagagaacttgagtattataaagggatttggggaccattaaatccagccctcttcttattagtaaaaagaatgagctcaacgtgggatggtgatttctgatagagcttgcatcgtttcttacactctcatggtttttttctccggatatgggggaacatccttaagggccctgtgcaaaggcttccactcctccaggccatgtcacctatcagtctgtgtgacatgtgtttcacagaacacacagtgagacataaacgatgatgggaaattcctctgtaagccttagacacaaggctgctgcaggatcctggcctcccctggaataagcactgtgtgtgcttcaactcctggactcaagcttctcccaagatctcaggctgtttgcagtccctacactttgtccatacaactaaagtctaaggagagctgatagaggaagttttctctctctagggatttaaattagggatttaaatgtatcagaagactttaaagatgagaaaccgtttaagactccaagtaattaaataataaaataataaaagtattcctagcatgttgaaaggtgacattgggaacctgcttatttgctgctcagccatatgtctgagggattaacttattctgtgtgtctagcagctgccagacacccatggggatggctgtgggtccatgtgtatgcacatgtaagtgtgtgtgtgtgtgtgtgtgtgtgtgtgggtgtgtttgtacgtgtacttctcttccttcaccgtctcaaaacctaccagttattcaattctatgctcaaatctcaaccccttcacaaagcaattttggacttctccaaaggtgtttttaccctggacatctcctttttaactttgattatgttctgttgtcctggtaacttcatatgaatttccatggtctgttaaactgttctttctttatttcaggcatttgctttttcttctgatctagatcgttatttccttgatggcagagactgtcatctttttcttgatttcgccatagcctgaccatggccttgagctcagcgctgagcttgtagggctagagcacctttggtttgggcatccaaagagagcttggctggcacaactcattttttcagcaaaggaagtaacacttcactcagttaaggttaatcagataaggcagtggtagggctagggggagcactagttcatccagcctcattgttctatgctaaattataggtgtctgaactaaatttcaggggagaagtctggtagatcctccatgcttggcaggaaagtgtgctggagggtctagaagtcatgccccagaccttcttttcctctttgcctctgtcacacacttcttga

SEQ ID NO: 89470 - DNA, 1047 bp, Homo sapiens
acccccaatctagtggaggacccaggcaaaaaataacctgagaatgtgatctatagctgaggcaagggctgaaggagtagagaaaatgcacctaggccagtgggagtagggtgatgggggaaggttggtacagagaaccacactcatgaacagagagtagaatcttctagaaactacctctagcttattgaatttgcacagttatataagaatatatcaagaacttgcctcatgcaaaacttgcactagatgcaagatagttgtggtagaaatggaggttgctgggtggggttaggaggagttttggcccaaagaaaacagatagcaaattaaacagaaggccagatccaagggccaggttgagtgctgctgattttttaaaaattgaattaattacaataaattgggccaacatgatatatggcttcttacacatctagaattggcaaagcagacatactgtctgttagtctaaatgacggcaaattttaggtggcctaggaagtaggagcttctagtgataagccaagactaaataaaattccttctctatgtaaccgaatgtttgattaaaaccccacatgacaaggacaagtgtttttaagaatcagagatccatatgaacaatgatctttaaggcttcagagaagagatagatgcaggctggccgcactctgagctgtaacctctgatgtcgggcagtgcacaacttgtgcagctattcatagtattccagaatgtcagaatctgaacaggtttttaaaaattggcttggattgataatcagatttggtgatgagcattttctggtaggtgaaatatcgtaaggacaggtgtgtagaggtggctattaagataaagtatgtggaatttggggtccttgaatcctgtttagctgtacttggtgtcaattgaaatctcataacattggctatgtagcctccctctaatatcataagcatattgttgggcagggaggactgcctcatatgacagaccctgatggtgaggtgagaagatatatagctgctggccttggcacatcct

SEQ ID NO: 89471 - DNA, 1045 bp, Homo sapiens
gattgtttcattcagacagatacttgagagtgggagtagacttccctttttcctcttgatacatgtgtcacgctgtttttcaaaagatatataagaatcaaaatgctacctttggttggagatgggcaatccatcacctggtttccttttgagcagtagtaccagacaccagatacacgcaaaattcattttctctctcatcagaacttctgaatgtttatctgtcactctgtcagctgagagagtgtgggtataattctatccttttcatcctccctctgtatatcactggatgttttctttctctggtaaggcttactgtgtatgtttccttcatttgcagactgtcacaaaaacatttttgaaagtaggtggaggtgcacatggaaatggaagctttttctctcacttaatcttcgtaagatccgaagtggtggcagagggtacccctgtattacagcagaggacactagatcctcagaggtcagcagcctgctcatggtcccatgcagggcagaggaaggaaactcccatccaggccctgtgactgcatatttagcatcttttcacagccccacaaggaagtgtaattgtgtgcccccactgagatcacacatggcttgactatcttggtctgctttggcttacatgataatcctgtcctcaggttaaaatcaggcaacaattggaccctaacaatttccattgagaatgattgtttcaatatgaactgggactgcgtgtaacctacatggacacctcttgaagacaaggcaaattgtaatgatctccaaaccagcagcaaaaagtaaggactcaacaaccaggttagggcgaagaaggatcattctttacaaaaaaaaaagttgccttgctgtacacgtcatcattgctgatggtggaaggaacagacaactggaagttgtactaggcttgcctgtcctggcagctttgggagactggctggttatgaggagtggcagcgcttgctggcagccctttctggccagctcagtagggggacattcctcaccagggcagccca

SEQ ID NO: 89472 - DNA, 1067 bp, Homo sapiens
tttgacaggtagcatatgacaatggctattccactattgaaaacctgggcctctgacttaggtgcccccaatctcacctccccactagtacacatatacatgtagttgaaagtcaacaattacagttgttttcaatggagtatagaaataagagagaattggctgggcacggtggctcacacctgtactttgggaggccgaggtgggcggatcaccagagggtcaggagtttgagaccagcctggccaacatggggaaaccccatctctacaaaaaatacatgtggtggtgttagcctgtaatcccagctactcaggaggctgaggcaggagaatcacttgaactcaggtggtggaggttgcagtgaacctagatcatgctgctgcactccaggctaggcgatagagtgagacttctccaaaaaaaaggaataagagagaatttatctttgcctagctcttcatgtcttattaattaaaatagactactgcttacacaaaatatccagcagagtcaaaatcttagagtggatactggttacttgcaagcttttagcatttaacagaataaaaagaaatagatatccctggatttgttttcttacaggtgatactagtgaaaaagatccatgctttcatccatctgaaggaaaataccaaatgaaacaaaaaccaatgatagcttctccctctctgctctaacaataagcagttatattttcagaaagcaaataaatgattcagcaggaaataggtggcatttatttcttatgcctagctctatcatttggtgctgaaaacacttgctctgtgatgaggactcacttctattcaggcttacgagctgctgacttagggactcccacataccgggagaaaaatattctagaacaggacttatgctcaggtcaaggaagttcaaacctcgatgcagagcagaccccttgtttatgagacctggggcttttgtgcaataaagaaatagaaataatctttattagctaaagtggcaaagcagtagaaagggggatgatatatataggagagccaaagatctgtgagatcagt

SEQ ID NO: 89473 - DNA, 1906 bp, Homo sapiens
caggaagagtatatgtggatgggtagaaggtggctaatcccagagatgatttgtggcccccggaagctatagaagaggcacagagcaggagaagaaggggttaatcaattgttctccaaatgtcctccatcagcagggaccagtaaatgtaatgattaatcaatcaaataattactgtacactcgtcaaatgtcaggagatgtggcaaggactgagattcagagatgaattaagatagaattacttgccctcaaggagttgtgtagaaagtgaccaacaggggcaagacagaaactaaaaatacaaccagatacctttgttcaacataggcccacatggacatggtagggacaagaaaggatatgagttaaatcaaaaggagggagaggggagccaagggcagttctctggaaagggtgcagttgtaggtacttggaaacaggagcagttttctaagcagaggaaagaggaaagggtatggctggcttatgaagtatgaggtgggacagacaggcgactaggctggggagggagatctttatcagagcagatgggccttcttggagtttctagggagattggattttacagagcagctagagggagccattgaagagtattaaggatgaggggaggtaacagaagtcctgttttaggaaggtccctgggttgggagaagcagcacagggtcaggtcacagaggagtagccatgcagtgctcaggacagctctccctggggccactcccctccaagggaggggctctacagctcttgcatctcgaagaggcccttgggtgcggtgcattttatcaatatcatcaaactaagccagccttcaaaggtttgtgaaggaggcagcgtcgtgtttgacagtctctctactgtgtcctctttgctccctgccctcagctttttcccattccctgcctgtgctcatgctgaaatctctctccagataaaagcccatctgattaagatttaagcaaaagtttagcaaataaaaatacaggactccaactaatactttttttgtcccatgaatagttctaaaaaagaatttttaagtattttaaattcaaatttaactattgtcctatattttatctggcaaccctacatttaatacgtctaagaatctcattttagagtttagggatccaccttgtctggctgctcaatgtttctttcccataggaagatgctgaggcccctaaaggtcaagtggtttgtttgtgaagttcacacggccaagccagagcaaagctgtgacttccagaccaactctgtgtccacttggcaacctgttctctgtacctaggaatgaattagttaaatgtggcagacttcctagaagcatttgcatttttaaaagaaggcctgagggcaaaaactcctagagtaagaatgtctaagaatgaaaattcaagtcctattcaagaggaaaggcattctgtcctggagctttcttggaattaaggcctctttctgcagccaggggagcctgcctggccttctgatccggcaactaatcacgtgaagcatttggccacggacaacgatcctgtccattggaacgatactttgaacttttcagagtgcattcagaaacatcatttccttactctctataagcttttttttttttattgtaaatgttatttacatgctttccatatttccaatttggtttctgccaccaagcgaatcaggaaagtttgatccacaaacactgaattgtatatcagctttttataaacacactgcagtcaaatttccattattttctttgcttaacctgctgccttcattttattagagtctcatgccttttccctagttaggttctgtctagcatacctctggttcaacgttattgctgcccaagaaaaaatgtcagattgttt

SEQ ID NO: 89474 - DNA, 1079 bp, Homo sapiens
ggtagaggaccaaagaggggcatccagataagtggaggtctgagatgaaagatagatgggataagcattctccttccctgtatgggttttaagggtacctgtgtacagtaagcacaggataaacatttgtggaatgaatagatggacagataaaggaggactcagacttgatatttgctgaatgcccagtaatagtacagagggatgtgattgcacctccttaggaagagcaggtggagaacaatcatattgatatgtaatttttgatagcagcaggagcaggaaaacgtaagaaggaggtcattctgagaacaagttgtcttcttgatccacattgctttttattttatttgacttatgcatttagtgtttattgtttccccagaagaggcctgtgcatggtcgaattctctccatggctgttcatgatttagggacagagcaccctgcaccctgccatgtgtacacttctctttatgaggcttacaacgtttattgtctcattcctccatttggcaaggtcaacatggcaaatatataatttccatctttaacagatgtggaccctgagttggagacatgaactgacttgtttagtttctcgcagccaatgagccagcatgccttttggctcaaattcaccagcatgactacccttgctagatcccagcagtgacatggcgctacctctgcaaggggctcatgcttagtggcatagcacacctcttttgcaaaaggactctgctaagccaagcatggcccacttttaactctcttcatgcagtgggataagggaattgatcaattgccagctcacctcaggtctgggctgttttcctatttctcaagattcatccttatggtaatgacattttacatcttaaaatacacttctttgtcttgggccagatttcaccagctggagtaaagaaactgtctttggctctcctggacagtgtccaggcatctggagtaatgagagggagatgggaatgaagaaatggtccaactctcacgttcccagttcctgaaactgccaagggttttgtaaaattgtaagaagtattttagaacacaaa

SEQ ID NO: 89475 - DNA, 1054 bp, Homo sapiens
ccatttaaagctcataaatatgggtgacatgctgcctccctggctggggattttaaggagagactgagatttgcattgccattcaacttttattgttcggtaaagagaaaagaaaagaagagagcgaggaagtaggaaatgggaagagagtgtccaggagggactgagaaagacagagggagaaatgaggcacattgcaggttgccacttggatggtgggcatcaggcttcccgtgcttgccccaggctcatctctagcctttccccaggagggctgggacatgtgaagggcaccagctcagggggagggcctggtgaagcacacaggagcaaataggtcaccggacattatgaaccatttacttcctcttttaaaagcattgttaaatcacaaccaaattaccgtaaattgtcaaattttattgaaacaggaaagccctatagcttcactcttcccagccctgctccctggggacagctttactacaaggtggagcaggtgactaccctggtcatagaatctgaagggcatcaatctggtgccttccccaaagaatatcccacagtgccccacagggaatgggcaattccatcatgtgtgagccaactggttttggttgggagtcctgcatggtctacagattcgcaaaagggaacccactacagcttaccaatgaatgcatggattgttagggttagacccaagggtggcagaggcaggaggtgtgtgggaggaagctgaaaggagggaccacacagtacacacttctctagttttgtgggtggacttccatttggacaccctgcttacctgttgccctcaatttccatctgaggaaccaactgttacagatgcagccctgatccctcatgtggatttccattggctgtttagtcacaaccactggaagatgctgaggtcatcagccatgacccttgagctggcagagccatggggggactcctggggcttccccttcattctatacacgaggaaagccagggtctgacagctggtcaaccaaagagaccgatagcagccaggccgctcagc

SEQ ID NO: 89476 - DNA, 1021 bp, Homo sapiens
tatcccagctttagggtagaaatcagcagccagttatgtctggttgtcagcgctggattggacagatataatctcgagtggagatttctgcagaggtgctcagggttagcagacttaaccaatcctatttttaactagcaatgtgatcttgaaaatgtcacttatcagcttcttctgcaaaataaggacttagtctggagttttaaggtatgttttagtaccaaacattggttttcaactgaagtcgcatacaagaaccagggaaaagcagagccactctgagtgaaggtagagagacaggcacagtgcacgccctttgtctacacattttctcaccccagtttcccagcagaggtggctcctgagcccactggggacacaatgattttctcctcttctccagggacctccaactgcctccctcaggccctgacactaagaatggaactcttttgcgatatcctgatgtaggtggtctgtgatcttttcctttatttctgatccacacctgagcaccatatattagtgcctgaggttcagctgtttctccatcccttggtgtgtaatttgtagacttatgggaaataatctgctttgaaaaggggagtgctcaagatgcagggtttatgtttggcccaacagcccatgcatttggttagagcgtggttagaacccagaaaggccaggaaggcagaaggccagaaaagccagaaaggcaagggggttgtgacgtaatggtgaggaaagacacactgttgtacataccgttttttcaggacgcattgtgagatgtcacaagccttgcctttggttgtttcccaggtcagataacaccttcaatgcatgctagtttgtgagttaaacattccaaatctcccaaataaaggaatccagatagaagttatttgagttccatccctgacattatatccgtgtatcctcccacacatcatcagatgcactaacacatctgaactgggatgggcccatttaacattttactgtttcaaccagtgcaagg

SEQ ID NO: 89477 - DNA, 1055 bp, Homo sapiens
agcacagactaaaggatttggtcctcacctgctacataaaccctctgttgtctcagagaataggatacttcctttaggcaaaatggagtattatttcaagtgtggggcaagtgtaatggccacctatgaagggtggctgtttttaatgagtttctaaaatgtcaattgctactatggtcaagggcatgctgtggtggaagataagaagagagtaaacaagaacacataggaaaacatgttttagtgcagagaaaacagaactttcactcacttagttgccatttcattcaacaggcatccatggaagacctttctgtagggctcccagctatacacagacccttccccagatgttgacaattctgaaatgttctgccaccaatattagctttgtgaccctgacgaagttacctaatgtctttgatcttgatttaccttattaagcaaaggagttgtgcagcttatttcacagagagtatgggcattgatgagacaatgcatgtgaaagtagcattgtatgcctgaaatgcacagtgaggtattgtttcttccattagagaagtgcagaataaattaattgaaaattcaaatgtagaagaaattatatgtctatggaacaagcagggaggtcgtcccggcagaggtggtgttgtacctgggccaggatgggtgagaaaaaagtgaggcagtggacttattccagagcaggggaagcatggaggaaggctaagacaacaatggcgatgcttaggtacatctggaggcttggtgtggtttaattgtggagcctcagaggagagcatcgtgggaaattatttgcaaattaaagtggggccaaatttcaggtcttaaaggtctggaaaatgaaataataggtttttttaaagtctgaaaaataaattaggcttaaaaattaactatgactgaagttttcatacttacacaaaagttagcataataatataataaacccatgtacctgttacccagtttcaatggtatactgctaaaaaagcccacatttgtagcatctgctaatttctgttgtgtaaata

SEQ ID NO: 89478 - DNA, 1070 bp, Homo sapiens
agaatgggaactgattgctagtaaattggaggtgcaagaaaaagtgcaaagagggcctagaaaaagttgacaaccagtcttttttgggagtcaagtcagctgactgctttagttttaataccttcttgaggcctagagagttgtcttgatttatgtttgaaatggtacctacctattttttcccaaacatgtaaagtgtagtatcaaataacaacatacctgaccactccagcaagtggaagcttctctctcattctgctttattctggaaaaatagcagcaaataaattttatttgcttgtaggccttaatttacttgaaagttgaatatatttcctagcaaacattttgtttttcttcctatttttgtagagtcagtcccctccatggtttctttttcttcagcatttcaaaacagagataaataattttgctaatgcttttagtatttctctgattccttcattaatctccagggacaaccataaacctccgtggctttaaaaacatttcatttttcttgccaaaccaggagaagaatcaaaagaggaagttagttatctttgtactaagttgcccactcttcctctaaaagtttgagagctaccatcagagccttatttatcatccctactaaatcctgttctttgaaccaaaaacaactaaaagacttggatcagttagcttagactgttttgattccctgcagagttcagtttggccccagtcatgtggggagtgtagactagagtcataagaaatactgtctttggatgctcaagtcatcttctgttctagggagctcagagcgttgctaagggagtggtgatggtgtcttctaggtgtgagttgcactgactctccacctgaaagtgttgacactgaggtccacaattgttgcattctgctgcagaagtcttaacagatagttaaattaaactattgagatgaggcctattgatatacaattaacccaagacagttttcttagatatatgtgtatatatacatagaaagaacagataaatttgaatgttggtaacccttgccgtctatgtggggaagcccca

SEQ ID NO: 89479 - DNA, 1053 bp, Homo sapiens
ttctgtctttcctttttttctttctttccttcattccacagatatttattaagttcttctcaagctctcaaatatcctaaacttaatttgtgtaaatattgctacagcccaggtcacagtgaaatcttagactgagacaccaccttctatttacacaggcagcatgaactgttgttgccctatttggtgaatacggcataaagtatccaagaaacagcccagacacggagagaatattttctgagcagtcagcataatgagattgaatgagtcctaaactatgtcagaaaatctatatttaactcccaactttgctattcattctgtcaacctcagacaagtcatctgaactctttctgctacattgtcttcaagtataaaatggaactcatagtttcctctcttatgaactttacagggatgttgggtggtatgagggataacataaatgaaaatggtaccagaaagtgaaggcccccacctccctgaacctggtaacacagattttgccaaataagccgcttccctggtttcccagacctcatcagtgcatggctgctgtccagcctgccaattcattgacttcaccatgccctattaattgattctggggaaccccatcagggaaagaaattaataggtgtagctgtttggagatagccctattctccagagaacctcctgaatgtccctctgagtagatatcagggaaaggacacccttctcaaccttctgtgtgggataggaatagcgtgcaccaggatgcctgtgagacaggtgagctggaagcccttacttgctgcatgtcagtttccttatttgtaaaacgaaaaggtggtgagtcttacttggtggtttttgaacagtgctttccaagtgctgtgtagggcccactctagggtcactgcctggggagaggcagtttggtgcaggatatttgggagtgtttccagctctctgatcccagagttactcagcttttactttctttatttgtttatgctccagctgtgattttatttcaaccaagggttacaaagctttaaaattttt

SEQ ID NO: 89480 - DNA, 1018 bp, Homo sapiens
gatgataagtctctgacctcaaagtacttatagtctaggaaaaggagacagaaaagtacacaaataaatgccacctagcagtataaagactgtgatagatgtctttatgggaggcagtggcaaatacaggaggtatacagagaataagaaattaggctgaaggcagtgaccgtgtttgcagacatgttgcaatacatagatcattgatctcactattgacaaaatgaaatacctgtcgtaaaatgtatgcttcttcattcattcagtggatgtttattgagtgcctactgtgtgccaggtgctctgcctagtacttctgtgatggtgtatacaagcaagaaggggagacaggcatttaattcagttagcacacaaatcaaatgtaaaactaaaactatggtatgtgcaacaaagataagttacatggtttcatgaaaacttataatgggggtatttctataaggtaggggtgtctccctgggattgagctgaagccagaacacgaaaaaaacattaattagggactctgttaggtaccaagagtaagataatggaacagcagagaaaaaaacggtaggagttagggcccaagatcctggcctagcgtcaccatggagcctctctgtggactttggtgcccagaactagaaaagtgatggtggtagaggtgggaaaaaaagaaggccactgcaagtcctgttttacccaggtccaaaagaatcacaccgtttgtcccactttttttttttttttttttttttgagacggagtttcactcttattgcccaggtgcccaggcttgagtgcaagggcacgatctcggctcaccacaacctctacttcccgggttcaagtgattctcctgcctcagcctcccaagtagctgggattacaggcatgcaccaccaagcctggctaattttgtatttttagtagggatgaggtttctccatgttggtcaggctggtcttgaacgcccgacctcaggtgatctgcccgcctcggcctcccaagtact

SEQ ID NO: 89481 - DNA, 1126 bp, Homo sapiens
gggccttggtgacatgcagccttctctgaaccctcccaaggtaggcagtgccagtctgtccagtggtcggctccataagaggaaacacaaacacaagcataagcacaaggaagaccggatcctagggacccatgacaacctgagtggtctttttgcaggcaaagccacaggcttctccagccacatcctgagcgagcggctgagtagcgcagacaaagagctcccgctggtgagtgagaagaacaagcataaggagaaacagaagcaccagcacagcgaagccggccacaaagcttctaagaacaactttgaggtggacaccctgtctacactgtcactttccgacgcccagcattggacacaggccaaggaaaaaggagacttgagcagtgagcctgtggactcatgcacgaaaagatactctggcagtggcggggatggtggcagcacgagatcagagaacctggacgtgttcagtgaaatgaacccttcgaatgacaagtgggacagtgacgtgagtgggagtaaaaggaggagctatgaaggctttggaacgtacagggaaaaggacatccaagccttcaagatgaaccgcaaggagagaagttcttatgactcctccatgtctccaggtaaggctgtttttcttcagaaatggattatcaagttatttcattgctgggctttgcacctcagacacatctgtggcacattgtgttcactagtttgcaaagaggtgggaatcaaattaaaatgggtctccttgcacatttgagtttgctgcacattttgtacattgtttacttggtatttactatcttccttctctcctggagccattgtttgagaaactgtgaagccataaccctaatagctgcctaggctgcagtcgtgcccactatggttatgctttttattaaagatgctgttcttaggtcctcatctgatctaatggtacagtttgctgtttggatacagcctctaaaactcattaggaatactaataagatccaagaatgccaagcctgggaggaaatgactagctaatttatctggcatgccagctccacaagtcacacatctaatgtgagaagtctactgcagagccattagaagctgatgacca

SEQ ID NO: 89482 - DNA, 3780 bp, Homo sapiens
gactacattcagatacttgtcattttcgtgcactaagtggaaggaggcaggctggaaggtgatatgtgcctcctgcttccagcagaccttataactgtgtctctttgcatgcccactagaaagggattttgctcactaatttaaactgaaatgctggttgctactagaaggatcctattccttgtcagttgctggcagaattcccttgccaacctccccaaccacacaaaatccttccctgctgttagggcctcacatttctgcaaaagtatccctttgaccctggccttacatcatatatgataagacccctataaagaccagagaagttagttattaggaaaatagtagaaacttcttacctaggagttgcagaagctaaaaaaaaaaaaaaaaaaaaaaaaacagttcttgtgttccccctgttcccaaatagtataaaaccctccagccaaagcctggctttaaaaaccaatcatccatgtttaaggtttggtgtagcatttcacttctgtttatgatgtgtaccactcacctgtcctctcccttcccagggagcccatatttcctgaaggcaagaatagtctattcatgaagaattagagacattttctaggccagcagatttcaggaagaaatatgattatgaggtagaaaccacttaaagatcgccccagattgccactagcctgtgagttgtagtggtagatgttctccttggttaatgaagaaaccaattagcagtcacatctcctgcatttactaaaggtaataaatgacctacactttgtgtctgcccaaagtggatgtgctcatctgggcttcatcatttctcatcatcagactttgttgaaggtgcttggttttatgcagagtgcaggctaagcccacctgggcaggaggtactaccttgaccttgcatgacatgtgagaaactgatctctttcagcatgatgaaactgattcatgggacttacactagctgtggacagaagatgttcttatttttgtaattttatgagccttatttagctagaaaataatggtgaggggtaattgttaagaacctacacgcaaaaatcctaacttaacagacccaaggagcaagacctcaagaagctaaaaccagacgttgttgcatgttaggtttctcaacgattttacgaggatttgtctgtggccaggctgtgttgctgagtgctggttgacttcataaaatttcccagctggggttcacgtccagtcactgtgtgcccccactctagttatattgcttttcatgtgcttgcatttatatcgcattcatcactttattaaaactcctcctcatccctgtcccatctcatctcatcttcagccagccacttgagatgggaagaaataggtgtcatgacaatgtcatgaaagaaagctggattcaacccgaagaactggatacaaggcccaactctgttactaattctccgtgtgcccttaggcatgggattccacttctttggggtactgtctgcccatctgtaactcatggggttgggccagacctcttgtgtatagtgtgcttccattcttaaagccatttcacataaatttttgtgtaacaccctttgtgcaatgttattagacaggtacttttattcctatattacagatcaggatactgaggctcaaagagatcaagagaactgtccaggttcaaaaaaccactggttttgattctaagcccagaactttgcctgctgcactgaaccttgactgcctgcctgccaccaagctagtgaaagctgtgtttagaacacagctcttggtgcccagtccagtgctcctctatgtcacctctgccctttctttcagaatcccattcatcctcagatcacatacccttccctaaggcatctgcacagtgattgtgtgatgattacaaaagagaatagttaaggaaagaagacactcgtttattcaattcctgaccaatgtagaaggaatccttgtggccttaccttttctgaatatcagcctggagacaccatggacagagcttccacctctgtccttactgaaatccagcactctgagttatttttgccactgctttgtttctatctctgtcctctatgaggttattttttcccagaactttaatgaatcataattgttggtggctgctacatctatatgagctatgcctgatgttcctgcatatcttgttaagtttcttactaagacagaccagattcccccttattcccctcccttccaagccttagcctctcattgcttatatctcgaatgtctccttcatggctgtgcccccaaagcatgagagaaaaatatctttagcatcacatagaatccagtgtcagagtttgtcaagactccctgaagagcattcaccttaatgtgatagactctgaagagtgccaagttccatgaaaagacaggaggcagatgagatgaagctgagcttactagatgcattaagagctttcagtgactttatctgagtggaggtgtctattcagctggatggttctgagggtcatgattggaaataagcacctgcactttctacaacttctctccctccaccttttccttcatcacacttgattcatttccttagcatccaaatgtcctatttcacatgagctattcttctctaaaatagatacagtataaatatagatgtcatcctttttagcctgttgaggatgagaattagaagcagagtcaagagaaggctttgagtgctccctgagatcagagctgatgaaagataccatctaaacgtaagtcattaccattatggagagaggaattagagaccctatttagcaatagcagcagttgcacactccatttcctttttcttgcttggaaaatctttcattctttctctccctgcccagcagatggttgcattgtcttgttagcccacttctaacatacctagggctaggatgcagtacagacttctgaccatttttctgtattttacgcctcctttttttggtttcagaatgcagtagctcttttggcctgttttctaaatgcataccatctgctaaatgtccgtttataaaaatgcttgcctgggaccagaaaatggataaatagtgagaaggtgcaatctcagaattggtataagccttatcagctcctatttgggcctgtctgtcggcaggcattgccttctcttgcacactaacatttagcagagggccagaagagcaaatgcatactccaggggtgacaatgcatagtcagaatgatgccatgtgccctcaaagccaagttttcacaaggtggtggaagagtgatgagtgacattttctattcagaccacttggaaacaatctttgcatactttgacctaaacttatgccagatactgagacctcatgacaactgctgttcaagctcctatcagataattaaaaaaaaaaaatgagaagagtgaatctacatgtgttacctcttagtttagtgccattgttaagaaggtagccatcccaagtccccgaatgttgagtactgtcctcatgatgagtggattctgagaactgattctgagagcacatttcagatatccaaattctgccatgtaggtagctggattccctggcacctggccccctccacctctccttgtagcttctttcttgccctttgccaactcctcttatcagcactgtggaaatttgaggaggcagtctctgctgtcactcactggcaggatatgaatgcccaagccaaaaataatacaaaaacctcctccaagca

SEQ ID NO: 89483 - DNA, 1005 bp, Homo sapiens
aaagtaaatatccaagttattgaccatgttgaccaaatagttagttgttcaatgaagtttgaaaacaggtaccactggttgtatattaatctatgagactcatcccattcatctttagctccagccatttcacttagccattggatttctcctttgcgaaaggtagaactcctagtgcttgagtcccactggctgaaaacatagtcactatctgagacacaaataggttagaacacaaatatgaacatttttatgggaacagacagggcacacttggatttgtatttagactcagcattaaataaatcttaataatgtagtacaaacatctcattttgctgatgagcacactgaggcttaagaaggtcaagtgactcatctaatgatacatatttaattgggtgaagagctcagactgggaagcttcacatcaaggagaagggcagggaaagggagagagagagtgaatacaagaaaaaaacagaaaggtgagtcatgggagagatgttaagctatatgttttcctttgctgtgagctgttgtaaaaggtaagcatctctttgacaatcatttggtttccaggctatctctggggacccatgtctgggactggaaatgatctttgtgggctctgatggaagtcatttttttttcctttcctgtcttaacaattgcacatacttattttattgagcctcccaagtttcctcctaaggtttccttttggaaaccaagaattaatcaaattaaatgatataacccataactttgtagcaacgtaacaaaaaaaaatagctgagactcacagcatatcctttgctacattgaaatcagaaatggagcaattctgcctttggagtttgaagtccccgagccatttatcttcccacagttggcaaatgttctcgtgtcctggtgaaagtttttatttttacctctgtgggattgggaaattatgcagattcaggtgtgggtgcagagaagttacaattttgacagacttgg

SEQ ID NO: 89484 - DNA, 1088 bp, Homo sapiens
tgcaaccttgggcaacttaggctcttagatgtccctttcctagcccgaaaaatgaagctgttaatacccaccacacagagttttatgagagccaaagaagggtaaaatatacacaggagcatccagcacaccacttaccatatagttgtcaataatgttcatttcctttcacttccactttagataatatattcaaacagaaaatacaaaacaacagattggtatagaagtcttctttaaacagcaggctttcctgcccaattacactcttactgggatgaagttaaatccaactctgaatcacacagggaaaggcagaaattagctggaccacagttgtagttcatgatgaagataaggtgtcaggattataccgttatggtggataagtaacaaaatacacatttcacccaaagataacggaaagctcactgagtaggcattatccgtagaacttgggaattctctggaaagggcagtcatcaccatcccttggcatcgggactgtcacggcaagaatgtgtatgactattcagtagcacttgttttgtagaccaatgtatctgctaaccccagccataaaaatgcagtgataagaaaaataatgaaatgtggattggtactctatcattgttgtaacaaaccacagatttagcagtttaaaacaatgcaaacgtgttatttcaccacttcttatgtcagaagtcaagtgggcacaggtgagtactctgtttaaggtcttacggagctgaaatcaggtgtggtcagggttgtgttcctcactaggggccctggagaaggatccacctcagaggtcaatctaattgttgatccactcagttccctgtggttttaggtctgaggccttttgctggcctttgcttctaggggctgcccacattacttctaattttttccatgtggcccgtccagcaacagagtcaaatcactatgagtcttagacattcctcccccaccacaccacagcccctgggaacttcttgctcttctctgaatgcaagtaccacattctcccacaccttctggctttgcacatgccatttctctctctcagaacaccttgcaga

SEQ ID NO: 89485 - DNA, 1154 bp, Homo sapiens
tgagagtgcactagcaagacacaccagcaaccaaaacctgtttgtcatccaggaatagcctgcatgctaggaggaggtggtttggaacatgtgtaaaatcaaaacatttctcactgttaatttcttttcacagttcagaatctctgttctattccatgtgaaaagtaaaataactcctttgctcggatttcttgctgacatttctttttggtgggagtcaggggtgggagttcactctgaatgcttactatacctcctgctacagctctgtggcattttcataaaataccaaccaccaaaattctagtaatcacaaaaacatgtgctttctcctcatatccactgaaattctttctctcattaaaaaatagaagtctcagaaatgtaattagaaagctaaactcgatatctttacattcctttggtttcaaggcgggggaagaaagctgcagtttttctaatttcccttcagttcaatgctactcttgaatggggaaaatgatacaaaacgtctgaagaattgagagtctgacaagaggggaggatttgtatttccttgttattaaaaaagaagaaaaagccctcagttatgtctaatctttaggaacgcagtgccctgtccaacccacgaactgttggcagcatcataactctacacagaatgttcttttaagcttttccctccttcccaagcctttcctgtgaagttataaatctcagcatttagagatattcttatgcaaataaaggagggactttaggttgggacctttcatgttgattctgctgagggcatgctagagaaacagccccaagaaaagcaggcgcacttccatggctaggttctaggtttgactttatttgtgaaaccccatctgtccctcctacaccaagtaccaactccaggaagctgtgatttaatagctctgtgcctagaggaagttttacccaacccctcacaacatcctcctgattgtttggaaagtgaaatgattctgaagatcaaactctaccgcttcttgcactgcctcctcttctgtgtatagctgacctcctcattccacctacacaacactccccttaaactttgttgcagcaggcagagcagtgtggccttaggtgtaggtgcacctggaaaaaccccaaataatgtc

SEQ ID NO: 89486 - DNA, 1060 bp, Homo sapiens
aagcattgttaggtgttctgtgaaaaaaaagagtttgattatcagaatattaaatactcgaataagcaaaaatatatgattactacataacttcgcatagctttcaacataatgaggagtgatatggatctatctataaaggaaaagtcatcttttcccaatttatctgactgcacaactcttgtttctccaaatccacccattaagctatcaaagaatactaacattctgcagaagatggtttgggaaatactaagctaatttaatcccctaaaattaaaaatgccaaaatcaaagctcagagggttaagtgtccttgctgacatgaagcagtagtggccaagcctggaccagaatacaggtctgcaagcctggggctctttctactttctgtctaccttaaggaattatttctcaaaatacctactgccaccttcagcagactgtgcatgtatattcagtgtttagtaagtcgagcttttggggagggatacacacacacacacacacacacacacacacacacacacacacagactcatactcctatgcacatagacaccagagcttctcaacagtattaagtccccttttgcacaaggcccaggaaatgtgctggagcaggaagcaggcggcaggtgctgaggaacagcagaggagagccgccgtgggttttggaggctccttgtttacagtccgtattaaccctgggctgttgcaaaggccaaagcttggctcgcatttgagatatgaagctctgacattcaagaagctccaaagcaaatgaacctgagtgagtaaataaataaaccacaaagaaaaagccagtattaaaaaagatttgcatggtctggtgtaaactcaggaaaggcaggctgctgggaagtaaactggccctcatccgccctgctgtgcctagtctgggcaccagaactcagaagcacatgactgagccatcccgtgtttggggccttagaatggtgacccaggtacatgtcctcagggcaaagatactgctcagggcaaggagggaaataaatgatcatggttatagttagta

SEQ ID NO: 89487 - DNA, 1060 bp, Homo sapiens
tataatacaaccaagttcagttctgaatagccccgacctcccgtgcctctcccgtctcttacaaacggaaactttgtcagaggagggagaggcagggaggttgaggagccttgaaaggctttttcctttttctcaagcactggggctgctcaccttcactgaaggcacagaaggtgcaggcctccagcaggaagacaagagcccatccctgctgccagtttcagaaacagtttccacagctctaggttaaggttatggtcatgtgtagcagggtaagaggttgcaaagcatggtcctagggaagcagtaggagcccaggtttgaaagcaagaaatatgggtcttctagacctagctctcatggacaggctgttggttttggccttcgcagatcagtacttctgcctgggcctcagtttatgcatctgtaaaaagaaagaattgcattaaatcagtggttcccaaagttaaagtggtccccagaccaatagcatctgcctcatttgagaacttgtttgaaatgcaaattctcaggccttatctcagacctattaaatgagaacctctgaagcaggagaacaataatctattaaaaaccgatgcacccttaagtttgagaaacataattctgcgtgatcttcaaggccctcaattccagccgtaacatcctgtgaatccctgaggcagaggcccaaaactgcagccagctcacttgccccgactctcaccgtaatctctcaggttccagcagtttctttctgtctctccttggatccctgagccaagctacagagccagttggcttcaggaggtgactctaactcccagaacatgtacctcccttaaaaaatctatatccagtcttacacggaatcaatgcttacagtcaccttgtatctaagcaaactgaataaagctggaagcaccagcaaacctgcttatttatttcatgacaagggaaacaactttcagttctgtgggacttgacacctttgtcaataaaatctgcagattgcacaatatagagttgttttagaattcatctttctgacaataacagg

SEQ ID NO: 89488 - DNA, 1025 bp, Homo sapiens
tttgagtttatccatacaagtaaaataacagatttagtgagtgataagcgaagtagtcatcaacatagataaatatagagactgaaagctctatcatttatgtatttcttctgcagcagaatatatgatgcttcctcttattttatttctgttcccagtgggtcatataatttctgctggtttatgaaggctaatcttaaaaccctttttgacttctacatttaaaggcttggaagtgagtatgacatcatgggggacactccaagctttagtgaggagtcatgggtttcagtactagtttgctctgctaaacccagtccctggcctgagggcagccgtgtttctatgctgattttatagatggtgacaccaaggcctagaacaattaagggactttacaaggtcatgggatgcttaacttcagccctgactataactgcaattatggtatgtgggccccctgagaagtcaccgaaaacccctgtctaatatttcctgtggaccctcaacctccagaccaccaggccttgtaggtaacttattcagtggaagccaggccaattgagtaaatcatgattatgaacattgaaaaatgagaggagagagaacatgaacagaagcattttagtttatagaatcatagagttggaggcatttcttcaagcagacagattttgtgcgtatcaaaacgtgattggggaaaaacaggtacacgtagcctccttcagatgcattttctgttatggtcaagttcattccaataataattaatttgagggcttgtgaaatgttaggtgctattctaagtgtttcgtatgcataactttatttttccaccaaccagctctaagaactagggacactcttacccccattatacaaatcagggacatgaggcatggagtgaagaagtagatttccaaggtcatagagcccacatggagtagagccaagatttgccccaagcccaattccagagcccatactcctaaccactgtcccattgcccttcttgtaggagcaga

SEQ ID NO: 89489 - DNA, 1014 bp, Homo sapiens
gggactggttttgtggaagacaatttcttcacagacaggcagggcaggggagtggggtgcggagaagggaggataatttcaggaagaaactgttccacctcagatcatcagacattagattctgattaggaatatgcaagctagatccctcacatgggcagttcacaatagggttcaggctcctatgagaatctaatgctgctgttgatctgacaggaggcggagctcaggcggtaatgctcactcctcctgcacctgccgcttaactcttgctgtccagcccaggtcctaacagcataccagtccatggccttgggtttggggacccctgccatatatgctataactacagaatgatgtacaatgatgaagtgatgttggcattattattatatgtcatcaggatgtggtgtggattaaatgaggtcacacctctaaagcatttttctgtcatgttgcctgacatgtaagaggcactatgagttggttggttatcatgttactaattattatcattgctaatgtaccttgcagtgatttaaagtttacatgcttaatttgcagagaaggcacgaattttaagtttacataattcaaagtttacatgcttaggccggacgcagtggttcacatctgtaatctcagcactttgggaggccaaggcgggcagatcacctgaggtcaggagttcgagaccagcccggccaacatggtgaaaccctatctccactaaaaatacaaaaactagccagtcgtggtggcgtgcgcctataatcccagctactcgggaggctgaagcaggagaatcacttgaacccaggaggcggaggttgcagtgagcggagatcatgccattgcactccagactgggcgacagagactgtcgccttttgaacataaaatgtttaaacactgaatgaggtgtaagagatctgtctacatgtgctttcaggttacaaatgtgggtaggggttctgagatgctaaaattgacaagaaagtcttaaaaaaaaaa

SEQ ID NO: 89490 - DNA, 1056 bp, Homo sapiens
aaagaccccggagatttcacttgccctgcacagaataaaattgtatacacataaacccatgtgtctgtttctagtcaaacatatgtaccgttcagtagacatattggctgtattcacagcttccagcgctgatctcaacgactgccgttcctttttcatatacagctagatctgtagatagcgctctaggccgcaattggaagatgcagtagaaatatgctcacccaccaatgtgtcttctgccctcctgtctgtgctgtggagcagtctgaagttaagcactcaggatgatgttggggaaggttggatacggggaagtaaatccacagggatgttggtttatggtgtacccacctacagtactagaactccataaacaatattattcactgctgttttatgagaaacagttctaaaatagccctaacagaaaacacttgttactctaccattttgacatgtcaggtttgatggcttgatgagcaaaaagacatggacagagctttctagacacccagtggaatcagagctactgatgtcttaagctactaatgttaactttatttatttggatgtagaaccgtctggttcttatgtaacaacagaaaacaatcctgatcatccttctggcctcaactaatgcctcattcttctgtaaagcaggtcctactgtctgagctcacagaattttttttttcttttactcctggtgctctggttaccactatgagactcacgtatgtgtgattccaagttatcggatgataaccttaggggtaatagtctggtctccctagtcaggttattagttatttagaatctgaagtcctcatgtgtcacattccttttcagccctatagtggctgacccaggatgcgaaaaaaaagtttccaggaagttatgattttttgacagttaagcattgaagagcctccagaacccagcataagaatgaccctttgaaagtagaaaaatctcattttaatcactcctgttttgttcttaacattttatatattatgcagtgtgcgtgatgggaaggtgaaaagtctgtgg

SEQ ID NO: 89491 - DNA, 1075 bp, Homo sapiens
ctcaagtaactgggactacaggcgcctgccaccacgcccggctaattttttgtatttttagtagagacggggtttcactgtgttagccaggatggtctcaatctcctgacctcatgatctgcccacctcagcctcccaaagtgctgggattacaggtgtgagccactgcacccggccttttttttttttttttttttttttttgagaccgagtctgactctgttgcccaggctggagtgcaatggcatgatctcagctcactgcaagctccacctctcgggttcaagtgattctcctgcctcagcctcctgagtagctgggactacaggcatgcaccaccatgcccagctaagttttgtatttttagtagagacagggtttcaccattttggccaggatggtttcaatctcttgacctcatgatcctcccaccttggcctcctgaagtgctgggattacaggcgtgagccaccatgcccagccaaaaatctttctcaaccagcgtatttcccccatttactcagcacccctacttcatatatgtctgttcctactagcttgttctttaattgttccttgtaggttcgttcagagtctttgcaactgtatcagtttgagatgtagtaaccaagttccacaagctgggggcttaaataactgaaatgtattgtctcacagttctggaggctggaagtccaagatcaaagtgtctgcagaattggttcctttttaggacattgagagaggctgttccatgcttctctccttgcatttggtggtttgctggcaacctctggcattctttggcttatgtatgcatcgcccctaactctgccttcatttcttatggcattcgccctgtgtacaggcctgtgtcaaaattttctcttcttataagaacaacagtcatatcagattagggcccaccctaaagacctcattttactttgattactctataaagactttctccacataaggtcactttccgaggtaataggggttaaaagaccatacatctttttagggggacacaattcaacccacaatagcaactaaaccttaaggtctcaag

SEQ ID NO: 89492 - DNA, 1054 bp, Homo sapiens
cgaggcagcagaacagctagtgtccccttggctgtggagcaggacatggtgcctcacgtggagctggctttcacagatgaacgaacaggagactggggaggcaattgccaccgtgtgctgtggtggcaacatgacttgtaatgagggctcctcagaagtcgtgttctcacatgggaggatgcaggaagaagtgtgttccctcccagccgccaactgtacccacagggcaccggaaggagtttcactctcagcactgggccctgcagccaacctcacaaaatgctttttggagtttgccaacagggaagcttgggctgcagctgcagcagcaggtgctggctgccaggttccctgtggcaacgcagtgtacgccaggttagcagcttagccttggagaaatggcctccatctcggatgcctgtggcccaaagcatggagcggagctgcgtttccccatggtgggaagataatgactgcgctggtttttatggggcattatataacctcaacgagtggttcagcagtagcagtggctttaagagggtatggaagattgtaacatgcttgttgttttttgttcgagggattttttttcacttttgttgtcatcattcagtctgattcattatcattcatgggtttgctcaggcccttggctaatacttttttatgactccaggagggcattgcttctggccacatgataactcaagtctgcatttgtatgttttgcaggaagattcatatctaggatcttaatttgggcctctctatgaaatagaaagaacaagagagagacagattaggaattgctaacctgttctgtttgatgtgcagactgaggctcagagagtgacctgcattgttgcataccatgcctgttctggagctaggaccccagatcagatcttctgagtctcactgccttattctttccaatctaccatgctgctcatgcctcctgctagccctgtgtttttgtttccagttggcagtggactgtttaatcacgtgtcctttcctctgatcggttgtggtcttgcctttggtacac

SEQ ID NO: 89493 - DNA, 1045 bp, Homo sapiens
agtagatggttaacttttaattcttctcaatttaggaggaagcataggcctgggaaattcctaaaagctgataatccccagttacttttgtaaattacatatgtgcacccacacacacaaatgcttcctatagtgtttttctgtaacttcttaggaacttgacagtgatatgtgtcatgacattttttggattaagcaggtgttaaaatgtgtttacattccttaaataaataactaagcacatacaaaggcatcgcagacatttttccaaaacataatgctgaggcagcacgtatctttgatggttctcattggtgttactatgaaaatgatttctagaatttctcctcttaatttacaactaactgaaaacaatgacagtaatactagcaaatactaattgggcatttaccatgagccagacattgtgcttaatactatgcatttataaataaatactcatgttttattcattccttacgacaactctgtaaagttggacactactaatatttacagatgagaaaattcaggcttaaggggattaagtaatttctcgaggtcatggttgtcatagctggtgcggacttattctggagtctaaaggaaagcaaagttctaattttaaaaggcaaatgataattttataactggatattgataggattacatatgatattcagtaagaagacataattcatgtgatcaagtgaaatcaaacaatttactgatatggatgctgtggggatgccaaagaaatacgcagcacagttctaggattaaagagtctacaatctgttaagggtaaataagatataaacacgtgaaaacataaatcacaaatgatgattctgatttgcttggaacaggactacgttgttagaatcatagactcccagggtacaagaaacttgtactccagggatgtatgttgtgtcactaacatgcaccacctatcagacctgagatgggccccccgataaagatctggtcagtgattaaacaaataaaccagcaagatcgtctagataaatctcctctctgg

SEQ ID NO: 89494 - DNA, 1036 bp, Homo sapiens
tcaactatttccaaatctcatttacataatggatgagatgtgaaatgagcccaatgtgaagggagccgcctggaggcactaaagtttatcacaatatgtaagagttcttttagatcattgcattaaatttccactaacaagataacaaattaattgtctgtattactgtactagcccaaagtctattgagtacagagtatcagccgaggaaggcagctggggtttcaagggctacagatgctcagagatgcttaaagggaggtgatgaatactaccttggctttctcctgcccctttaagaaatcccaggcacctctgtaatctgatggtggactttggctttattagtgaagtaagcgaggatgagtaaatcaactgtatcagacaagcctcaggacatctagaaattgatcattctgccgaaataagcactctgtgtttattagctgggagttcatcactatcgcttctcctcatccaattgctaagagatttcaaagacatcatcatggtattagcttgtctgactgaactactagagataaagattaggagatctatctaatgatgggtctgagtttctctgattttttttttcacttctattgcaaagaggagagcttttctagcacacattctgtatctacatgtgcatgcctgcacacaatcactatgtatttgtattctacaggaggaattcaaacagtgaaataaagtaggtggtttgaagaaaggacacccaataaagcacttaaaacaatgcaactttctcatctcaaaagacatgactacttaacaaggggaatgtatgctgaattgatttctcaagccatatacagtgggtgatcttttgctgagaagactaattatattccataaccttatttacaatcccaacatcaatacatggccaaacttctacagatatgtccataaaaggtgaggacatgttgggctaatctttcgcaagccagtaaatgtgcatttatctgtttagacatatatttatgtgcacgcatgcactaagttcctgata

SEQ ID NO: 89495 - DNA, 1035 bp, Homo sapiens
attatagtataaggtgatgtactacatgcagatcataaaggctttggttttaagacttaagtagaaaatccctctcctagcttattacccaacaatattcagataatgagcttttggagaatatctttttcctatcactagaaagatttacctgggaactgtctaaagtctacacacatatttccaaagcctttaaataccaactgcagcatggagagagaggggtggcagaagctgaaatgcctcaaaagccatttaagtgttacgttgcaggattttcagtccttctcgttatgtaaaagtagataaatatagacgttattctcaacactaccctatagtatcacagtggtccaaatgccagagcttacagataatgtcatcacagtgcctagaaactcgaactgtaatatatcgtagcattttcttggtgtttcttaaagtttctttccacaatacaaggtcctctctgcctcttgtttcttggagagttcaccccactgatgagtcttccttccctgttggactcagtcatttggggaacagtcttagaagcacatatcaaccaaggaagaaacttcctggatatctattgcccacttgcccaggtctaataaacactaaaggggggaaattgaaaggagctgccaactggtcaacgtggaagggcggttccaccctagattggtgtctttctttttcttcctttttttaaaaaaaatctatttcttaaataataataaatgcacatgatgtgttaaatatgtacatatatatttcaaaagaaaaaatggggcacaagattgtcttacaagtcgtgctggctaatttttagtttgtattcataagtggtttttaaaagccttttttaaagtgtaatttgcatgttctactttgattgtatgtaaacatattttagaacaaaaaatgtatttgtattttattgaatatagaggcaagaaaattgtacattgtttgaaatgttctttttgtaacagtttttattcataaagcatttttgtacatttaaaatga

SEQ ID NO: 89496 - DNA, 1026 bp, Homo sapiens
attctctgttccctgcttgttttttaacttcaaactcagatgaagccaatggacctgctgaaacacttgtctgtggaaactgggtcaggtcgggagatctactgaaatttggctttttttccatagccacgtgccttctgttgttgacagttcattcattaccaaagcctgtgtgtaactttgccttgttctgtggccatcttcttgctcatgttatttctcctgggaatgagcagtttgacttctgttcccacgttcctcattctatcagctctagatggattttgcctgcatagctggcttaatatgtctttgtgtatgggtagtctgtagcctgagaatatttacctaaaaatgtctaaacagccaccaagaatgtttataggggtataggaatatagttaacagagtgctaatctctcctcaaatgtccttttggaatgcttcccccaaaattgggaagttggtaggagcttttctttactttgaatttctttacttggacagaacgattctgccttaaagacacgctttgcagctctgataaagaacatccctgtttagtctcttgagttttacaggccacaaaatgtccgtctcagagggatctgtctcagcttttcttatttttgcttctctccgttttcaaaattaatcatcttgttctctgtataagaaaatttgagaagctgtggacaatttaatagtctgatctggcaacagcgatttttgtttggaaatattttgtgttttctttgaggaggatataattactgatatcctaggatgtgaaatttttgagtgacagtatgcacattttaaagaaaattatgattaatctgtataatgttttttggtctgtaaaaattataaaaaataaaatcatttatctttggttgtaactgtttaaaaaccaaattatagggatatcacactatcttgtaaagtgtttcagctgttaaagttgctgtaggtttttatgcctgatgtcatttaatttatttgacattgaacttcattaataat

SEQ ID NO: 89497 - DNA, 1025 bp, Homo sapiens
acataaaagtttttggaaaagtttctggcaagtagttagtgtttggttaatgttgttattcttgtagtaaaaaaggaagagtattctgccacaatttgggaaaacatgggccctggtcaaagtgttaccatagatttgcctttcactaggccccttgggccacgtgggactaagtcttcatgtggcttcctgttctgtcccctctactccctacccaagcattcattgcagtgccatgctcccaggaaatatgcagttaacactccttgcttggattcatttgaatgatttttttttttttttttggtcaggatgcagttccaaaatgccaagcttttactcatcagatggttcaattcctcagcaccctggaacaaaatggaaaaatcaccttagcagtcctagaacaggaaatgtctaagctcttagacgatatcattgtctttaacccgcccggtaagtgaccagtcggaagtcctgtattcattcagtcaatgcattcctgctgtgcgtaaggcactgtgagatcaggaggatgttcaggacactggcactcctctttccagagaagcaatggtcagagaggtgtttggacaccagggactcagcagtggggaaggattgacactggcagatgctgttgggtggtgggcgagactgacctttaagctggacaatgggatctaatgattaggagatatcagagacctttcagtgagcggcatttctagggattttggcttttaactgggagggcacttcagaatcacctgtagacttgtcaagaaactgtgtctggagaaccttctgctcccagcagtttggtggactagacatactgcctgcctctcctgctgaagataactgggtgctggatgaaatatttttaagaaactggaaattaaatttattagtggagtggcaaaaaggtaagggaacctcagaggccagaacctaagtgaaaggagaaacccataaaggtaggtggagttctgaggctgctgtcaccctgaagagttttgctg

SEQ ID NO: 89498 - DNA, 1069 bp, Homo sapiens
acaccacatttagaaaaatccattcatcttttgaaggacacttaggttgtttccatatcttggctattgtgaataatgctgcagtgaacatgggagtgtggttatcccttctccctatcgatttcctttcttttggatatatacccagaagtgagattactggatcatatggtagtctatttttagttttttgacgaacctccatgcctttttccataatggttgtactaatttacactccccccaacagtgtttaagagtttctttctctccagatcctctctaacacttgttatcgttcatcttttcgataacagctatcctaacagctgtgcactgatacattgttgtggttttagtttgcatttctctaatgatcagtgatgctgagcatttcttcatgcacctattggctatttgtatgccttcttttaaaaaatggaacatttccttttgagggattttggatttctcctgagtgccaaatgaatgaagcactaaatgtgtaaaactgaatacatactgagggcaacaagctgtaggagtgtatttcagttaaaaagccatacgtttagaaattttaaagaaaagctgattatttcccacacagcatctgctcattccagttacccgagtgggtaattaaagtaccattctttattactaatctgccagtagtccccttaaccactctccctacatgaaaatctttgaaattgggtcaatcatgagaaccttagattttagacttttagttcaaatttgctttttttttttttttttaaggtaaaccaaaggtcttcagctctattttcttttcacattctagataagctgttgccaggtgatgcaggagccctttggttgcacctgatgcattattgtgaagcatgtacagcacccaaaatgccagagttcattctgtacgctttccatagcacgtaccggaaactgccatggaaggacctgcaccctgaccagatgctcatggaggccttcttcaaagtaagcccttcattcccggcatcgcagcctagagagatctggcttctagggagcagcctggtca

SEQ ID NO: 89499 - DNA, 1043 bp, Homo sapiens
cagtgatattgacaaatgacaaatgatgacctttgttttgtctctaaaactttttagtgctgaaatccctacattcagtaatcattcagctctttaagccatggatcctggttttagaggacaacgaaaggtaaacagttttttagatattcaaattcctttgacgtttgtagacttaaaattctaaatggtatttggtagaagtgatgagttcacagatttaattttttagtgtaaggccatatttaaatttagaaaaggcttcttttcaaaacttaagacattttctatttatggaattgctagtctggatcatcagagatattatcttgataataattttggaacaaaactggacactcatttccagttttccacaataagaggttgaataaactttagtgtttaatttcagaaaaaatgatgctgttcgcttgagggttttatgagactgatttttctctactacatcagttgtgttttggaactaagttggctataaaattattgggtgggaattacctttaaatctaggactcttcaattaaagcattatttcacaagcatttgaaatacttagaggtatagagctgtccaaattcagtgagttgccttctgagtcttttttttccctgaaagtatacaagcagaagctagttgaacttgtcagggttttataaaaattacgacagtggtaaacatcacattataggagttgttttcaaaaacttgaatttgattctgagactcagagaacatgaatgtcaaactcaagtctcatagctggttggttagtgctgaagctgcgactagaactcaggtcttagacttctgtttctagactctttgcattaacccatgatgctttacgagccacttaaggaaagtataaaaggttctgaatgtttgcttttgctagagggctatctgaataatctgcaagcttcaggattttatagtgactgtgtacatatagactgcttaccatagtgctggctgcttgtttatttccagtaagaattaacggaacctatttggatatt

SEQ ID NO: 89500 - DNA, 1048 bp, Homo sapiens
atatgcatttgcatgagaatttatttgaaataatggttccactgatttagaaaaggtttgaaacccactgatggcctggcgcggtggctcatgcctgtaaccccagcactttgggaggccaaggtgggcggatcacttgaggtcagggattcgagaccagcctgggcaacatggtgaaaccctgtctctactaaagaatacaaaaatgagctgggcatggtggtgcacgcctgtagtcccagctactcaggaggctgaggtaggagaatcgcttgaacccaggaagcggaggttgcgatgagccaagatcgtgccactgcactccagcctaggcgacagagcaagactctacctcaaaacaaaaacaaaaacaaaaaaccattgatttatttctcatatgctttatatttttgccactctcttataaagtcaaagacctactatatacacccccatcacagtgtatcataacactttactaaaatacatatttagtaagcattttttgactagttgtctcttccaggtaatggagactatacagtggctttcagactttttttataagcttcggttatccaagatggactttaaaagctttggtttattctcaaaatggagtccttatatggctgatgtgaagacattcttgggctaccttgtgaaaaggctgattgacttagaaatgacctgtttggcccaagacccaactgccagcaggaaaacaggtaatatacttctcatgcgatgtggagctaggtgtttggactttccattaagagagatttaaataggcacattaagagatttatattgagtgtcaaggagagaaagtagaaatatatagaacaggcatgagcccatatatgtgtcatatatgtcacaatatatgaatggatatattcattacatagtgaatgtagggtgcttgctatagcttgtctctgcccctcctttgcaggttggggtacagagaggtttcagtttccaaccctttctgtcatttgtcttactaagatggggttctaaatcttatacatttatcttt

SEQ ID NO: 89501 - DNA, 1053 bp, Homo sapiens
ttcagagaaacaggttcagagacactgtgagacttgccaaagtcacatagctagtgagtagctccatcaggattcaagcctgcatatgtctaaattcaagacccctacttttcccattcaatattgccaggtcgttttgcttcagctgtttcagctgcagcttctgaatacttgcagtgtgattctgagcaagctgatcatgacagttaaatctcatgtaaatgaatataggtaccatttcattttctctctgagtctgtataatagtattgccttcttttttcagtgattagagaatttgtgatcttaacattctagattagatcagtttttaaaaattagctttatgggaaatgacttcagattttaaatataattttgaatgactcctttataaagagttcaaattatatcatgaaaatattttattccttaatagattttttctgggaaagaatgtcctggaaatttccagctatctgcaagcgtctgagctatggatagcttgtttggggtatacaaaggcaaatatattttatgggaagtgagacatgcttctttctgtgttctctcttcccagtagaaggctctaacaattcagtgatgttccctggggaaatggggtgatttataattgggttccttttgatgtactttggtattgtgggtatgcttgctgaccccaggattgatttattatcatgtgaaaaatttgttaattccaagaaatgaacgatggaaaagacccactgagggcctcacattattgtaaaaactggctgaaggacatgctttgtccaacttttaaatttagacaaggaaacttttaaatttctgtgtccacttaaaatgactcaagtggaggggcttccaccatgctactttgttctattgtctactacttcttgtaattatgaactgatagacattccattgctctcaccttcattgcagtaaaaaaagaaaactttcaacagtagtgggaacaataaacaaaaataagtagactagaaaataataataatttggggatgttttttgtgagagggtcta

SEQ ID NO: 89502 - DNA, 1042 bp, Homo sapiens
aaatacatagttttatatgtgaatctatgacttgtctgtcagagttaaagtactgtcgttctgtttcaggatctgtggatggagtatttgaacatggagcgcatctatcatgagtttcaggagactgttggtctgtggacacaggccaagcttgagtcccattccacaccctgcagtttgtccgtgcagctggacttcactgatcctttgctgggtgggtcctgggagcacctgccccttcgaatgagtgaatgaatgattgaatcagagccattgagggttgaggctgacatactttattcccccagtgttcatttttcctctggtgctttaaaaagagatttcagttgacttacacaatggtgtaaattgcaactgtaaatgtaattactttgcagttttgaaaatcagaagtctgtctttttcttttataaactcttttcctttgtacctagaacccttaccatacaaatgaatcagattcctgaagtttctaagttacttgtttctcccagtacatttttctagagaaacagtggtataaattaccagttagttttctatcaggccacaaaagcccatttaacctataaagttgctgatatttggggtaacctattaattttaattactgactatatttcaaaaatataggacatatcattgtaaattcaattgttgaccaaaatatttattacaatatatagtgtaagaagacactgaggtgattcagagaaatgcagaataccttcttattccagcttgccactaaccaaaacgcgttagttgtatgaagagagacaaataagaacttctctggacttcacgccattcatctgtaaaatggtgctggctggtttcttctaaggctctaaaatttttccctccaacatttcctctccctgcactttttcttgaaacaataattttttttctgattataaaagatatatattaattttaaatattaaatgatatagaaaggtatatagagaaagggatgaaaattgccctcaagccaacaacgtagattctcattttt

SEQ ID NO: 89503 - DNA, 1051 bp, Homo sapiens
acatcccgggcttttcctctttttgtctctgcctagcggattctcttaccagcatgcctttccctctgacatctacatagaaccttctctgatatagcactttaccttgactcagtcctcgtcactgctcaacttcacattttgcttacttatatattagtcttgtctactccagtagatggaagacttcttaaagacagagcccctgtctggtcctctttcctgtctctcttgcacacagatcttgcctggtaaatatggagttaatgaacatcttgtactaaagtagcctttccaaaggaatgtaacattttccaatgatctattttatttaaatttatatctgcgacaaggatataggtaggtataaaaaggtgttaattttagaaactgcaaatatttgctgattgagcttgagataggaagagatttaaattgtggaatatcaggatgtatttcgtcagtggggcgagctcctccttcccctcccctttatctggtgtcattataggtctggtttgcctggacagtgctcaacatggaatccatctttgaagaggactcccagctccggagagttattgaaggggaattggtgataaactctgctttcacccctgaccaagctctgaaggtacaaatagcagttctgcatttgagtggtagaaggtggcttacactttgatgctgatggattcacccgtagcttttgagcttttgtgttttattttgttgtgaatgtttggaaagctcaacaaccaaaccaatacttaaaactgtgtaattgaagagtacttgcttctcaaggtttgtttaacaagagtctcagcctagtatttgaaggctggatcattgcacatgtgacgggtgttgtcattgcatcccacgtacatcagaattccctggagaacttgttaaaaagcagattcctagacctcatcttctgggatttggagtctctgagtctcgagtgggacaaggaggttattttttgaaactcctagctgattcttaggcttactaatatgtgggaaagactggaataaggctt

SEQ ID NO: 89504 - DNA, 1179 bp, Homo sapiens
ggtgtttttcctctaatgctgtttaacttgcatgtgtttgtgtgtcgtggatctgttcttaatacctctgtgggtagatagaattccttttaacccatgttaaatgtgaaaactttattcttctagaatcccttcttaaatagtgctttggtcgaaaaatgggaccaatttaggaattttctgtttcctcataagtaattagggaaaattctgttgagttctgatcggaaggtaaagtgcgtcctcctgtgtgcttggcaggtttttatcgcatctcctcttgttcctacacttggacagcggtgtccctcagggtgtcacacaacaggtcacccacaaggtggcacagcacctgacaggagccagccatggggacaacgtgaagcttctcaacagcatgatccaggtgagggccttgcaagcccctaagcacactcccgcctgtcttcccaaccaagacctctagcgttagcacacttaggttttagtcatttcagatcacttggcttagtgtgcttttggccaagaaaggcaatagatttgggatttgtagtggaggtagatagcattttgttgctatttaaaaaatgagaggctggttgttatctttcccatcacatgagccttttctccacaggcacacatatctgtaagcactcagcccaatgaagtgggccccgttgctgtgttggagttctgggttcaggctctcataagccagcatctctggtaccgagaacaacctatcctcttcctcatggaccacttgtgtaaagcagcttttcagctgatgcaggaagactgcatacagaaattactctaccaacaacataaggtaattaacctgttagagaatttatctttcagtgattggctagataaagtagctttctaaaaagattcccccaagtacagttttcagttctactctgtggccattaccttctttaagctttgccttaatggtaccttatcccgataatcgtagtccactagcgtagaccctagggaagttggaaaggacagcccaggaagagtcccgcttgttacatttggctgtaatgctctgccttggactattgctgctggtggactcatccttgaaatctctgtcttatcagaatcttgtattgtagtaagacagttgctgatactcttgtaaaggtcattgataagatt

SEQ ID NO: 89505 - DNA, 1018 bp, Homo sapiens
tttttattttttttgtttgagacagagtcttgccctgtcacccaggctggagtgcggtggcactatcttggctcactgcaacctcctcctcccaggttcaagcaattctcctgcatcagcctcctaagtagctaggattacaggtgcatgccaccacacctgactaatttttgtattttttagtagagacagggttttgccatgttggccaggctggtctcgaactcctgacctcaagtgatccaccttgcctcggcttcccaaagtgctggaattacaggcatgagccaccgtgcctggctgtatctgttgttttgtctctggctagttactttagtttctcctaattgcctcttctgcctctcattcctttttctcctgtaatttgtcttgcatgtcattgtcagggttgttttctgaaacactatgcattggttaagagtctgagctctaagccagcctccctgggttctgatcccagttctgccaccttctggctgtgtgactctgagcaagtttcctaaactctttgggccttagttgcttatttgtaaacattcatattaacgagtatacctcaatgtctcacagggttgttttttgttttgttttgagatggagtctcaatatgctgcccaggctggccttgaactcctgggcttaagagagccttctgccgagtagctgggattacaggcgcgtgccactgcgcatagagttgttgtaaaggttaaacaaatgaggaaacacaagatgtttaggatgattcttgccacacattacgtactcagtggtgtggttattattaagggtttgctatgtagcatatatcttcagagatacatttcaagtgattttcactgttaaaagaccttctctgcctctttaccataggccttatttgttagctcttccataagaagattaacatttaaaagggaaaatggtggcaaactcagccctttacacctgtctgacaggttttgttctgagcaagtcatttagtcctggacagcat

SEQ ID NO: 89506 - DNA, 1054 bp, Homo sapiens
tggctcctgtttagcactccctaaatattcagtgaattcaagaacttgaggagtagatgagaaagttgggagtgccattacctcagaaaaggctgtagggaggaaggcactctgaattatccacatcattggtttcttgttactagctatatactagaatcacctgggcaacttgcaaaccttgcccaggcccacacccagacatccaaatagttaaaagcctccctgggggttaaatgtacctttgagttgagaatagctaagttgagaactactgccttaagtagagtttctgaaatgcttgttagccattttagatacataataagagtgtaaaaattgagtggcttaaggaaattatgaatgattttgccttagtcccttgttgaaattgaggtgatatattcttcaggttctcaggatctttttacttccttccctttttaatggtagcgtcctttttaatggtcatgtcctaagggacatgaatcaacttggtttctaaggtgactttagtgctctgtgtcaaacgaaaagaccgcaaagatttcccctatgtaatctttgtgtatgaccactgttatttttatactgcttttggcagcagtaattgacaacagaactttagtcacctatagcaaatgtcaattgcttcgtcttaagtctgttgcatactacatagatcttgattttgggagaagagaattgcagctaacataactttgaactctcatctatggttcttgttttttttgagatggagtctcgttctgtcacccagcctggagtgcaatggtgtgatctcggctcactgcaacctccgactcccaggttcaaataattctcatgccttggcctcctaagttgttgggattacaggtgcatgccaccacatctggctaatttttgtatttttagtagagatggggtttcaccatgttgcccaggctgctcttggactcctgacctcaggtgatctgcccgcctcggccttccaaagtgctgggattataggcatgagccaccgcgcccggcccatctgtggttctttaat

SEQ ID NO: 89507 - DNA, 1056 bp, Homo sapiens
aaactatggcccctgagagttaaatccatttttatagggcctgtgagttaagaatagtctttacatttttaaatggctggaaaaaagtcaagacaatactgttttgtgacatgtgagaattatttgaatttcaaatttcagtgttcctctatcaagttttatgggcacacaagcaccctcactcactgaggttttgtctatggctgctttgccactagagttgagtagagttgcaagagagacgggaggtggccagcaaagtctaaatcatttactacttggccctttactcaaaaagttcgctgccgttcatgtaaaggatcctgcggaaagagaaacttctgtttgacatagtcagcttgcagtctaagcttttgaattttcactccagttttagtaaagatggggagtgcctgggaaggattgcatgatcattatcagtatttaagcgtgtcaggcactgttcaaaacagttagtgtgaattacctgatttaatccccacaatgaggtgggagctgtttatacttcctattttacttatgaggatgcggatgttcaaggcactcaggaagtctttcctacccagctaagattttaatcctgccagtccgggttgtggggataaggctctgtgctcctaatcactatgcatgctgcctcttgccatagtacgacgtctgcaacttagatttccgtaggtcagtgctacagatcatttgctttaggtgagctttcttgaccctccagtgcagaaaccagatctgattagagtacaataggcttgtagcaagaagtaaaaagattataaaaataacaagaacttatctaaaatactttggttttcatttcttacaggagaggacccctcccaattcctaaaagctcaccaggtatgccactaaaaaaggtcttttgaaattcttatattgcaaggcaggcagatcacttgaggtcaggagtttgagaccagcctggtcaacatggtgaaaccctgtctccactaaaaatacaaaaattagctgggtgtggtggtgcgtgcctgtaatcccagctac

SEQ ID NO: 89508 - DNA, 1087 bp, Homo sapiens
agaatcatgctgtcttgaagactttattggagaaggtgtcccattcctttctcttggtttttggtgtcatcagcaatccttggcatgtcctggcttgcagctgtgtaactcccatctcttcctctatcatcctgtggtgttgttcccctgtgtcttcacattgtcttttttttttttttttttcgagatggagtctcactctgtcccccaggctggagttcagtggcatgatctcagctcactgcaacctccacctcccaggttcaagcgattctcctgcctcagcctcctaagtacctgggactacagacgtgcaccactacacccagctaatttttgtacttttagtagagaccgggtttcaccatgttgaccaggctggtcttgaactcctcacctcagctgatccacctgccttggcctcccaaagtgctgggattataggtgtgagctaccatgcccagcccacattgtcttcttataaggacactagtcatgttggattaagaggccaccctactccagtatgaccttatctcaacaattacgtctgcaatgaccctatttccaaataaggtcacagtctaagatgctgggggttgagactgcaacctattttgcgggaggaacacctgtgcccaaaagaatgtactggaagctgagagcatcatgggaaatagagtatcgggatgggagtttagacacctgggtggccttctaatcctggcttcctcactggccagtgctgatattattcaaggccctagacctttctaggttccagtttcgttagccataaaatttggattgtatgagatgttctgtgagagccccttggatctaataacatgggtcttcccaaggaacttatcattcagttgaggtgctgtgaatggcatatacagtaaaattgagcaaaatatttaagtgttaggttttatggcaaaaggatttcatcttttcagttcactctgattttggggcaacctggagcactagattgaggatcatcctgaggctgctttcagacctgatggaaaaggccatatctgatgatgtttgtcatgggttgtttttcttttctttc

SEQ ID NO: 89509 - DNA, 1870 bp, Homo sapiens
ttttggtcaacaagagactgcatatatgatggtggtcccataaaataataatggagttgctttatacagatgtaccatttaaaaacatcctctgtacaagtatttttactataccatttctgtttgatatgtttagatacataatactcaccagtgtgagtattgcctacaatattcaacacagtgacatgccgtacaggtttgtagcctaggagcaataggccataccatatagcctcactgtgtagtaggctacaccatctaggtttgtgtaactacactctgtgatgttcaaataatgacagaatcacctaatgatgcatttcttacaacgtatccccattgttgagtgacatatgattgtagttggagtcatacagtgtgtagccttttcagactggcttcttttacttagcgctatgcatttaagatcccctcatgtcttcttgtggcttgatagctcatttcttcttatcattgattaatgttccattgtatggatgtagcagtttatccactcacctattgaaggatcttggtcgcttccaatttttggcaattatgactacagcttctataaacatttgtgtgcaagtttgtgtgggtataagttttcaactcaatttagttgaggtttagtttcaatgaatcagacttaatggtctggctgaattgaatgtcattttcacatgtgtttcacatcaagatgtttgcatactctgctgtgctgaaaactcatgtaagatgttcattagatcaagctgggtaaaaaatcagcaagttagaggaggagaaaaggcattggacttcgatgaacatgtactgaaagaaacacttcctgtaagtcgcttctaaaatcctaacatttaagacttgcttaattctgaaatttgaatatataaaacatcctcactcccataagttatggacctgaagtaaactgaacttgggctggcctcagtgaaatggcagtagtgaagttagaaataagcttaatctaaaacttaatttaaatgaaaactttggaaaaaaacctcaaggacaacacaaaatgtcagttttataaatagcaagtagaaacaagagtcacatatttcaaggattggagaaggctgacccactgagacatggaaggtgaaaagttcttggaataaacaatggacactggtgttacttatcggaggcaaagttaatcagtctgatgtgtaaacttggagattacttttttgtatttatgtatttttgttcatatgaagagtctaaagattttggtcaacttgcaatctatgcttgtttgttttttcatttgtaaaaagatggaaattaatgatatgattgatctccaagatgtactctacctctgatatcctagcactctaaaactagagcactgtaggaaagtaaatagactctttgattacttagaacatttaggagatgggataatcttagtaattgtaccttctgattcatcgataatgaacactgattcatttctggttcaaaaagtattagaaactgtaaatctacttttgtctgggaaaatccaagtgtgaagaacagaagggaatttgttttggaggattctttcaattatgctttgggatttgaagatggataagatgggagaaactgaatgggaatgaatgcactgaggtcaggttttaccttagaaaaagtttttttttttaaattaacattaaacattttctattaacttgcaatttcttgggataaagaggtaagccaaggttccccagttagcagctgtgaaatgcatcccagcctttacagggttgtggttaggtcttcaaagttatatggtgtcataagccttcaatatttgttgtactttgcttatctggctcaa

SEQ ID NO: 89510 - DNA, 1545 bp, Homo sapiens
aggccaggagttcgagaccaccctgggcaacatagtgagactctgtctgtctctacaaaaaaatcttaaaaattagctgggcatggtggtgcatgcctgtagatatagttacttgggaggctgaggcaagaggattgcttgaggccaggagtttgaggttgcagtgagctatgatcacatcactgcactccagcctggacgacagagtgatttgtgtttgtctcaaaaacgaacaaacaaacaaacccaaccaaacaacacaatcctcagtatttagccacagttttagcactggcaaggctaaggccaggcgggcgctaagcccctccccaccagcctccacccctcagccccatgccagggatgctggatacggggaggtcttagcggagagggtgacagggtgaagacagggttccaggccacagagtttgcagtattttaatatcttcacagccagtacaaacatgtcagtgagtactctctaatgtctggtgggtgacatgcagggtttgaggggctggtggagatggccccgccccttgggaagatgtccagttttgagagcttaccgaacagcatgaagcctctgaggtgggctgcccgggcttgaatccagttctgccccttactagctaggtgaccctgggcagcctgcttccgcccccaagcctcagtttttccatacataaaaatggggataataacagtgtctactccttaggaccgttgggaggattaaacttgagagtttagtacagtgcctgacacacagagagcacctatagttgccagctattattatcagcagtagaggtgacaagtaaaagaagtgagtgatggttattcaaggagaaagaatgaagagatcggaagtccacaaagaagcactcttagtgcatgcctctattgatggaggaggagaaaggggacagagaaatagaggaagagatgaagggatacaaccaggaaagagctatcacaggcccaagagagggacattccaaggaaggtgagaggactgtggtcaaacgtgtttgtacatgttcctgaaaaagtatgagtcaatacacacttcataaatgaatgtatttaaatgcttcatgaaaatatttatttaaagaaatcttcgatgaatctgcttcaaaagggaataatcagtgtttaaaactgggcttggagctggcgtgtgcctgtagtcccagctactaaggaggctgggcaacatagtgagaccctgtctctaaaaatcattttaaaataaatgaataaaactgggattggcccccaatgaatttgcctgctattggtacatacctgtgtgttgtttctctcccacccttccctgtttataccttctttgtggcactttggttaagcagtgctgtataatttctcttggttaactttgattgtatcttgtcagaataagacagtgaccacagtttccaaagatccagggaaacagccaggccacaatgagaaaaaattccagtttttgggatgatcagacaccagtgtccttcagatacgggcatgcacggg

SEQ ID NO: 89511 - DNA, 1080 bp, Homo sapiens
aagaaataactgttttctgtcaggggtgggaggaaggattattaagtggagttctaggtcattgatattgtgaagaatagataatttacagggacatgttaggaattggagaaaaagtaagttttcctgaccttggtaacatggcattcatttctttgagcaactcacttggcattcttcttgtatcttttcagctcccatggctattgaagaacaagtggctgttatctatgcgggtgtaaggggatatcttgataaactggagcccagcaagattacaaagtttgagaatgctttcttgtctcatgtcgtcagccagcaccaagccttgttgggcactatcaggtatgaatgcaattgttggcatctttttttaaagttatgtttaagatatgaagttaaaattattttcaaatctgtagttaggctagtcattaaaactttttccaggtcagaacttacgacctgcttttatttccaaatagggctgatggaaagatctcagaacaatcagatgcaaagctgaaagagattgtaacaaatttcttggctggatttgaagcttaaactcctgtggattcacatcaaataccagttcagttttgtcattgttctagtaaattagttccatttgtaaaagggttactctcatactccttatgtacagaaatcacatgaaaaataaaggttccataatgcatagttgttttctgtcatttgtgttattctttaaaaccaagatcaaattgagaaattggtaagcaaatgcttcttgatctattttacttgaatattggtacagtcaactgggctagataattcaaggctgagctctttgtaagttttttttttgtttttttttttgagactgattctcactctgtcactgaggctggagtgcagtggcaccctgtcggcccactgcaacctccgtctccgggttcaagcaattctcttgcctcagcctcccacgtagctgggattacaggtgcccaccaccacgcctggctagttttttagtatttttagtagagacggggtttcaccatgttggccaggccggtcacgaactcctgacct

SEQ ID NO: 89512 - DNA, 3056 bp, Homo sapiens
caggtctttcccttcccacgaggccatatctcaggctgtctcagtggggagaaaccttgcacaatacccaggctttattgggcagagggccctgcagccttccacagtgcattgtgtccctgggtactcgagactggagaatggcgatgacttttacgaagtatactgcctgcaaacacatttttaccaaagcacatcctgcacagccctaaatccgttaaaccttaagtcaacacagcacatgtttctgcgagcacagggttggggctatggttacagactaacagcatctcaaggcagaagaatttttcttagtacagaacaaaatggagtttcttatgtcttcttctttctgcatagacacagtaacagtctgatctctctttctttcccccacagggaagtccttttaagtttaggaagatttatatttactttctctttttaaaggaaaacctcaattgctattgacacaatcattaaccagaaacgtttcaatgatggatctgatgaaaagaagaagctgtactgtatttatgttgctattggtcaaaagagatccactgttgcccagttggtgaagagacttacagatgcaggtattaaaagaaatttagtcccattgctattatcttaagtcccattgctgctgattgtagaatagcttctacttaatgaaggcatattttaattacttcctaatgggctgaactttttaatacaaatcagtaggtaagacaatgtaaaacagtagtacatttaaaggttttgttggtttctttaaagtggaagctgtttgattctgattaactctttttttgttgtttgagacggagtttcactcttgttgcccaggctggagtgcgatggcacgatctcagctcactgcaacctctgcctcctgggttcaagcgattctcctgtctcagcctcccgagtagctgggattacaggtgcatgccaccacgtccggctaatttttgtatttttagtagagacggagtttcctcatattggtcaggctggtctcgaactcctgacctcaggtgatcacccgcctagggcctcccaaagtgctgggattacaggcatgagccactgcgcctggcctgattaactcttaatggtaaatatttttagcacttaggtaatttttatagtagcctccaatttaaaaccacaatattgataaaattgtaaaatatattttctcagatgccatgaagtacaccattgtggtgtcggctacggcctcggatgctgccccacttcagtacctggctccttactctggctgttccatgggagagtattttagagacaatggcaaacatgctttgatcatctatgacgacttatccaaacaggtcaaaggaaataaatttttagaatccatttatttgtactgaagtaaaagttcacatatgcaacttctatttaataggttaacttcacaaacctattctgtaccataggctgttgcttaccgtcagatgtctctgttgctccgccgaccccctggtcgtgaggcctatcctggtgatgtgttctacctacactcccggttgctggagagagcagccaaaatgaacgatgcttttggtggtggctccttgactgctttgccagtcatagaaacacaggctggtgatgtgtctgcttacattccaacaaatgtcatttccatcactgacggacaggtattattttaatgattaaaagaaatgttaaaaaagatttggataattctaaggcattggttgagactaatggtatattgactgatttgctaaatgcattttactttttattatggaaaatttcaaatacatagaaaagttaggagaatggcatagtgaaaccccatgtatctgtcacccagttattgcatagagtagcatgtttcgttctagtttcatttttaaccactactgttctcccttctagataattttgaatcaaatagaaattatatcacttcatttgtatgtatttcagtataaatatgttgcctattatgtttttttctcatctcatgcacatctcctaattgcagcaataaaatatacaggtcaggtcgtgaaagatttggggtactgatgctttgcattgttaggttttgagtttcagctttttggcataatgacttaaatttgaagatagttgatttcttactttaagcttgctagcgtgcgtatttccttacattatagatcttcttggaaacagaattgttctacaaaggtatccgccctgcaattaacgttggtctgtctgtatctcgtgtcggatccgctgcccaaaccagggctatgaagcaggtaattttgcatcactttggcagtaagggggctatcattagattagcatcttaaggtattaatatattaactatatttgtatagtgctctgtgtcactgagttacagtacagtaatttctgtattgcaggtagcaggtaccatgaagctggaattggctcagtatcgtgaggttgctgcttttgcccagttcggttctgacctcgatgctgccactcaacaacttttgagtcgtggcgtgcgtctaactgagttgctgaagcaaggacagtattgtaagttgttcttttcttcatttggtcaggttcctattgtgtatcagggtcttcccaggcctacagagctgcatcacatatcacggcctgtactacgtgttgttatctgttatctttcatcaaaggcacttttacttaaactacatttgttttttgatttttgatttttttttttttttgagacgaagtttcattcttacggcctaggctgaagtgcaatggcgcaaccttggctcattgcaacctccacctcctggattcacgcgattctcctgcctcagcctccttagtagctcggattacaggtgtgagccaccacgcccgactaatttttgtatttttagtagagacagggtttcaccatgttggccaggctggtctcgaactcctgacctcaggtaatccaccctgcctcagcctcccaaagtgctgggattacaggtgtgagcccccatgcccgg

SEQ ID NO: 89513 - DNA, 1107 bp, Homo sapiens
taatttttgaaactgtttatggagcttctcacacataaataagatgataatcaaatttgtcttaagatttccatttggccttcatcactttatttcatactgatcacccagcccaagaatcattgccaaagaaaatacagtggaaaaaagcttattaacctgtccaatttctttgcttctgtaatagttatttgaggatatgatagtgagcatattaggcttatcaatgtgctgtcctaagattattcaaaatagcaattttaaaagtcttaatcagagagggttgtttgttagttggaaaagtactcaagaataaaccaggtgaaaaggacaatactgcttccccccccaccccccgactattttcttatgtagtattggtgtatggggaggagtgcccattcagcttcattgatgttcaattgtgtcttttgtgcagggtatgtccttgaacttggaacctgacaatgttggtgttgtcgtgtttggaaatgataaactaattaaggaaggagatatagtgaagaggacaggagccattgtggacgttccagttggtgaggagctgttgggtcgtgtagttgatgcccttggtaatgctattgatggaaaggtaggtttaatgttcgttagatatagttgcagcttctaacaaacatcaaaactgattatgcttagggtttttctttttattttttaacagggtccaattggttccaagacgcgtaggcgagttggtctgaaagcccccggtatcattcctcgaatttcagtgcgggaaccaatgcagactggcattaaggctgtggatagcttggtgccaattggtcgtggtcagcgtgaactgattattggtgaccgacagactgggtaaagactcaaaagcatattaaaagttctaactaaaatttgctcaatggaaggattatattttagtcttggaatggtaaatggtaatggggacattagaatctaatacgaggattaatagtaaaatttcagctgggaagtgaagggggccagcccctccacacctgtgggtatttctcatcaggtgggacgagctagctcagtcggtagagcatgggactcttaatcccagggtcg

SEQ ID NO: 89514 - DNA, 1164 bp, Homo sapiens
cactgtggctagcgtgagccactgtgctgggtctgtagaatatatttggattattatgatcacaaaactagttttttgttgttgagaaatgggctttgaaaagatccgaggaccagatttttattattattattattattattattattattattattattattattattttgagatggagtttttgcccttgttacccaggcttgagtgcaatggtgtgatttcagctcaccgcaacctccgcctcctgggttcaagcgattcttctgcctcagcctccgcctcccgagtagctgggattacaggcatgtgccaccatgcccagctaattttgtatttttagtagagacagggttctccatgttggtcaggctggtctcaaactcctgcccttaggtgatctgcctgcctcagcctccaaaagtgctgggattacagctgtgagccactgtgcctggcccagattatttttttaattgaattgaattgtcttccatagggactgctgagatgtcctctattcttgaagagcgtattcttggagctgatacctctgttgatcttgaagaaactgggcgtgtcttaagtattggtgatggtattgcccgcgtacatgggctgaggaatgttcaagcagaagaaatggtagagttttcttcaggcttaaaggtaaattataaaataagattttggtgttttaggatctaagtcttctcagttattcatttagcgattcaaagattgtatcagatttttaaaaaactttgtcttaatttgcctcagatttttttcttgttattatcatagattgtaaagagaataaacttaagggtttgaattagccaagtttttttactctagggactgatttatacataacttgtagccactggctccaaaatataaaattgaataaactttcaccccaaatccaagaagtttaagtctgttctgtcttgctgttaagattattttatacaaaagcaaagcatttgataacttcaacaaaatttttctggtggaaattggaagtccgtgactttgtatttctagtgagtagacatattgttcaaaggcgagttttggtgtagctatcagaagctctctaatgtaagtctactttgtattgggttgagcctcatctgtcagggtatgagaaataag

SEQ ID NO: 89515 - DNA, 1252 bp, Homo sapiens
tttgggaggccaaggcgggtggatcacttgaggtcaggagttcgagaccagcctggccagcatggtgaaaccccgtctctactaaaaatataaaaaattaacctggtggaggtggcgcacccctgtagtcccagctactcgggaggctgagaatcgcttgagactaggaggtggaggatgcagtgagccgtctcaaaaaaacaataataataaagtacagactgcattttaaaaatatgcgagtgtttactgtgtactaggagctgtataaaaggttttcacatatatcaaaagctactttcccatttgacattttaaacaaaatgctttatatgtaattagcattttcaccagtactttgatcacactaagctggcatttgtttaagcttgtaagttttataaaggctttgttaaaaatcaaatttttaagaatacttttgcactaggtctccagaaatgctttgggttcatctttcattgctgcaaggaacttccatgcctctaacactcatcttcaaaagactggtaagttattatttctcagtctacgccgcacttactagatgaagatataaattacatacatcgtataactgtggtgagttgtttttcatttgttagttttttctctagtttgtatagactctcaggttcttaaaccatattgttaccatttagccctgtcatggttctcttgttatagtcaaatgaactactgttacatatttttcttttgatattagtatggcttctttgttctggtaatggcccttgggtagaaacagaaagaacatacactaggtaatggaatctttgtgacctctggaagacttcctttttccttttctaaaaggcattagaaaaaatgtaagttcttattgataggttttcttattcgttttctttttttttgagacagaatcttgctctgtcgccaggctggagtgcagtggcaagatctcggctcactgcaacctctgtctcctgagttcaagcaattctactgcctcagtctcctgactagctgggattacaggcatgcaccaccatgcccggctaattttttgtattttagtagagacaaggtttcaccatgttggccaggatggtctcgatctcctgaccttgtgatatgcctgcctcggcctcccaaagtgctgggattaaaggcgtgagccactgcaccggtccactgataggttttattttttcaaaggcagtagctactagatatttggcaatctgtgaac

SEQ ID NO: 89516 - DNA, 1722 bp, Homo sapiens
acgggctccgtgggaggctccctgctggtggccagtcccggggtttagctgttcactgttgctactcgtgctaaaccacggtctaacactaccgacactattaatcgccctggtcctcaagacagccgcgaccccagacgggtgaggccctcatcctctagcaccagatggggcctgggaactgctgcttagcagattcagctacccacgtggtcacccggggcaaccacaaggtcgactcaaaagaccaaaataaatgtataacgaatgccaggaccaaagccggaatatatctaatcattcattttgaggtttaaacttaaaaatgttacataaaaaaataagtaacctgccaaaaaatgcagagtggcggcgggggcggggggagaggtggtgaacgcgaggggcagtacttccgggtcaggtgggccggctgtcttgaccttctttgcggctcggccattttgtcccagtcagtccggaggctgcggctgcagaagtaccgcctgcggagtaactgcaaagatgctgtccgtgcgcgttgctgcggccgtggtccgcgcccttcctcggcgggccggactggtgagcaccgaaggccggcatgatgcaggcggccgggtggggctgcagggtggtggtgcgccggctcgggcgctctctgcaggagggcgaggggctgtggcgaatgccgccatcttgcacccgtggcttctccggctggacagagcaggcgacacaggtgcccttttgctcgtcacctgcgcagaggcagaatggtacagggcagacagttaactcgatggtgtccagagacagggcctcaagattcctgtcttcggctgacagcggccctagaagggggatcttgggtgaaggtcagggcttgggcgctagctctccgaggcctgttctgaatcggtgaggttcctctctttcgattcttagggtcgcgtcccgctgaaggtcagaaaactgctgtcagctcttgttgaagctagtcagtggagtctgacattgtgtgaaggtcagcaggcccagcatttcacctctgcctggagctcagtttagaggaaaggaataaatgaaggtggtttttggaatacttacgtaggctttctcttagtgctgaatacgaaacgaccgtgaaaacgtcctgcaggtgcaaagaaccatttcatgtggccagcactgtgacaacagtgaagctggtttctaaattgtctctccggcagagtgtgtgctttgtggcacttggacgtgtttaaagaatttgtccttgagttttccacctggttttgagtaatttttagtgatggagaattcaagtaaaagagaacaaggttggaaaatggctgtaaggattaatacccttcgttatttgtttcccttgaaattaacatgatttcagtgtaaacgcattgacactgacactttttttttgttctaaaagtaatctcaatttgaaaggtgaaataaacatgttggctgttttgctgccttaacaaccgctggtagcatcttgggtttctgttaacaaaaaagcatttttaacggttttcatctagctcctatggaaggtagaggcttcagaattgacagtgaccagtcgcagtattacaacttgaaggagaaactgaaggaagttccaggtggctgcaggatttgttgagagagtaaaataagtccacatgccacaactcttggtttctaatctaactc

SEQ ID NO: 89517 - DNA, 1101 bp, Homo sapiens
gccgacagcgggtctcctgtgcgcgccacgtctacttttctctcccctattccacacatccgtcttttagtgccgccgtcactatctgcaagccccccgtgcttagactctcctgaaggcctttcccttcctgcccgggcctccccttgtttggatctggcccgggagaggcgttgagcagcccgtgtccacagactctggagtgggacttatgaagccaaacccgccttccggttcgctgctcagcccggcggcttccacatctgaactgcttccgcgccctgcatcccaacactgggagcctcccggcgcggcggggcttctggtgatcgagggacaattgcttttttcagaccatgcacggtctaataatgcgttcgcattattatggtctattaagctttaaggtttttcaagcgaggcaaattgttagcctgtaccgcttttgcagatttggaaaagaacggattgttctctggtaattttcagtattgtacgtttctttgtgtacttgctcactttttatttcctgatatctagtatctccctaaagacaagtgaggttgtgaagtaggactccaaaatagtcacagaaagcatttagtttgcttttgatcacttctttgtcatattctcatcgagccattacagtaaacaaggcttataatatttgtctttcttttaatggttaggttgctgcgtggttaaaaaaaatatttggagatcatcctattccacagtatgaggtgaacccacggaccacagagattttacatcacctttcagaacgcaacagggtccgggacagggatgtctacctggtaatagaggacttgaagcagaaagcaagtgaatacgagtcagaaggtgagattaagtccagagttttgaacgagaataaatagaggtaaccaaattttataacactaaagtatacaggattaatttactgtagactacttgttttgctcctttatttttcccagattttcttccactctgttatagtagtaactttattgttttatgtttatatatatgtatatgtatgtgtgtgtgtgtgtgtgtgtgtgtgtgtgtgtgtgtgtgtgtatatatttt

SEQ ID NO: 89518 - DNA, 1045 bp, Homo sapiens
tgccctcccctcccccagccccttcctcaggtttcaattaactagctgcccatagattgcagcaaatttattctccctgaaatagaagtgacccataacaaggcttaatgagatcatcccccaaggaatttaataagggacaatccctttagccagtcagatgagcgtgtcagctgtgtgtgagggagtattgggggagggaaggcagacagtgggtgccccacctctggggtgtgttggtggtccgggcccctggggcaggcggcagcgggtgtgggaagcagagagacctggcagaccggctgggtgggacagcacagaagcacaagctcacctacttcagaagtgtgccaagagctagcaggaaacctgatgccctccctgactcagcttcccaggagctccccagggcagtcctagaggtcacaagcccaagagttttaggtatcatgggaggaagattgcagagtggaccctttgccccccagtaaattaacagaggtggggatggatgcccagcatggttgcacgtcccttacagagcaggggaaagaggacatttgtttttcctgctcttgaaagctgatcgcctctgcagccaggcgtggtgccagttgtggtcagcgtctagcctgctggcagatgggtcatcaaggactcagggtgagtcctcagctgtctgcattttgcagcagccacctcaacgacacacctccttggcacccacagccccccacatgagagcactagcctgctcacccattagagaacgattcttccttctcacaacggtgcagcactcagcatctgcccatacagagtctccaaaagctagagcctgagaggctcctaggtgtgacccggttcaaccatttccctaatttacagatgcacaactgggacccagggaggttaagagacttccctaatgtactggctttctgtgttgcccacaaatcatctaaaaatgattgtcatatagcagattaaaatagcacatacttagcgtcatttctatgggtcaggaacctgagctcagcttagc

SEQ ID NO: 89519 - DNA, 1108 bp, Homo sapiens
caactgaggagaagacaaagcaaccataaacagtccttgtttcagggagagacgtgagcagggcagaggcagcccttcagcagccggggcctctgccgaactcctagaactggctagggtgagaataagccctgaaatgtacagagttcttgctgctacaagactctggcaggcccactggcaggaatgagtggccctggcagtaactgtacattcccacccccttgtagcctggggcaatctcttttgggcctcccatgatgataagctgtctcctgagcattcctgactcttccagttcaacaataccaatttagagtttctagctgagaacacacctctcccaaagggcaggctgaaggaacaggattataaaagggtcatgacctgctagaatggaaacaagtttcctacagttcttgtggcagtggccccccaagttagggttaaggttgctccccgccatcaatatagcccccaggattggatggatttgaggagatggattctaggagcttctgaaattaagtggaaatctttggaaaagtaagaaaagggttccaggggaaccttttcagtaccctttgtaaaggcctggaacattccatacttgtattctatctacactttagacccagtcttatcccacaatagtgtgggactctttccacactatgagtccattgtgggctcatttccacaatgatcttttccctttgtgaattaatatagctctaataatatcaatgcacagatttagctttagctctcaatggtcctcttttttaaaatttaatttttttatgtttatgttttagagaagatgtcttgctctgtcatccagaactagagtgcagtggagcaatcatagctcactgcagcctcgaactcctggtctcaagtgatcctcctgcctcagcctccagagtagctaataggtatggaccactgcacccagctcaattgtcttcttattgttcttttcctttaagttattcttgtctttttgtattataaattctagagttaaattagcagggcatggtggtgcatgtctatagtcccagctcctcaggaggctgaggcaggagaatcacttgtacccagg

SEQ ID NO: 89520 - DNA, 1053 bp, Homo sapiens
ttataatttgaggattctataaaacctggcttgggggccaggtacggtggctgacacctgtaatcccagcactttgggaggccgaggcgggtgggtcatctgaggtcaggagtttgagaccagcctgaccaatatggtgaaatcccgtctttactaaaattacaaaagttagtcgggcatgatggtgtgtgcctgtagtcccagctactagggaggctgagacaggagaattccttgagcctgggaggcagaggttgcagtgaggaaaaaacaaaacaaaaaacctggcttgggaagtcgagactgtggttagctgtgatcgccactgcactccagcctgggcaacagagtgagaccatcttaaacaaaaacaaaacaaaacaaaacaaaacaaaaaatgtgactcaacaaaaagatctccctctcccgagctgagctgccttactctttgaaattcctaccctgtatgccactccttgactgcctctagagaagtgtttgttttagacagacagagtattttgtcacctgggaagggcagtatattagccagctaccactctagtaagaattagtttctgtaattaatcgttgttaagacatggagtatggaagccttagagattgagtcctaggccaggaaggtttggttattggaagtgaggaggggcaaagagggctaaggtcctggggccttgaatgatgagagaaggcactggctgggtttaagaggtcatgagcatagcagggaaggacacaccaaagacaaactttgggttcatatatttgcttaggtaaggcttcctgtagtgaaggcaactcattcaggaaactgctgtttgtttcttttttctttttttgaaacagggtcttactgtgttacctaggcttagcacaatggtgagatcatggctcactgcagccccaacattccaggcccaagtgatcctcacacctcagtctccagaatagttgggactacaggcacacaccatcatgcccagctaattttttttgtagagatgacagtgtctccctatgttgcccagactg

SEQ ID NO: 89521 - DNA, 1056 bp, Homo sapiens
agtgaagtgggggaactaaggggcctggtctgaagggggagactgatatttaggggagtgcggacccagtggtgtgagattttcagaatctcctcttgacgggtctcatccgaggttccagcacagctctgtaaaggtaaagaccgtttacattttcctcctcaaagctttattattattatttttcttctcaaaacactgctttgctttgggggagcgcgggtccttggccagatcttgagtcttgagatatgtcttcagcatctcctgctcctccttgggaaacgctccacccgccagtgggcctgcgccctcctccccttcttcggggttcgggtccacctcgtttcccccaccctccccagggctgactgcaaatcggagggcgactgcagaggcggaattcggggcagagcggggtctccccagcgggccacgtcccaccagcaggtggcggtcgatctgcaaggcctgcaaggtgcccggacagaaacttgagcagatattggtgccgctgcccgagaagagctcagccgagtctccccgagcccagctatcggcatccgcgaaaaagcggggagagaagggcacgggctctccgctggagcgactctgggattcagacaccgcaagctgctttcggaagggcttcaggagggggtgagtactgagcagcgcacagaaaagggagcgctgtcctttgctgaaggcattgtccttggcttgcattgagtggctttcccaccccccgggaaagacatttcgggaaggtgacggtctcaacagaaggagggagcgcgggaaagaagcccggggagccggcgccttcacgccccgcggtctgcagcgggaggagcgcgggttccatcgcgccagatggcgctgtctggcttttctcgggcctcgggcgccagtctccagaggtctccggcgcagctgcctctctagccggccgacgcgggctctgtgtttccgggcggaagtgaggcgcccagcggaacggcctctggtgacattttcttgggggcggcgcggacgactgaagggacttggtgg

SEQ ID NO: 89522 - DNA, 1905 bp, Homo sapiens
agtggcggcaactccgccagctccgagagtagggggtctggcgccgacacctgcccctgcagcggagagctccggcgccgcggccgcagtggccttggtggagggagaaaaggctttcttataggcttggcgccgcctgcctctcggcgcttccactaccttcggtcggcaggcgcctccagtcaatgcgagagatgtgtcagtctccaaaatagaccgcttctggggagtttgtcaactttatttcaaaaccggcgaggatgtacactgacgaacccgtgttaaagactatcgcctttacgcaagccattcattctcactttaaaattgtccacccccccgccccgacccccgtccccggcagcccccatcacaaaattgatgctcacaggttgaagtagagaacatcggtacgagccctaccagatccttgagcagtttctgtttggatgggtttttcgttttttgcctgaccttttgctttctgaatcctcttacccagtagaattaaaatcctactgatgatacttcgtcaaggttggacctcttaattacaaaaacatctgccaattttgcttaggcttttattgtgtagtattgggtacatgctaacagaatcactccctttcttctcttgggatattttaaggatggaagctattaactttctaatgtagttttgctgatcttggcaatctagattcctccagtaatcagagcattgccttttggtttaacaagcatttttagaggcctacaattgatagttactgcctgatgtcctgaggagtctcaggacaaaaaaaaaaaaaacacatggttcaagcagttatcctgcctcagcctcccgagtagctgggattacgggcacgcgccaccacgcccagctaatttttgtatttttagtagagacggggttttaccacgttggccaagctggtcttgacctcctgacctcgtgatctgcccgccttggcttcccaaagtgctgggattacaggcgtgagccgtggcgcctggactgaatcagatttcttaatgggaaaaaaaattttttctgacaactttttgtggaaaataggatggactggatattggagctggaaactttctccattgttagaataagttcaccgtgtagttgttacttattcactttatatttaacatgcatttatgtgagagtaactgtcataatactctttgttttatggttatgattaattcaaaacccatatagtaaagataaattcagctttaggttctaatttaatgcagttccattagaactgagggctaatgcgtgtccttcaaaggtttcttgcttctaatattaatagtgatattggtactttcagtctctttattgtgtgactagtaaattctgtgcgcttctgtagttactcattatacaagaagttgttttgttgggattcccaatcttacagctttttttgacacgtgcatgaacagacttgataaataggcaatttcagtattcttctttctaaagtttggaattcatgtacactagagacccaaacctttggtaaatcatcttagatcttcctcattttcctgcacataactgaggatatggaaatagcatgtattcatgtttactgaatagacagtacttgagaaaaacctgtaaaggtgaaaaatgtgtgtgtgtgtgcttttttttttttttttaaagacactcttgctctgtcacccaggctggagtgcagtggcatgatcacagctcactgcagcctcaacctcccgagctcaagcattcctcccacctcagcctccgaagtagctgagaccacaggctcacgccaccacactcagctaatttttaattttttttttttttgagatggagttttgctcttgttgcccaggctggagtgcaat

SEQ ID NO: 89523 - DNA, 1870 bp, Homo sapiens
ttagctgggattacaggcatgtgccaccacgcctggctaattttgtatttttagtagagacgggttttctctgtgttggtcaggctggtctcgaactcctgacctcaggcaatctgcctgcctcggctcccagagtgctgggattacaggtgtgagccaccacggctggctaatttttaaattttttgtagagatggagtctccctatgttgcccagacttgtcttgaactcttgggctcaggcagtcctcctgccttggcctcccaaagtgttgggattagagttgtgagcaactgcacccggcctaaatgttggatttttaatgtgttcctttaaggaatagtgatttcattatcttctgttattttaggaaagagtttgggaccaaataaagtttcttgggttactgtaattctctaggcaaaatgaagtacatatgatactatgaataaaaagttgtgagactataaaaggggagagctatatagaagggggatagaaaatagagtggataaaatatttgtaaggggctgggcacagtggctcacacctctaatcccagcattttgggaggctgagacgggaggatcagttgaactcaggagtttgagatcagcctgggcaacatagtgagagcccctttctttttcttcttttgttcgtttgttctttctttttttctttacttttttttttttttttttttgatggagtcttactctgttgcccaggctggagtacagtggcgcggtcttggctcactgcaaactctgccttccgggttcaaatgattcttccatgtcagcctcccaagtagctaagacaggcgcctgccaccacgcctgactaattttttatttttagtagagatgtggtttcaccatgttggccaggttggtctcgaattcctgacctcaagtgatcacctgcctcggcctcccaaagtgctgggattacaggtgtgagccaccgtgcccggccttgagagcccatttctataaaaaatttaaaaacttagctgggtggggtggtatgcatctttagtccctgctgcttgtggggctgaggtggaaggatcgctcaggaggttgaggctacagtgagctgtgactgtgccgctgcactccagcctgggcaacaaagtgagaccttgtttcaaaaaataataattcatatggagagtctttattctcacaacaacaatttattgagtgtttactgtgtgccagcagtgctctagttgcaggaactatagtggtgaataagaccaacaaggccacctggtgcttaaggagcttagacatttaaacctgaggttcgagttggatttccaggtgagcatgccaggctagggcagcctaaccaaagtcatgattatcagtgcacttgaatggttaagtggggccagtgccttgagttttcaaaaggaatggatagggcagatggagatagggccaagttgcaaaggtaccttattagtccgctaatgggttgggaattttcttctttttggaggaaagaattccaggtagaatgtgaagaatgagataggcattccttttatttttatttatttattttttttgagacagagtctcactgcgatgcccaggctggagtgcaatggcacaatctccgctcactgcaatctccaccttctgggttcaagtgattctcctgcctcagcctcccgagtagttgggattgcaggcatgtgccgtcatgccaggctaatttttgtatttggtagagacagggtttcaccatgttggccaggctggtctcgaactcctgacctcgggtgatgcaccacctcggcctcccaaagtgttgggattataggcgggagccaccatgcctggccctgac

SEQ ID NO: 89524 - DNA, 2757 bp, Homo sapiens
ggcttatgcctgtaatcccagcactttgggaggctgaggcggcggatcatgaggtcaggagatcgagaccatcctggctaacgtggtgaaaccccgtctctactaaaaatacaaaaaattagccagacgtggtggcgggcacctgtagtcccagctactcgggaggtttgaggcaggagaatggcatgaacccaggaggaggagcttgcagtgagccaagatcgcgccactgcactccagcctgggcgacagagcgagactccgtctcaaaaaaaaacaaaaaactagaattgtgcttgggtagtctagaaattaagtttattttgattgattgattgattgattgagatggggtcttactatgttggccaggctggtctccaactcctgggcccaagtgatcctcccatttcagcctctcatagtgctgggattacagatgtgagccactgtgcctggctgaaattaagtttttattagcataattagcattagagaaacaagatactgaccaaagtgaccagtagaagttatttttttactgagttgactagtttaaaaaaatgacctttacaataatgtctggagtctgcattttgttaggtgccttataattagagaaaggtattgtcggggatagggaagttgggtgtggactaaaatttaaggaaaacaggattgtttttctttctgtattaagaacaaaaacttcatgtggttaaaattttaagcagtatcctgtctgccttagttttaacctagcatagaatcatagcttgttcttaaatcaacagtttagtgtcaagggtttcttactatttttctctgctgaaatcaactaagcactttgcagtgagcctgaaggtgtgtatagtggagagaattttggcagcttttatcttgggacctcagttcctggcatgtggttatccatctttatgtgaattgtcttctgaaggagatagaaaatgaccagggcagaaatcttggagaaaatttagaacctttgttttagggccaggcatggtagctcacacctgtaatctcagcaccttgggaggcagagttgggagggtagcttgagcccaggagttttagaccagccggggcaacaaagtgaaaccctgtctctattaaaaaattatttttaaaaattaaaagaacctctgttttaaattattcttgatttacactgatgatgcttttgagtactttagagagtcattagccacagtgctttttttttttttttttttttgcatttgataacttctttggcttcttacttgatgctagtttattcacagccctggtgcaggtccaggtacatgccagaagtagtaatatctgcaatatgaagtgatttgagcagccattatcacctttgacctatttatagagtttatatcagtggagaaaaagttggctggcaagcaagcaaagctgatctctggtggttgcaatctcacaatttatatttaagttccgggtaggccaaattcagtgcattatggacagatccattcagctgtattaatattagagttccctttctgtactctaactttttagcactccagtttcccagtcagcttcactgttgaaggaaagaaaaccgaaaaacttaccacactaaaaaaaaaaaggaagagttccttaatgtaatatgatagtcagtgttcagatttccctcttatctcataaatgtgtcagatcaagagccaaataaggtctctgcattgttttgtaatctgtaggttccccctccatttcttttccctagcagattattagttacaaaagaagttttcccagtgtggatttagcagttacattcctttggatttctgtggtggtggtggtaaacgtttttctctgacccctgggtttctagttaattggtattagatttagaagcttgatcagattgtttctataatatatattctttctcttgcttcttttgcaggggatgaggggaatactttatagatggtacttggatcagtaggtgcataatatttggttccctgtgatgttagtagctgttggtgatcgttgcccagttgtgttaatttgttactcataattccttactctgaatggggcatcctctctcatcagtcctagtttgagtcttttatgcttgtttatagcttcttcaaacttttctttcttttgaggattaagggaagggatgagttgctgtggagaaaagggctctttctactatattgtatttctgtaagtgttttttattttagtcctaatctttggttcttgcattgtctgcattgtctatgctgcagcttcttggtgggaaaactgactcaaaatcccagcaaataattgaaagaagtccttcaaaaccaaatttttaaaaaaatttttttctgagttagagtcttgctctgtcgcccaggctggagtgcagtggcgcgatctcagctcactgcaacctccgtctcccgggttcaagcgattctcctgcctcagcctcctgagtagctaggattacaggtgtgtgccaccatgcctggctaatttttgtattttatttttgagacggagcctcacagtgtcacccgggctggtgtgcagtggcatgatctcagctacttgcaacctctgcctcctgggttcaagcgattttcctgcctcagcctcctgagtagctaggattacaggtgcctaccaccacgcttggctaatttttggtatttttagtagagacggggtttcactaggttggccagg

SEQ ID NO: 89525 - DNA, 1072 bp, Homo sapiens
accctcccacctctgcctcccaaagtgctgggattacaggcatgagccactgcccccagtagagacctgtgttatgaggattatccagtccaaatccaagttgattatttctctaccaccaaacttttttttttctttttttttctttgctctgtctcctaggctggagtgcagtgccatgatcatggctcactgcagcctcaacctctgaggctcaagtgatcttcccatctcagttccctgagtagctgagactaccagcatgcaccattacacacggctagttttttaattttttgtagatatggagtctcactatgtttcccaggctggtctggaactcctggccttaagagagcctcccacctctacctcccaaagtgccgggattataggggtgagccactgcttggctgtaccaccaaactttttactcttcctgtagtctacctgtagtcccccaaagagtggtcttcagccccattttttctcttttagagaacttccctgatctgtgatgaaaacttgtctcctctctctttaaaatatcttctctcaaatctgactttactgatactgtttgatctcatttatgggtaatttaaataatcatttcatctcagacattaaacactaactctttgagaatcactcagctgagttgttggggatacttaaaacacagtccttgttttgtttttttccccctgctatcaaacattgaatttattacttttatcttaccgtatgttagtaccttttaacccacttctcttcattctcctcctctctctgccatagccctttcttttatttttatttttttgagacagggcctcactctgtcacccaggctggagtgcagtggcataatcacagctcactgcggtcttgacctcccaggctcaagccatcttcccacctcagcctcccaagtagctgggctgcaggcatgcaccaccatgcccaactaatttttaatttttttgtagagacagggtctcactgtgttgcccaggctggtcttgaactcttggattcaagcaatcctcccactttgatttcccaaagt

SEQ ID NO: 89526 - DNA, 1025 bp, Homo sapiens
aatgtatcttttttcattaaaattgcgtgagaactgtttcttacctctctatataaagtgctttctcatttttttaatggccacattgtatgaacataccatgatgagctaacttttgtcctgtttgtggtcaatactagtcttttgtgattgatttgagcatatttaagtggttttgactgcaataccggttactaatttaggtagtataaattaaatctcagttaacactcaaatttaaggaacttgaaagataatcattaaattgaatgatgtgccatattgtcatttttttttaacagggaaaaacaatctagatttacctgttttatccacacaacttatttcttgaagaaacaagcgttgtatggtcattttaacaaatttactttttagtctgatgctgtattatgtactttgaaaatatccagtgctgccttctttcacaaattgagacttttgatgcttgtcctatatagctgacattaattccatctgagtatattttctcagatattttagctttaagaagaattttttttttttttttttttttttttttggagactaagtctcactctgtcgcccaggctggagtgcagtggcgggacctcggctcactgcaagctccacctcccgggttcaagtgattctcctgcttcagcctcctaagtagctgagattacaggtgcctgccaccacgcctggctaatttttgtatttttagtagagatgggctttgaccatctcggccaggctggtcttgaactcctgatctcgtgatccacctgcctcggcctcccaaagtgctgggaatacaaacgtgagccaccgtgcccagccttaagaagaatcattattccagaatatacaatttgaatctccataatagaattaactctcatttttattcagttagaaaatctttgtcccccccactgctaaatttgactggcttaaaaaaaagaacttgggtttattcctcatacctgggggtattttgtatctgtgaatattttatttcg

SEQ ID NO: 89527 - DNA, 3953 bp, Homo sapiens
tatatcaaagtcaatgaatgcatattaattatatcagagttttgaagatttctttgtagaacactttaaataaaattgtaaacttgaaaatgttcattacatgttggcctttcaagttagaggattaatattatggcatttttagtagctcagtatgcttagattttgaccgtattaagtcctttgaatttgactgttgatcaaacaagcagataataatatatatatattttaaaggcctgtgtaatagtaagttttgccccacccacttagaaaggtaggcatgttgtgttgactaaataatctggcattctgtttattgactttgtgtgtttttgtacaggttgctttcctgttgcatctttgatatcatttcctagactctactccatgatttaacttgaaattctgaaatgaagatggaggaggcagtgggaaaagttgaagaactcattgagtccgaagccccaccaaaagcatctgaacaagagacagccaaggaggaagatggatctgtagaactggaatctcaagttcagaaagatggtgtagcggattctacagttatttcttcaatgccctgcttgttgatggaactgagaagggactcttctgagtctcagttagcatccacagagagtgacaagcctacaactggccgagtttatgagagtgactcctctaatcactgcatgctttccccttcctctagtggtcacctggctgattcagatacgttgtcttccgcagaagagaatgaaccctctcaggcagaaacggcggtagaaggagacccttcaggagtgtctggtgccacagttgggcgcaagtctaggcggtcccgatctgaaagtgaaacttccactatggctgccaagaaaaaccggcaatccagtgataaacagaatggccgagtcgccaaggttaaaggtcatcggagccaaaagcacaaggagaggatcaggctactgaggcagaaacgggaggctgctgcaaggaagaaatataacctgctgcaggacagtagtaccagtgatagtgacctgacttgtgactcaagcacgagctcatcagatgatgatgaagaggtttcagggagcagcaagacaatcactgcagagataccaggtagaggatgttttttaaactgactgtaaagtacctgatggcatttctcagctatcaggttcagttagatgagtgacacttgaaaaaatccaggagacctgcagctctgtgtaaatttgaagactgcagtctattaacaagacatggccaatttataaaacctgttctgaggtttccagtgaactttagcacatcaggaaaaacaaaattaaagggttaatgatagggacaagattatttttaagtaatggaatttctcataagtctgtctgtaacacattacctgaactcccaatcattgcctttttggcactgcttagatttaatactcactgttcggcatcattactgagtacattctcctcaggaataggcaccttgctttattatatagccactgcacttgagcttatagtgtctgaaataacacattctatcttttgttaaagttttctaataatttttcctccaaaaacagtagttttatgtgtttcccccatattcaatgcatgagaagctagttatccttgttacaaatctttctatcctcacgttgaaaagaatgtctttctgaaaaatttcccattagttccccaagttttaaaaaagtttgttagaaatccgcttgttctagctctcattggtataagggtctgtaacttattacatatttggtaaatctgctttccccattcttattgcatctggtactgtgtactataatacaaaggcagtcttgagatttcatagtggaagaaagatgtatctgaatggttcttaagtagtgaattcttattatccaagagatccttacaatatgatcaggaacattttgtaaactgtatggcattgaataggtcatggcagtattgtttattgccacattgaagaggggcaagtttgggttttctaaagttttatgggtgactatgttttttctctccctgttttctgaaagctttctgtttctacatgtgaagacagcatattgctgatatacaaagaacatttcaagagaaatcatattggttaatggaatctatagcttcccaaacttatataaattcagtaacaagaatgattggttttaaagcactttataggtgttcaagttctgataataagtcttgtccatataatataaatatgagtctcaaacgatctttagaaatgctttttactgttttaatatctctattggattcctttgctattgttccttgtaataaaactaccgggagggggatttcaatgaagctcatcagttaaatgtatgagagaaacagactttggggttgttctaaggcaggttttaggtatatattttagttttacatgtattaatatttttaaaaaaaccttattaatacctgtaaaattgtgcattcctatatcctcttctaacctcttaatcaagaccttgatggaactcttaatacaatacttacttccacttactaagcaggattttatgtaactaccccaatactttgcctttttgtggaaaggaagaaggtgggtaaacaaaatttaaagtcagaaccctattgtaaggtggcttgagaaatgtcttcataggcactttccctgttttgcttaaataggttagatgtgctttgttcatattttcctaatcttctttctaattgagtatcttgaccactgcttaaaacttaaaacaccagtgtctgtttcttgtctcttctgaattgtgtactaactgaacaccaaagtaaattaatttgaatctatagtttggtttctattgttcacaccatttagtaactttgtggcttttgaaaatacacatagttttctaaggtaatcctggagaatcaaatggtagattgaggtacagggtcactgtatgtgactgcctgtgtgtgtgctggcagttttgggaggtcttatggtatacctgccattcccataagacaggtatgaatgatctttactggaattatgcaaagcagcaaaaatggaacaacttagagttcaaatattaggaatttcatttcaattgtccatattgttgtctcttgaaaaattgtgacattgtgaatttttaatgtaacagtgatgtatctttcagtttactgagtcaccttatgactttggggaagagaggaggcacgttcaaccttatagtaagagcagttgtcgaaaagttgcctaaattgtaaaggtaggataaattatgaactgacttgagttcaacaacatggacattcaggtgaacttaagctggatgggcctaacagaatctcttggatgtcggaatgttaattcagctgtttacacagaatggaaaccaagtggaaaagtaaaaaccgattattgccatactctttcattaaggtacaaccaatttagtaattcagaaaatgctctttataagcttttgtttgggctcagcttaaaagttgaaggcattatcctaaataattcctgttaggatatcctaataccttaatcctaaatgttatgccaaataattgtaactgttaatgcatattcttttagagagtgcaaataattaataatgcagaccagtgtagtgcatgatcatactttaattgagtttgatatctgggcaacagatgtttatgacgattttttaaagttagcagttaactgacaggcagcttagtatcggcactagatcatctctctttgaagtttttggaaatatattgatgttttaagaatctgtttggaggtatcatatcaaaataatgctggcagtactttcatttggcagacttagagttgagtaaagggcattttatagtaaatttataatattttatagtgaattcatgtaa

SEQ ID NO: 89528 - DNA, 1037 bp, Homo sapiens
tggttatcttgagtatcaaggctttttatcaagtgatttctttttttttttttttgagaccgagtcttgctctgtcaccaggctggagtgcagtggcgcgatctctgctcactgcaacctccgcctcccaggttcaagcgattctcctgcctcagcctcccaagtagctgtgactacaggcgtgtgccaccatgcccagctaatttttttgtatttttagtagagacggggtttcaccatgttggccaggatggtcttgatctcctgaccttgtgatccgcttgccttggcctcccaagtgctgtgattacaggtgtgagccaccacgcccggccattatcaagtggtttccttatgcattatctttttgtgctttgatcatgctctgcagttttatgattagagtattactgttcatggggggtcagtttctctgtaaaagcagttttgagactagctctataaaatctgtagttggagggattttgattttaatgtaaataatggacattagccttcattcagtttgaaaaagttaattttttgaacatactaacatacgtgcatcggtgtacatggtcagtggggaaaagtttttccagtaactgtttttcataaatatttagcagagtggacctccatacagggtagctttatcttgtcttgtctttaatgacctgctttgtggttaaatgcttattcacaccgaagttccaaaaataatacccctcgtggcaggtaagagtcggttgtcttggtttgtttgcctttgaaaatctcatttcttttggagaatgtcattgaggctactgaggacagctgtttaagtttacttgaattctcaatccatgcagccaggctagaccagctcagccccacttcaagacaaaatctcagcacccattactcaccatacatatttatgcagtgagctgcatcatgaccagctatcatcttacctcatagtttttttctctggtagagataattaacttattatgcttgatcagttaactcttgcttagaaatttaaaaaa

SEQ ID NO: 89529 - DNA, 1200 bp, Homo sapiens
aaaaaaaaaaggtattttgatgttaatttgcatttctttgatcactagtgaaattgaaaaacgtttagctatttgtattcctttggtaaagtctgttcatattctttgcacatttttcttctgacgtgttttttcttactaatttttgaggctttttaaccttttgggggtttaattgcttggcaaattttaaatataaggcagtgaggaggattcatggttgaagatcccaaacccacatagtgaatccatgaagcgcagtaattgacctttttcctagattgaatatcaaaggatttcagtggctaaaagcctcatgtccctattttaagccttttgtaatctggttgtagtttggtagctatttaagagactcacaaaatacattgataacaaaacactgacacagaataatcaggtaaaaactgtctattttcagattggtaaatgcaaatcagatgggtaaaatacatatggtttgcaatctggctatgtattagaatcagctgggtggtatttaaaccatctgatgcccagaccccactttagccccattcaatcagaatctttggggtctgaccccaggcatcagctttaaatgattgaccttaggtgatgacactgagtagccagggctcagaaccgctcagttaagcagtgatatgttaagtttcctgtatctgaaaatcactgtgaaactggtagtctggttcaattaagttctcttactgctaatgggtatcaagttctaaacagtggagtctggtttttttgaaattacattagttataaatcacagcacagttctatattaattaacaagcattaagtgccctcttttacttcatttaagcgattatttgaaaagcatgcaatgtctaaatgtggttttctgtacgctacaaggtctagatgatgttaattaaaaagctttgaagtcttactggtgggtatcctttggcaatttctcatgttgaagcaccaagatactatttttggcctgcttattttctgaagtgagtgcctatattaactttgtaaaaggaaaaggtctttttctcaaaataggatatatcttagtgttaataaaagagcatgtgtgtgtttaaggtgagaatgtggtccctttttttgtcattgttttttaatagattttgcttctagagcagttttaagttcgtagcaaaatcgagcagagga

SEQ ID NO: 89530 - DNA, 1862 bp, Homo sapiens
gcactagaatggacatttgttacaattatgaacctacattgacacatcattatcacccaaagtctgtagtttactgttagggttcactcttggtgttgtaagttctgtgggctttgataaatgcgtaagtggttcctgtttttaagggctcaaaatgtcttgcttatcagtgattattgcttgtaggaatctatgaggctacaacttatctcactgcccccagcataaatgttcttataccattatcagcttttaaatacccatttttagtattcattgagaaataagtaatgcgagaatctaaagcagatcaaaggagccatccgatttcctgtcctatgcttaagtttgcccagcacttataatggggcttaaaggaagttaaactttagatttcatttagtctttttttccataagctaaacatactaacctttggggaaaggtatgtccttcttgagggagttttcgtataaacaaaacttttttaaaaagtgaaaacagcataggggatggagtaatcagaggaaaaggaacattatgaaattaggcagaggttggtgaccgacttcatgaggtttttgtttgctggatagagctgggctaaatgtttgtctcacagccttttaggcattgaaaataggtggcctgactgatttaaacattcttttttatctaggagaaacagttatatttgatagtgagacaggggaaacttctctttgcatcttcataaaaggccactatgtgataaagcaaaccatgttttcacaaattagtttaacaaatgctcaatagagcatttcataagagcattatttataagactcttgatgtaggttgatggtataaggctaagattggttgattccatcaatcattcttttattcagcaagtatctgagcacccagtccattggctttggggatacaacagtgaaagaagtctctgttgtcatggaacttaatctttcatgaggagacaataaatgaatttatcatatgttatcaggtagggatatatgatgtgaataataataaagcaggatataagagataaagattaggaatggggtagaaaagctattttagtcaagaatgatctgaggaagtaacatttttattaggtcccttagaatgaagagttcaatatagttattttattagagacccaaactataggtgacccaaaccaaagataatctagcctagttcaaggatgaaattatatatatatggggccatatcctaaactggaccactatgctactgggtattaatagttgtacacatgttcaggtgtttggaaagtgctggattatgtgttaacagatgccttttgttttaaaccacagggcacttcagccattaatgaatgtgctctccagaggggaaggatgtgatttgtagtatatcccaaacttaactacatttttttgtgtgtgtgtatggcatgcattttaacacttcacacagaccagcgtttgtaaaagctgacccagaggtattctgtatcatctccttcctgtggttttccataagaattaaaaaaaaattaaaacagatcttttgtgtgataagaatcatcacctaagagtgattgtgtaatgattgagtatgggccagctgacaaaacaactttttagaattttaaagtgaaaggagttaaaatactcaagaatgtagtggttctcaactaaggacatacattaaaatcacctggggagcttaaaccgaaacaaatcttagaagacttggagccaccctaggttttggtatttgttaagccactccagttcttattgttcagcaaaggttggaaactactgttaaagattcagtcagttgtattcagtctgtgt

SEQ ID NO: 89531 - DNA, 1014 bp, Homo sapiens
ttttcctgagtaagtgtgtcttaataaaaatacaatttccgaagcaataatgttttatgaaatggcctcagtgtctttaaaggtgccttcagtcatgctgcgggatctgaaggagtgcccagggaagttacaggattacttgacaggggtactgtgtgataggaactgcacaggcagtggcctagaagaggccaggagctgtttttccaagatgcagaggcagacagagaagttccacgtgtggatggaaaaggtaactcatcttgacactggcgaagagaacaagcagctactggaacccaggggacctaagatgcaactagttggccaaagaattttccctgtcaccccatcaagtgcttacatggcagatgcctgatttccaagtactgccacagcagccctttggttcttacctgacttgtccaaatattgacagtatgtcagagttcccaaagatgtataattgcaattttctagttaacgttgctggaaatggaaatattacagaacaacctttgaatctatcacaaaattaattgtattgacaatctgcgttttggattgtgtaagaaataatatgcttttgcccattgtaagtttcttttgatgatgttgctgtttttttttgagacgaagtctcgctttgtcgcgcaggctggagtgcaatggcgcgatctcggcccactgcaaactccgcctcctgggttcaagcgattctcctgtctcagcctcccgagtatctgggattccaggagcccgccaccacgcctggctaattttctttgtatttttagtagagacagggtttcactatgttggtcaagctggtctcgaactcctgacctcgtgctccgcccaccttagcctcccaaagtgctgggattacaggcttgagccaccgagcccagccctgatgatgttttaaaagctgcagtagtaaacagtttcttttttaaaaattaggtattcacaacagaaagccccagaatttggtaaattttagcttgagtt

SEQ ID NO: 89532 - DNA, 1830 bp, Homo sapiens
atattccgtattacttgtatgcaggaagaacacaattcgtttctgagcaaatatttgctatgtgcctactatgcaagataatgtaggaaaagcagattagactgcagcttgatttcatgcatgagaaaaatagtatttttcattgatatggagatggatttttattttgagctttaatttaaagctcagtgcccaaggcaataatctggtaggcatcagccagtggaatttctggtactctgttgtaaaggatacctgtagagggtaaagataaaatggtcactatatcaagggtatgtattgggtggggttttaaattgctagtgactaagtttattaatgaatgtactaccagtttaattttgttttcaatcctcaaactaaaaataaatgggccttagttatgttaaagagctcatagagtgtgtcaaaagatagaaaataccacaggattgaaggtcttgcaacatgatagatgtttttatgtgcagcctgggattggtaaatgctggcattttatcttttaaagatttctagtaatactgtgagacacagctaaattaggatgacagtcttcaataggaatttgtaagtttgctgacactaagtggttttttaaaactgggttttccactggatttacttttttttttttttttttgagatggagtttcgctcttgttgcccaggctggagtgcaatggtgggatcttggcccactgcaacctctgcctccggggttcaagtagttctcctgcctcagcctcccaagtagctgggattgcaggcgcctgccaccatgcccagctaatttttgtattttaagtagagatgggggtttcaccatgttggccaggctgatctcgaactcctgacctcaggtgatccacccacctccacctcccaaagtgttgggattacaggcatgagccactgcgcctggcctggatttatttttgagaggaaattattctttcacatttataataacatcaatatgaaaaaggttcattttatttaatgaagttgccactttggaaaaaaacgtaattctgcatgtgttttttaagaggaagtataggcggtatatttagagtcgtatataaacaatcaagatcttcgatgtctcaatatttcttaggaacgttactcagaaaaaatgtcaccactttgttttaattcagttctatatccacatatttgtaacttgtaaattaccagtaatagactgaaccacattttttccttttctggttttgaattgaaaaattactgctttatttgtttttttccttttagaactggttttatgagaattggaagttaactttggggatggcttatttctgtgctcagtttttgtttagggatatatacatccttgtataaggatacatatataaatatatacatatgactagaggtctctgcattttttttttccattttttgagatggagttttgctctcgttgcccaggctggaatgcaatggcacgaacccgactcactgcaacttccgcctcccaggttcaagtgattctcctgcctcagcctcctaagtagttgggattacaagcatgtgctaccatgcctggctaatttttgtatttttagtagagatggggtttctccatgttggtcaggccggtcttgaactcccaacctcaggtgatctgcctgcctcagcctcccaaagtgctgggattataggcgtgagccactgtgcctggccgatctcttttttttgtgtgtaatgatttttagattttctgaacttaattttgaccagtagaggtaaggtttgaacaccaagcaacttacaataaat

SEQ ID NO: 89533 - DNA, 1119 bp, Homo sapiens
atgtcctactaaactgtcctattaaaaattgatggatatttggaaaaatagcaaaatttagactgattcaaggagaaatcaaaaggctagaatgtggaatggatgactctttagcagggtacatagacatagggatgtggctaatatatctaaattttgtgctctttcttgctgtatgtagtacagatattttagtttttttatctatggatctaaatcctcaaagcagtaggtcatggatttgtccctgaaatagataaattgaaagatggtgacctcttcaggtgcctcatttctgtatttatagcttctcttaaatatccagatgaattacctgagttatcttccaaataaccccacttgaatcagaggcttcataactttatagttagtggtgacacattaaattgttttttcttttgatcagcttttccattactctgataatcttggatctttgcttttacctcttttgatcttttcaaaatggtaaacccttcatgaatatcataaatagctttcctgggtggacaaaatgatgtaacatttaccagtataaggacaaatgtaatccttaaaatcttattttcatcttggaaactttataataaaaagtttaaatttttaataattgagtataatggaaaaagtacaaaatacattcatttggttttattttaaaaacgacttaattccgaaacaaagtttcagtgcatattgctgcatttcgtttccatgtagccctatcttagacatttttccttttactgaaataattttctgatgttattctgaagaaaataatacacatgtagtttttggtatttaaggcttttttctggaaatggccctttatagatttttatcttttgttgatgaaattcttcttttctaagagatgttttgaaaatgactgctttcttttcaaattattctgcatgtattttctattttcttgattgatatttttacacttgatcttagttaaaaggccgagaagcgatgattggtatttttattactattttttctctttcttttttgagatggagtcttgctctgttgccaaggctggagtgcagtggcgcaatcttggcttactgcaacctctgcctccca

SEQ ID NO: 89534 - DNA, 1045 bp, Homo sapiens
gcactggcctaggcactgatgttcctcagagcttcttgcatgccagtggtgtacagcagagtatacatgcaaaagtaagcaaacaaacaacaaaatagggcaggtgctaagtataatggaaaggtagggcagtggaccaatatttaaattgcttttgtgttctttgttaacgtcttctttaaccctcaccataactccgtgaagacactgaggagtgaaatagtttaccagggtctatgtagctaagagagagtaggcaaggctttaacttgtgtctgctgccaaaaatctgtacttcctatgctgctaccagtctcatcctgtatattcttctttccttcaacaatgagaacaattatagtctattgtggtttcacctaattaggactcaaattttcatctgtaaaatgagagtagtgtttgtttagttttaaaatcttgtgcttctgattgtcaaacctggaaaggggaatttgtcatgggataaacagtaaaggaaaagttaggttttgttttgatttgtttttgtgattcaaattttctaatgagatttagaacatacttgaaaaggaaactaattcgtaaaattaaacatttgatggcaacaacgaagaaggcttaaggtcataagagggtagacctcactgtatcaggaatatgtgacaacacagatacttctatattttggtatttgaaaagttcgaacctatttattataggatagaagcttagtgagacagtacaaatccatttctagcataaaatggatgacttgatgtttttaaataaaaagtagttggtagattttttaaaaattctaaaattttattttatcgttattattttttaatagtagaaatggggttttgctgtgttgcccaggctagtctcgaactcctgggctcaagcagtcctcctgcctcgtcctcccaaagtgctgggattataggcatgaggcactgtgcccagccattcgtgggtttttgacctttaacttttcttgtgttgtgattgtaacagcaaacatttcaaaagaatttgatca

SEQ ID NO: 89535 - DNA, 2646 bp, Homo sapiens
tactaaatttaagctaagttataaggtgtgctgtttggaaatatggaagaaacaagaatgaagccagataacaagtttatgcttgtatttcctactgatgaagactttcagacgagttattttcatgggtaggtgatgtcactctgcatgtatacacttatacttttttgcatgattatacatgtaggagtggtacaattttgacttgactgttgacctgttgcctcaatttgggggtaggggtggagaatatgagggcaagaggctctgaatggtattagtcatataaattttaaaataactcactaaaataacttagtacaaacacctaagaaaaagcccttaaaaaatagaacatatggtcaaatagtcaatattgtacttggcccttatatcttctgtatccaagtatttggacatcacacagtatcttgattccataataatcattttgaactctgacgagaacgccattgaatattgcagctttcttttctttttttagaaaagaaaaacctgaaacacgaatcattttcttgctatttaaactaaaatcaattaccaactgataccaaggccacactgttgaattttatggtcattgaacttgatttaccccttaaggggatctggaaattatttttaagtagtcaactaaagttgtcatgatcgtcagaatttcatattgtgacatgtctgttctttatacagtggcacctaacaactcatttacttttatgtttggtcattttttatttaaaaaatattactacataaacctgtggtttggtagtttagttttaagggatcactacccaaagtgtgtttttgttcagtgacaattgacacaatggatatttgtattaaaatagtaatacttcattgtgttacatttttatgattcattggcacagatgcattccttcatagtcaagagtttcataaaataggtgtgtttaatattcatttgttggatgatatcttaaaaaccttaatggaaatagtttgcttgcgcttcataaatagcctttgggggagaaaacagcattcgtttatttctgctttatattaaaataggggtagtagagggatttcttacttgaaggaaaactttatgtttgctttttgctgttaacgtttttcttaaaaaaggggtagaattagcattttaaagcatgtatctattctacaagcatgaatattgacttattttagcatgaattgctgcagtgtaattaatttactttgaaactcagctgcctttttcagccagttagggggatttgagggtggaagggtcctcttccagtaagaacttcaatattttcttgtaaaatcacccataagattgcatattgtttagttggagtatgagctggttgtctttcttaaggaaaaggaaatagaaatatccctcataagatatccaaagcaaaatcctgaaaatggatttgttgtattgtctttttacagaatgtcataaagtgtataacatccctgtttttataaaaggactttactggaaatagatatgttagtcaaacagagctctagtgttaaccttatttctttaggacataggaaaatatatttgattttcttttctgaatctactagagactttttatattacccagtaagagaaagaactagattcattcttttaaaaaatataaattgggttttaataatttgcatcagttttttcctttaagaaatcagttccactttctctgtggagtcatcctttttttcttaatcttgctctttaaaagtatgacaggaattcagtgtaacattgttgagtatagtcttgtcttctgttcttcatagtaacactccttttcctccttccaaaatgtgtccatcatctttgtaagcttggattatctttttcactttcacattttgtacaaaatattagatctataaagtgcagcttttctgatgagatagaataatgaaggcaactgacattagagggctcttactagtttcagaagtatttttcaccccacacgttagatacaagtatacattttctttcctccctagatggacctccagttgtagctcattatgatatgtctgacaccaactctgacccagaagtggtaaatgtggacaatttattggcggctgcagtagttcaagagcacagtaattctgtaggcggccaggacacaggagctacctggaggaccagcgggcttctagaggagctgaatgcagaggcaggttggtcttccccatcccccttctctaacggtgtaatatgcatgtgtcctggagctgttttccttgtagtggaccctgatgaggagaacaggtcataccagagacatctggcattgaatgattggttgtgactatccaggctgccatttatacctgaaacaatttggatagcttgtcattcatctttcctactcagaaggaagtagaaataagagcatttaagacattaattgtaggtattggtaggtttcagtaggcatatttcttggattaaaaatgcccaatatttgcaaaaatgacccagatatgctcatattctttggccagttctttctctcactttaattctgggtagtgaccttgcagcttggatagggaatcgttgaatctctccctgtggggctggct

SEQ ID NO: 89536 - DNA, 1023 bp, Homo sapiens
ctgctttttccttttccacgtaggcttttctatactctttatttttgtttgtttgtttgtttgtttttttgagacggagtcttgctctgtcaccaggctggagtgcagtggcacgatcttggctcactactgaaacctccgcctcctgggttcaagcgattctcctgcctcagcatccggagtagcagggactacaggcatgtgccaccacacccagctaatttttgtatttttagtagagatggggtttcactctgttggctaggatggtctccatctcttgacctcatgatctgcctgccttggcctcccaaagtggtgggattacaggcgtgagccactgcgcctggcctctatactcttacgcagctacttccaccacactacttttctacttcattggaccaatcccccatccctttatcagtcctctcccagcttcctgtccttccctatcaagcctatataggcccagctgtcctttgccaatgtcacttatagagttgactttcctgttgtacttacctggcagagtctgatccctggatgcacactttgagcctgtatcccccatgctaagcatagctggagaaaatcactttgtcacagagttaaaggttgccttaatttcctagtctgcggcttcatccaggctctcagcgcttcccagaaactcccccttttccttaggcagcattctttttttttactttttttgagacggagtcttgctctgtcacccaggctggagtgcagcggcgccatctcagctcactgcaagctctgcctcccaggttcacgccattctcctgcctcagcctcctgagcagctgggactacaggcgcccgccaccacgcccggctaatttttttttgtatttttagtagagacgcggtttcactgtgttagtcagaatggtctcgatctcctgacctcgtgatccacccgcctcggcctcccaaagtgctgggattacaggcttgagccaccacgcccggccttgcattctttctccgtagtgg

SEQ ID NO: 89537 - DNA, 1016 bp, Homo sapiens
ttacccccaaatctcaccaaacttttataccttaaaggacaacagaatgttctgtatgccacttcccctcatctgtgcctactcttccttgagaacccagcttccctgattaccctcaagtctggtgaatgttccctatcagagcagttttcaagccatggtgcaatagactgctttttattatctctgcatatatcgcaggttcattgagggtagagactatgcctgccttgttccccatagtatttctagcacttagcacagtgcatagcatgtcgcaagtatttattgtaggtacaaacaaataaagtaaacagtaaagactgtttgaattattgaatatggaaaagttgaaggctataaagaagagagtctgtgattttgtattcttccttagcagtacagttggaacagtgtgcatgaggataggaataactaaaacattgaagtagaacttggatgaagacttggccacaagcaaggtattggggatcagagcaagaatctaggtttacgaaagcaagacttaaccaattccatttaagcagcctccctagatttaataaaacagagttttatctggtgaatgccaccttttgtatgcttatagggtccagatatgtgcccactgctagtgccacataatctggattacaaacccacgcaaactgtgatatataatctcaatcactggtttatctaggagccattctaagcattaaaaatttttcacatatatgcatcattttcagtcgaagaataaaaggtaaaaatagtactaaagaattatgaaaaagacccacaatcatattcaaacttgattatttttcacagctttactcagaatctacatatttttatagtgttatgtgtaatactttatatgttagtatacatttttccaagttgctacatagcactgtaatgaatatctttggatataacattttgcttatttaaaggctaaggagtaaattattagggatgggtttacagggtcagaaggtataaaaatt

SEQ ID NO: 89538 - DNA, 1038 bp, Homo sapiens
gtatttttagtagagatggggtttcaaccatgttggccaggatggtcttgatctcttgaccttgtgatccgcccaccttggcctcccaaagtgctgggattacaggcatgagccaaaattttattttatttacattggtttagtttagattaggtgttgtgtagattttttttttaaatatgggaaataattttgtatcagatcacaatatatttaaataaaaataccctttagagggtaaatgagaatttgtactcattgcaactctgtttattctatgttaactcctaggtattctaaaattcagccttttaaatcagaacattcaagagctggtacataggccgaattattttagctcttgctagaattgtttttagagccatgtactttgatgccatgccattagccattattgagagttctgtgaagctcatgttttctgtgatgttggagaatgtattttattgcatcatataatacgtgctttgggaagactcttgtaaagaagtccttacatcccccagtgccacaaactgttatgtttttccagagtgtgtggtttgtttctaaggagaactctcagcaatgtacaagttacatttcagttgctcagagccaaaattgtgatttacctccagccttcctttttagatgtagttttgggtcagattttgtcaaatctatgtttctttagagaggacatgtgctaaatctttcacaaagcatctcagtataaatatggtattagtgattacttctattattctatatgtgcctttgggcttttctggtttagagtttggttctattaaaatgataagcagtagagagccccactgccttctaggtggttacgcaggtcgtttaaaagctgactggagttgaatgcaaaaagcattacagcataaaatatatagagtttgttatggtttaggtagacagatataggtatttaccaaagcatttaaatttttttatcctaaggagtagcgagtgagagactttgagttcatacttttatgtactgccatgttg

SEQ ID NO: 89539 - DNA, 1090 bp, Homo sapiens
cggctggtcgcgaactcctgagctcagacgatctgcccgcctcggcctcccaaagtgctgggattacaggcgtgagccaccatgcccaggcctgttgctaatattaactccaaaaaaaactagtgatacagatgagtgtttccctacaatcacaaggattcatttcctcttcagttaggaaaaagaagtagaaatgttatctaagaggtcaccttcaggctgtctgtaaatgagagtaaaattgattaattttaatgttgttttcttagaatggtaagctaactatatcaaaagttgaccgtcagagcctgctgtgtgtgcgcgcacacacttcatttccactgtgcagcctttctattgatattagtgtatgaagaacaggaaattattctatcaaaccatattatttataattattttttcctaacattttgggaagcaagacccaagcattttcttggttataaaatgcaaagtatggctctaggttgtgtttcatacctgtcaccaattgcatgcaggttaaacactttgtgagaacaaagcctgtatctgcactaatacagattagtaatacaattgattggaccaattaaaaaccagctgagtatgttcctacctcatgtctttcatgatacagaaaaagcatatgtgataatacatgaaactatttttttttatgttgcgtcacaaaatttcgagcctcttgcatccattataggaccactccagaggcttaacaaccattgtgctccctctttctcctgaatttttttccctatctggtataaatttttgtgtaatgtatattctcttataaaatagttgaaatatttctctagcacccttctgtttactagattgactgttttttccctctgtagttaaaaaaaaatgtgttaaaagccttgttctgtcctcatccatctcctaactcccattttattcagtgtgtttgagatcattaaagtaaataatttttgtgaatattttattggctaataacacatacagataactaataacgtaccttttttgcaaactgcttatacccaagtaacaagcactcagatcagaacacagaagtcac

SEQ ID NO: 89540 - DNA, 1033 bp, Homo sapiens
gcagcctcgaccgccaaggctcaagccatcctcccacctcagccttccgagtagctgggactatgggtgcccactaccccacccagctactgtgtgtgtgtgtgtgtgtgtgtgtgtgtgtgtgtgtgtgtttgacagagatggggtttcaccatggtgcccaggctggtgtcgaacttgtgagctcaagtgatcctcccgtctgtgtgtgtgtgtgcgacagagatggggtttcaccatggtgcccaggctggtgtcgaacttgtgagctcaagtgatcctcccgtctcaccctcccagagtgctgggattacagtcatgatccactgtgccagcctattctgacttttattgatagttttgcctgtttttgaacaaatcttaaagtcactgttgagcttggagggcatcttaaaattttccttaacattcctgacagatgcctcagcaattacttgagtacttaaaaggcaattcattccatttcttagtggctttgttctatagcaatgattatctgaaacttgccttctagaaactgattcatggttctaagcatgctctcagtggtttgcctcgagcatgaaatagtacctttcatggtggcttccacctcacagtgattctccctttgggaattccatgtacaactattaataattagagttaggaaagcttttgaccgaagatagtatcatcacattctccagataatctaaaattttgaagtaggagaaatagagagggttaggggttgttccatcatcttaggctctttgaggtgcccagtgtcctactaataaattctcttcattgtttaaagtagcctaagctggtttttggtaactggaaccatttgtaacataacttcagaagtgatctatttttagatagttgaagtgccctgtctcctattctctctccttcagccattcctcagtaggaaataaggtctctaaacctctcactctcctagttcttttcctatgccagacactttctaaactcttctttgccgcttattgaatggccc

SEQ ID NO: 89541 - DNA, 5467 bp, Homo sapiens
ttacagattgtcaaacagctgctcaggagccactgtggtagtttagtgactagactcatgccacttgttacttctcacataagctacctgagggctggtcaggaagtttagatgagaggacatagcattgatcacatgagttgcctgccttcctctcatttgagtcagaacttagtgttttggcctggaggttcacaattctatcatttgactggactgtggaattcaaactgtcagtgtttctgaaacaattttatttcagtgaactcttggtgtgacttgctaacaaggcagttctctccctccgatagaacccttttagtggatctaaactgaagattcagctgtgttactttcacggaaccaaattataagcgattctgttgaatgaaccaagtgcttctgttgtgaccttcaggacaagggaaattgatcctttattcatgatctattacttacagacttttagaaatttaatctgtgaaagggtattactgtcactgtctttgaaggcattattaccaattataaagcttattttaagaacaagttttaactatttttcttactgtttgatttgttcagactaagattgtttgggcatcttaactttgttctggatttatgtgttgccctatcatgaagatcccagaggtgtaaatgagtccagagaaacatcctgtcacccatggtcagtgacacaactcaggagtttctggctgagataagacccttggcctttttaaggctaaactgagagagggaccaagtggggtgtggtggggtagggagagagggagacagagatggagggaaggatattgattgtgggttttatgaacttgcatactaggtttatcttagtaaaaatgttgataagtacaactgaggtcatattgtcttctgtttttcctgtggtggaattaaccatgcttttgttcttcatctcaattgcaggtgtgttcatcctcgaggtggtgtgattcagagtgtttcttcatggaagcatggctcgggcacgcagtatgttagcaccaggcaaacacagtcatggactgctgtgactccccagcagacttgggcttcaccagcagaagttgttgaccttaccttggatgaggatagcaggcgtaaatacctactgtaatacaatgtcactgtgtttcctctgcactgttcccttccacttcctcatcctctttgtgacatggaagttcattgtcatagcttcagcttcagaagctgtttgtggcatttgtaggattcaaactcatggaaaattccctcctcttcccccctttttttaattaaaagaagtcacttaggaaaataacatcacagagaaaagaatttcttctttccctcagtaggaatatagaatgatgaattttattagacaactttattttacttggtgacttttaatcttaggaaactctgccttccttttagaataatattttaattgccaggcaaaatgggtttcagtttttgaatcttgtatttatttttctgtataatgaaattaatatctagacttgaccactatctgcccaccccattggcactcccatcttagggcattcgcacacatatcagtcaggtccttattggcacctagtagggcatgtgcatttaaaaacttgtccttaaaaatagaagacagaagtattaaaattatattttcttttattttaagtcttctgccttctttcttgagtttgctcctgttgacttcccacagcacagataattgacatgtccctttgtgtttataaatactactaaggtgacctagttgttctccttgttgcaataattaataactctttgcaaaatgtctcctttgagacagaggcatttcagatagatacccaccatgaggtgttctgggcatctgaaggtattaagagttcagtgggaaaaatctctctccctcgcctttttttctggtttagtcaaataacgggtgaacatagaaacctgttgggaagaatatgaaaagttatgtggcctctgaggctacaggcacttgcaaatccgagaggaaagtgccgtctttcatagctggtctctgtataaagagtatgtagcaacaactgtttaacatccgagatgaagtggacctgatgctgtatttgggtatttttctcctctaccttctaaaaaaaaataccataagaagaatcagaatgtaccataagaaatcagatgcaaagcacgttaatgtcattggtaagttttacagagtctaaaaggattagcaaagggtagcaggagcttcagggaattcaggaaatgccagcattggaattttgtggcattagttactaccttctttcttataatatgttgtagttactagtgaattcttttaaaagcaatacctagagttagaacactatgtactctgcacagggggagtgaagtaatattggcttagaagacttcaccttttgtttttcatggtttttgtttgttttgtttttgtttttgtttccattgttaccgttgctatggccctttgcctgtctctccaaatcccctggtggctcttcttatcattaagagtatgagaattaccattttcagttttcattcagcaaacaaatttaccaagtgcctgctctgcataaggcactgtgaggggtgggtgctctgggggctgctgagatgaatgacacacaccgcacatacacatgcatcagtgtctgcctgcctccacctgcccagcctgttcttcttcttcttcttcatcttcttcttttttttttttttttgtaaagacaagtttattcctttacgcttcttgttgcattagttctcctgtatgttccttcttccacaggaatgtatttgtgcatatgttctttgatcttctctgatagcatctcatttgatctggcctctgtccttcatcagcttttattttttttatttttattttctgcttttgttagataaggcttttaagatcatgaacctccagctttagcaactcatatatcagtctctcacatggccacaattctagacaaaaaccaaagacccagaggccagagcaaagtaggaccttctgaagattcactactggtgtatccttggaccttcacattttactttaggattaatttattgaattttactgttacacatagtttttgacttgaattaaaatactagacaaagcagaaatgtacaatttctggtctgtgttttccaggaaattcatagagaagagaatagagtggatgatgtgacttgaagtttttgcagcttattttttcccccactgtcagggcagaggcccattttaatgaatgtttttgcatgacctgttcttatgttaaccacatattttttttcccaattccacacagcaggtgatttcccgtgtgacatattttcttcatagtccctaatatagtcatcctctacagagttggcgtgctgtgtgcactgtggattaggaacagagtggagctgtaaccagtctcttctctggccctttgcctttatgtcagcttgcacttttgcctcacttattcctagtccagctcccaactgcctgacttaatggaccagaacggagatttggatattaagatgcagagggggaggggaagggatggtagagatagacagctctcccctactaggttgggtcatttcccctaataactatagagagactgtgtttcaactctcttttcattgctgtttccagaagagtggagagtgtggtttcaggcaaggtattaatgatacaattccgtggtatacagctcctgtgacatttgaagtttcttttaaaggggtttttcttaatcaaagttttacatttggtagcataagtagttctttatgcttcacaggacattgtcttcagagtaatctctctgctaaaatggtacatgtgggtcacagattggtttatgccactgacttggttaagtttccaccccctccaatttgtgaaaaacagagcagtgacctagctgttgcatcatcatgactgccatgtaacctgtaattgctgctctccagtaattgtcttttcattttgatggtaggggccagactgaatgaataatgcattcttttttattcaatttatttcattcagtttattcttggcaatcaaacatcccataaactttgcttttattatcaattatgaatatgaattgtctggtttactaatgtagtcatttgttcatctttacttttagcagattagcaccataactaacttaaaactaagtttgttacctgctttttatactgtcacaaaggtttttgaaaaagctggggacactattttgtcttttagttttaaacttttttaaggcaaagcaagctccccaatccctgttctccaatatgtgtatgatgtgacttccatgtagatataaaaatgattgtgccctaaccaaacttcctcagattgtgcactgtttgtttaaaataatcacgtattttagtctgatgctgttgtattttttcattttatttaaaacactacttacttcttattctcttaacaaattttaaaaggtagtgatcttaaaaaaaaatcactggataactaggaaatatttttgttgttgttttgtttcttaaagagtacagaggccattgaagccttttgctcctcttaccgtgaaaatgaaatgttagccattgtatggctaggaaccaatgcacttggcagttaatggatctgctgttgctggagtgtgagcgtggacttgatgcagtgatgacaaatcattgcttagaattaatgttttcaaatgtgcaactctagtttttaaaacaaaatttggttctttacattcattatttcgtttttgtttccctttagtatttaatggtctttggagaaaaaataataaaacagagtgttatatatatattttttggtgcaagataagattttctgttttttgaaataagtctgtagcataaaggttaaactattttaagacaaaataaaatagagtgtatttaaacaatgatatcttctgaggtttttttttttttttctttgtccctatctgcttcagttaattaggtggtacctggagcaatttccaagttaccttttaaatgtgaaagtggattctattttgttaacaagtcttatctttataagatgtctgagttttcaaagcaagagctgtatccttgcaaggttacttgcaaaactactcccaagaagttttgcaagtaaccttggataattgttggatgttgataaaaatagctttgcattagctttcctgtaaccccacctgagatttcaaagagggccaaagacttattgttctgggcacctttactcctggcaacaaaacttcactgctggttattactttgcagagatcagagagtcaaggtaagatgctgcaacggcatgcactttgcatgtggttaaacattgaagcaggtatagggtgtttga

SEQ ID NO: 89542 - DNA, 1964 bp, Homo sapiens
ggtgggcggatcatctgaggtcaggagttcgacaccagcctggccaacatggcgaaaccccgcctctactaaaaatacaaaaattagctgggtgtggtggcgtgtgcctgtaatcccagctactcaggaggctgaagcaggagaatcgcttaaacccaggaggcagaggttgcagtgagccaggatcgcgccagtgcactctagcctgggcaacaagagcaagactctgtctcaaaaaacaaaaaataaaaataaaaaaaggaaaactcttctttgactctagaaggaaactgtttacctaggatctcacgtttgaacccttttgcccttggatactgcttttgaagaagaaactaggcacaagtaagtaatataacctgtagctagtgctttatgtcatttgggctgcttctttctgttcttttgcaggcatttggcctttccttcccttactgttttgtttttcagagtagataccaactatttataattatagtctaattacagataaagaatctttaccaaatatatatgtatcttttcagctccatttttgcaacctaagtaaagtgaatttcttctaggttttgttttaaccacacttggaaccaagtgctctatgaaagagcgatcctcctaggtcattggtaggcacgatttttttttttttttcatgattccatgattgaaagcactgattcatagaattagagaggttctggcctatagtggaactttggctgggagaatctgcctggagcagaagaaagcaacagtaagtagtggtaggagcagtgagttcagaaaaagatgcaagtaatgatcatgagtgtcagaaatttggaaggagcacccattcacctgatactctctgttggtttaattcattgtacacgtgacatgccttctaggtggtgatggctttaggcagggatctctctgtgtgatgaggattccctgccaagccttgaggacccatttgatagggtagtgtgaatgatgagagtgagtgctggcagcgaagtcagccctcagaaaggaagtgtggcagcagcagctggtataatctgctcatagaccctggcctgctgttgggaacacaccttggttgtaaattatatctgtctagcttcttaccctttagtgaaggaagctatttggtgccaactttttcttttttattaaaatttttttttccccattggccttgctgaagcttttagaagataccagctttttcttttgtgctttggtaattgacatctcagagtcacatctgttcccctttcatgattgctccatcccgagagtggaaaggtaaagtgtagtggactgttgagccctcacttttgtgactgattctaaagcaagcaaatctgacttgaggatggatcttgaattctgcagcatgagagggttagatcagaggccaggtgagtgagtttaggcctgacccagggaacaggagatcccagaaaggccaagtgactgctataggatttagtttctgcacctgtaaaatgaagaatgtcttgggtttcttttttgaaagtaaaaggctatgtgattttaggggatgattcattgttctgcagagccatcaggcttttcaagcagtaactcaagagagctgcttactccaaaaaactgctcaaaagactgtagttctgtcatctcacttaagccttgggaaggctttggatgactaacaccaacagaaccttgaatttctacaagcgattttcaaagttttaaaagaatgtttatttcaaaagtttcacatggggtaagaagtacagattattatcctaattttacagatgggaaaactggtaacagaagaataactgtgtatttggatttacataggtagactttgtgagagtagatgttttaaaaaaatgactcaaattagtaccttttaactgttcagaaaaacaaaacctcaattttctggttttcct

SEQ ID NO: 89543 - DNA, 1049 bp, Homo sapiens
ggtatcgctttttcctttcggggtctgcttcggagcgtggatcgccgcaggcaccggggcgggggcgggcgccgcgggcggccgggggctcagggcacacccgcgaggacgcagggcgagcggtggcttccccccaccccattttagggggacccccgagggtgggggcggccgccctcgtgggagcttttgtagtgaagttagggtttggcgaatttgggtcccttcctccccagccccattttttattttttgcggcggacgtggttcccccaaatcacagccccttcccctaatacctagccctgtatgatcgaaaggagaaagatacatgaccgtgtgtgtgtgtgtgtgtgtgtgtgtgtgtgtgtgtgtgtgtgtgagagagagagagagcgcgcgcgcgagagcatgcttggttttctgtggtttgctttttttgaggtatatgtgtgttttgtgttatgtgtgttttgtattcattttttgttcattagtaccgatggctggctagctgggacctgggtctctgccctatcccatgccccagcccccaccctctcgtgggcacttgcacgattttccatcccatccttttttcgtctttaaccctttttgtgcatcgcccttgtgctattgccctgctcaccccgccccccgcaactgtctttgtatgacagttgcatacacgggttcaagatgcttgggcgcgtgtgtgtgtgtgtgtgtgtgtctgtatgtgtgtgtgcatgtgtgcgagtgtgcgcgcgcgcctcggagagtcagacctgcgctgctgtgccctccttgggtccggctggagcggggcgtccggcccttgggtgttgtgctgtgtgtgaggatgaggtgggaagctgcccccacgccaggcctttgccccgggcagcggttgacaaagcagcgggccggcgcgggctttgtttttaactgtgataaatggggtgtgtttgcacggtcccctttccccacatcccctctccctcacattctgctacaacaatagcttgattttcccctcttctccccac

SEQ ID NO: 89544 - DNA, 1050 bp, Homo sapiens
ggcccagcctttttttttgtatcgtgtgcatgacgacattgttacacacagaatccactaatactaatatacaatctctcaataaagaactagttttcctatattaacctagtgtgctttttctcttgctgttttcccatttattgtcgtatcctgctgtttagattttccccccttgcttttctatccccaccctcacccacccaccactcccacctcccattgtaagatttgagtgaatgccttttctttttactttacttttttttttttgtggtacagatatggtgactttaatctcatttagtccatatcttttcacaatagatgtctggagcgataggaggggccagttgtcctgttacactgaaacagttcacctgcctagagagaacccctacctttggccgcctgtgtactcagtagcttccacatttcatcttagttttcaagatacatgggcactgggtttatgatgctggtgaagagaaggggatataacacttaggttgagaaaagggatactgttcttaactagcaatcttgtagcatttcagactcgcctaaaaacccattttgagttgtgttttaacttttctgtttgctgtctcattgatttactgtccttataaatcatgctgggggtgacatgttacatgtagctgaagccatgatctggaattttaaagtaccctcttctatgtgcatatttaaatttttaggacttgcaatataagttttgcattgagatcctggataaggaagatgtttgaaacagaagctgactcaggccactcccacccctatccagggccagcagcggacctgttactgtaggaataagagggtctgtgccctctgcaggctgtgagccagttaaagctgattatagcctagtttcctgacagctgcttcatctacggccctagggcctctcttaagagaaagacagctaagatctcagccattgtctaagtgtgtgtgttgaggtggggaagggggaaggggaaatcaggagtaaagtcaggacctaaccccaaattgagttga

SEQ ID NO: 89545 - DNA, 1041 bp, Homo sapiens
tcatcattttggagctgctcctcttttggccgatgtgccttgtccttgctcccctgggctgactgactccccggctcaccctgctcctcgctggcgggtgcacccctgcctgaccacagcgcttccttgccttctttgtggcttcatgcaactctcctctccccccatggctgccctctctgctctggccctctttgttctcgtgctcttcccagcctggatgggaaagctgagctgatttactgtgacacatggacacacatggatgttcccagtggaggctctgctgtagtttgtgcaagaggagagatacaggtttacaaggctagtcctctgaagattttgtttgtttcgttttcttctttttaaattttcatttacaggagacttagaaagcctccaatccaacctcaacaataataaaactaccctgaattgagtgatcactctcatatttgccctagagaacagtggctcattagatcaatcttaaccaattccaggatttcatttttctaaatttttgttaagtatgtcagaattgtttgagaatacattttgaggatgattagtaacctagtaataatatagcaagctgtgggttaatgggaaatcatgttttagcaatgtatgcagtgtatttaatgtttgacccagattgtctgaactaaacacttacatattaaggagactttccctgtgactggacgattcaggaactacaaggccattgttctttatatttattctctcaaccacctgacacatgtctgttttagcaccttgacttcaggattttggaaaccccatcagttcagtgaatcctatgtcataggctttgtaataagatggaacacagttcttctttctgaacaagagaacttctctcttgaaactagcatcagaaagacccactaagttaatgagttttctttaataataattttccgcaaaccagcaaatactattagttactcaaatttagggaaaagaccaccaaaagtgttgaggccctaatgtgcaaatgtcagggcctgggcc

SEQ ID NO: 89546 - DNA, 1053 bp, Homo sapiens
cagggagcaccgggatcattgtcctgtctttgaatggctctcctcagagcacaactctaggagttaagcagcacgaggtctggagaatgtgggagaaaaggcttgaagaggttttgaagccagtttctgaaggcctctggagagtttggactggcttctttggcctttgggagctctgaggggagagggctgtttaaacagtttattctgcagctgatgacagagggatggggctaagggctgaggtcagggaggggggtgggacaggcgtggggggtagggaggagaagatggctcacatcagggagtttactgtaaggtggagtaagcaggattgagtctatgtggaaggggctgaggggcaggaggtctttggggtgctttggagagtagaagaccatgaagacaaacggggaacatgggaggaacagtccattttggtgagaattgagtttagtgtacagataagcacatagaacttcagacgccagaatggcagatggaaggggattgtggcaacgtctgggagttgagacttctagtcctttacatacagattcctggttggggtaggaaatgaacttcaacaataaaaattcctcatactcacatgacttgtcccccccagactctctgttgatgcctgaaacccttgtgatgttattcacatgtgtctttactggcttaggtcaccccttgagcaagctttcttacaatatgaactcctcccggagttgtaccaatcagtatcccgaaatctgagttggaacaagttttatcaaactttgtctttcttgaaaagacagaccccaaagtgggcaagtaccaggagctttgcctccactactttgcaaaaggccatccctacacatgggagcagggggaacgggagggagcccgacccagtagcgtattgggagaggagagggcagggagtagggactgaggacaaggacaggggctctgatctcaagattggtcctgtctgcaaagaggggttttttcgcaattcaaagctctctcttccattatcttatttcctccttggcacag

SEQ ID NO: 89547 - DNA, 1094 bp, Homo sapiens
gctgtgccccctctgaagctgagtgggagggaaggggtggaggcgctctccatgtcttcccccttctccccccgcccccagctagcttgcttagctccagccttcctcccccatgccaccccctcctcaaaagctcaggggccccctccgggctgcctgtgcccgaggaccacccacctcctagaacacctgcttctactcctcaaattccctcgagctaatgggagaatgtgcccactcccacccccagcgtggagacactggccttccttaagccgaaggatggcccttccccaggggaccttggcctccacaggggacctcggcatccacagtgggctcattccctggaggggcaggcatggactcaggggaagggaccatacctgccccctctgcctgtgacgtttgggacttctgaccagacctgaaaagtcagattctgggaaggtgagggagtgacagtgggggacttgggcccaaagaactggtcctcgcatggcccagaggtgtgtgtgtccccaacctctgtgctgaggagagagacagcggaggtagctgggccagagccttggcttggttctgtcagcactctccagagttcctcatcttggacaccagggtggtgggctgtggcccaggcctcccctctggtgggctcatgtccctcaggacggagggggacatcagacctgtctccctccctaagggctgggtcaggagggaagctgagcttgggaggcagctcctgcctcgctccttctggccaagctgatgctgaggctgcttcggggcaggggtgcctgggatgcaggggtgcctgcgatgcagggctgctggctgccacctgccacggaaccagagggatagggcagcaagggacaactggaaggaagtttgcgcccgctggaacctgaagagtccagccctcttcctgccaggaggaaaggaactaaaggagggggtgagggaagagaggtcatctggggtgagggggcagcagccagcccccagcttggtcttccccgggcaggtgcggtgggagtgttgattgaggtgggagagaaggccagatgacaacctgagatggcaca

SEQ ID NO: 89548 - DNA, 1864 bp, Homo sapiens
cctctctgagcctcagtctcttctaaaaaaatggaaataattgatgtaaataccagtgtcacagagtggtgaggatgaaagagagttctcactcatataaagtacgagacacccgaaatcctgggaagtgtttagaaaagatggccatttcccaactcccaccacacaccccacttcccccatgcaaacacacctctgcttgttcaggcctgggacagttttaggggtcttaggggagtgcaaagcaggcccttgggcagtcagggaagggctgggcatatttcagcttaattgtgtaagcagttactgagaacctgctttggcacagacagcctgtgacctgtagcctaactggggagacccccgaacactcctgatgtgggtggagaatgggcaacaagaatggccaaacagtggtcatgctggccagaaagtgtggcctagcagggagatatcttagcgcacgggatggggagaggtcactgaggcctggagaaaatcaggagggcctcccggaggaggcaggactggagctgttccccgaggaggaagagctgtagctctgctgccttggggagtgatcgggtcagccctgctccctgcgcctctcccatgtaggcccagatctgatccaagaggtaaatgtcagagtcctgtggctgtcaccctcgtctgaattttctttttcttttctggagcatcgggccctctcatttcattgtcatccctcccattccagtctccatcctccctgccatcccctggccctggccatcctgctgaaattctctgcctcctctcctgcccctctgcccagccgagctgcctgagtgctccaatgggtcatcgtgccgcccctggaaagagagtcacgtggaggggtcgctgctcgagggagctgggggcttcgtgtcctccctctgaagcgggcaaccctcttggggcactggttctgctctttgcagaaaagggtactcattcttacctgccaggtgagtttaatcctcatctggattaaacgagacggtggatgtaatgtacccaccgtgagtggctcctggcacagagtaggggctacactaattgttctatatggctatctgctagggagttgccatgcacagagtccccctgcctgctcctaggaggcactttgaattttataagggaaataaaaggaagggggaaactgagcctcagtgttcttatctgtaaaatgggaataattacagcaagtcccccggcagggtgatagtgaggctcagatttgatcatggatttgttcagctcatctaacacatacccactgagcacctgtgttggaccaggccccgtgcaggcatgggggacacaaggataataataataaccataagggcagtagcagatgctcacgtagcacttactctgtgccaggcaccctcctaagcactttgcctgccttaaaaatactgaacctcgtgggaaacagacagacgcaggaacagcatggccctaaggtatgtgctgggtgttctcttagcctgcggcagacatcctggggagggcaatgcctgggggagctgatgcctgggtgagtcttaaaggaactggttgcccaggaaggggtggggtgagggcgttgtgggccaaggggctggggggggtgaggggaggggaagggcaggctgagaaggagagtcatgcagaggggtcactgggacagggagctgggggactgatggcatgcagggaagctaaggctttgttggccctcctggtcaacatggcagctttgcctattggccagcgttgctggtggttgattgtcttttgtcaagaataaagtgcacagaacctctgtgtgtcctgagctaagggctga

SEQ ID NO: 89549 - DNA, 1067 bp, Homo sapiens
cgaggggtgtcaagaggggcaagcatggtcaggagcgcccccaaccccaagaacccctgcagcagttacagcaacatttgggtagaggtggaggaagaagcagcagggccaggaaatggccagaagctctctgctggcgttcctcctgccacgctcggtggtggcactgacacctggctgaggtcaccagtagctgagagactccttagctagtgctcagctgtcacactgggggaatgaaagagatcatatgatactaatgtcactgttctgctttataaagtgtcctaacaagctggcgagccaggcacactcagtcttatttacggccaatattatatctctgacatagagattaatttgacgatagctgtttataagctctttcatcatcagatgggcccattacctgggaggagaagagggccgggtttaatttgtgaacagtgtgctgagtccctctgcccctggcgtgtgtgcaggaggtgcagccataaatcatggcagacgccagcagcgctgagaccagagggctgggagctgccctagcgggcagaccccagagctcacgtgtggcagaggggctccctggcaggtatgccagtctgcagagcccgggagggaggcagggatgcacaatcttctttgctgggaggaggccctggaagatcaccctgccaaggagcttcccactggagtcgacactaaattagaatcatctggaagcttgttaaaatacagatgacctagccctacagagtcaccacctctgtgagtggagctcgggacttccctccagtctgaagtttgagggctgggggcagggatgggctgtgagatgggctggagcagttccctccaggtgcccctagttccaagcaaaggcgtcccttccgtggatatctgagcagaaaaagacaagatcaagagctggcaaataatagacctggagcaaaaagctaaagagattgggtccttgagccaaatggtaaggtttgctaaggctgtctccttgcacctgcagagccgccctgccattgtcctccctcagcagcccagccccttcc

SEQ ID NO: 89550 - DNA, 1191 bp, Homo sapiens
caagatcattcagctggggagaagacaagctccccacatctcagtctccactctcactctaaaccaggaaggcaggagccacaacgttcaccaggctccccaattctctcctcttccttttgcccaaatttatgaattgtttcatttcttcccacactgcagtccctatgtccagcgaaggcccagggaagggcatgtatgttagcagagatgccagcaccagagacaggggacacctcttgaaggaggtagctgtgatgtaggggagctttgctaggccagggattgggggtctgggctcagctctacaagtgtgggcagaattggacacacctcccagcattagagtgattaactgatgcaggtttgtacactgccagggcccatgcacacactcaggctgtaatgatggggggtcctcatgcacgaagtgcaggattggagaacacatgatcagggcccataggcgcccaaacccagtagtgctgctgacaagatggagttctcagctcccttagaggccgaacttgagaaacctttacaagagacttgagagctggttagaatatctccagggtctctgcccgatcctctctagagttttcaaagactgtaccttccctgccagccacagcatcagcaccatgctaagatgcatgcgctttcacatttcacatcttggaaactgggatgcgccttataaatgacagtttgtcctagtttaattgcctcttaaaaatcttttagtggttcataaagcgatggtccactgtgcaatagatggccttttagggctgctgacatttgacattcattttgtgtgtgctccatacacaaagctttggggcctataagtaaatctattgactctttaaagacaaacatcagtgccaagtttgtgatttatgagacctagatttctttttcaccatagacacactccttcattttgcttttaatatatacatattttttgagactgagtctcactctgtcacccaggctggagtgcagtggtacaatctcagctcactgcagcctccacctcccaggttcaagcaattatcttgccttagcctccggagtagctaggactacgggaacatgccaccatgcctggctaatttttgttttttttttagtagagacagggtttcaccatgttggccaggttggtctggaactcctgac

SEQ ID NO: 89551 - DNA, 1054 bp, Homo sapiens
ctcagtgcctgcctggcttcctggcagagctgtggctcccctctatctctccacccatcatgtgcacacatgccccctcaagaccttctccaaacccagctttgcacatgatccaaagccttgcatggcacccctgtgcctggaggacccttaaatatccagtatggccctgccatgttgggtatgtgactgccgtggatgatgacgacaatggtgatgatgatgatgatgatgatgcagatgggcctctgtagtgggcggaggcatggctgagggatggggctgctgggccaagccacccgtctggtccttggcagcattcccgtggccctcagccctcggccaggacgaacttggctccatgcaggcccctggcccaaatctccacctttcttcccttattctctcctttattgactactgaagtattaattaagccctcactctgtgatatgcagaagctgaaaaacaaattgccttattgtccatttattcattcattctgcaaatgtcaatccgtgaccagccgaccctgttccaggtgtgttctaggtgcggaggatgcagcattgaacaatcacctgattttaagaagcttgcattctagtggggaaggcagacagcaaacaagcaggccaataggtagcacatcagaggtgacatgtgccatggtgcaaaatagcgcagggtcaaagggtggtgatgctggagtgggggtggggaggtgcttattttatgcctggcactcagaaagagccttgctgtcagtgtgatatttaccagagccctgagcctgagggcagagagagagggagccctgcagatcccaggggttgattcttgcctctgttgtcctgggcaggcacggaatgcgtacttcttgcctccagatcagggactaactactcactctgaacacacagaagggagtattcagattccatcatgggttcccacatgtccagccccagacacaggcagctgaaggttgagagggtgcctggggcttagcaccctctcccagggctccacctccccaaagcccttctgatgg

SEQ ID NO: 89552 - DNA, 1006 bp, Homo sapiens
tgtgtcttgctggaaggaacagattttctaacactggcttagggcccagtcatcccgttggacttctgagattcacaacaagaggaaattcatcgtatacttagtttccaagaaaaaatcaccaagcaaaataacgctatggacctcataaagcaaacacaacaggaagacactggagttgggtggatgaaaggctcctaccggctgcccatctgctgggggatgtgggatctcttcttacggatgaagagttttgggggttttccaagagccttatgcaatatttagcttcttattcaactggttcaattctgctccgcctcccatcctggctgtcatacctggctttccaggtatagggtagaccagatgacctctgaggtttccatttgctttaaaagtcaacagttcagtgattttcaggataatctagggtctgagcacaaattggaggattgcatttatgttcagtgtgggaggtaggaaacaatttgtccatagtagtgacctgaaaaagaagccgtctccttcttggaaaagaagtggctctggttctgttcatttgtgccaaagccttgcattgacattctttgaggcagggtagaattggttattgaataataggtgggtctattggacccattgccttgtgccctcataatcaggctgtctcagtgaagaggtggactgtaacttgggtcttaaaacccacattgcctaaagcttctgacatggaacaagttgtattcatatgacttttggcaagttactctaccaaactggcctcggtgtccccaccagtagcctgtgactttgtgctttagtcaagatcagagcccagatcccctgaatgttaggttagaggtatggctctcaagccttcttgagtgtcagaatcacttcagtgcttgagacaattcggatttctcggctctgcttctggatattcattgcagttggtgtgggatggtgcaggcatctgtactttgaaccactttcctccatg

SEQ ID NO: 89553 - DNA, 1049 bp, Homo sapiens
atcatgagaacagtacaggggaaacagctcccatgaatcaattatctccacctggccctgcccttgacacgtgaggattattacaattcaagacgagatttgcatggggacacagccaaaccctatcaggaggtcaggggagacaggagcctagcattcccctggccaacgagatggcccactgcaaggagggtcacggggtctgataaggaggaagcacagcccaggccagcgaggaggctctgacaatgcaacctcatcccagggatgacccaggccctgactggattctcagtcatctcagagagactcagtgagattctctggttaagggagaagttaaaggagattggacattttaaaagcatttctgaccaaaagaggattttgagcaaacaagatctttatgaagcttggatgatatcctgggcatgaagcccccacctgggcacctggtacccagaagacagcagctgttagtattgatgataagcctctctgggaaatgagagctgaaacaatggtttgagaacccttctgagaagcactggtgtttcccagcttcaggtgcgctttcttcccagtgatacagatgaggagaccaaggaccaaagagactagtgactgggtcaaagtcaaacagtgacaaagtggcaggtggaatttacctgtgtccaaggccctttctattgtactgcagcatcctcgctgttcagatagacttagacataggctgggacattcatgggttcatcatttactcttatccattcaactaacagctgtttattaaatactgactcctaacgtactagacttggtcccatgtcacttccgagagctgactgtagggtcctggatgggccatatcaggagatgtcctgaagatgaggcccacagttcctttagggtagaagaaagggactggcatccacacagatgtgaaccctgatgacagtgctggtggctggaggttggctgcagggccttaggagctggacggggctatacctcaatactgccaagttcagaggcactgaagggtcctc

SEQ ID NO: 89554 - DNA, 1030 bp, Homo sapiens
aggggcagcgtgagaagtgatgggcttttgcaccgctttctgtaagtcaccacccaaactggaaaggcttcggggagcttggagaaagcccagaggtgtcagatgatccctccatttgatgtatggtccaattgttccagtttcatttaggatgaggccagcaggcagggccactgtttatcaaataggagtttgatgaacaaaggttgagagcattctgggcagagggagtggcatgaacccataaatacacattctacttaaggtgtggtgctcaggccaccatgtctagggcagagggtgcaagagggtggggcttggcatcacgaagcatccaagaggaagttctggagaggagcgctgctatggatggtggggagctgcacaacggagggggtgcaggatagagaggtgcccctcctatgaagcaccccgctatggtcctgtctaacccaccttccactcttcctccccagtgtggctctgatgaataagcagctgaaacaaaccatatgtcaaatgaagggacctcactgtccccagggctcacctgctcctaattaggcctggagtagggaaggagcggggcaccagagggcatcagccagcatctgttcctcagagtgtgtgggtgttgggggcaatgaaggaaagggaaggcttgggggcctcgttttccctgctgggagcccccaggccccccaaccctctgattttatcctgtcatacaagagttgctggaaacgctatcattctggcaagtcactcagtcaaggaaaacctctttaatctcttttggggtgcatctagtccacaggtttttaagcttattgaccgtacttgtctccactttgacaaacacaaaaccctctccttaaacttaacttgaaatttaaaagaacaaatcaatctcacgagactaagcgctggtttcttttcagggctcatatcttattcttccagattctaaaggcctctacttaccctcacacccaccttccctccccgagtccattttacagatgaggga

SEQ ID NO: 89555 - DNA, 1061 bp, Homo sapiens
aaaattagctaggcgtaatagcaagtgcttgtagtcccagctacactggaggttgaggtgggaggatcgcttgagcccaggatattgaggctacagtgagctaggattctaccactgcaccctaatctgggtgacagagcgagaccctgtctcaaaaaaaaaaagatgcttaggaataaaactccaaaggtggggtttcaggcaccaccggcgagcaggtgtctttggagagatgtgcgactcccttgctctctggcacgggctttggcttaagcacccgcagggcctcccttctcttaggtctcaggggtgagatgctctgcaggagccccacagcagtgccgggagatggaactttgcagctggagcaggctctcttccctcctgcctcagcctgggcatctgtagagccaggttggctttgggggctgggctcttaaattagaggccatgagggtttcaaacatggcaaggtctggtatctgaacacttggttgttggtaacacccatccctcctggacggtctgtcatcttcccctcctgctgaggacaggtcccatggaggcaggggttgcttagatctgcatctggggaggaaatcaggcagtgcaggagcccgtgcctggcccatgctgtcagaccctcatggcccacaggctctgtccagcttcagatttactacatagctcagagccctgggttggtcctggctgggtctgagtctgcaaacctgtggttttcagagatgagttgtttaccattttcttttcatcacaaagaggaatccctccccttatatgcaatgaatgttttaaaaatcaatacattcatctagtgtcagtctcttattttctcactgcttattttacttactactgagagtaaaaccctacctgccccatgaatctcagcaggctcagttagccttgcatgacttaagtttcccattttcccaaccatcctctgtctattgtccatctcctctgatgtccaccacagccccgtgaagttaggcaggtgtgatttcctctgtgtgcagggaaagaaagacaggctcatg

SEQ ID NO: 89556 - DNA, 1058 bp, Homo sapiens
gtgtgagtgtgcgtgtgcatatgtgtgcagggagggattctgaagaggaaggtgttgcacaaggatgtccaggttgaaacccaggagcttttctagcgtggctctactgactctagtggacagagaacaggctctggagctccaaatcccccagattctgctcctgtctgctgataggtagaagcaggaacaaaacttactttgaaatgcacagacagaaaatcttaatacaagccccacagcccctgatctagaagtgtcagctgtccccctttggagcatgaactgagccctcaccagctcttcccagagcttctgtgcccctccccagcctcttgctccaagcctgcacttttggcaggaccccctcgaggcagttaattaaaaaatcagtgtttgcctttatattggaaaagagatttttgccccctctgtaagtgataagtgtttcagctgagcctggtgaggtatctggggctggaagagttgcttttactaatacatgccaagaagactgtaatgctgtcttcataaaataaggggatggggctagatgacctcatggcggtgtgtggtggttctgatgctctggccccaagaaccccttgtctccggaagggagttgcttccaaccatctgggcctctttctcagctgttttgccaaaaataaagtattggggttcaccctcagttttgtgaggccttagaagcaaatgccaaggcccatctgtccaggggccatgttctcagggaaatgctgttagctacctacatgccagggtttctcttcctctggctgcctcatttcttacactggcgagggagctgaatgaaagccttctctgcacatacaaagatctgtagactgtccgacacccttctactctttaatcatcagcattgtcatcgttgccttcatctctgacatttgtacaaatctgatggcttaccaggtaccatcaaatatatagtcatttcatttgagacacaagctccccttatggtggagctggggcaggtgtaaacttcattgttttataggaagcagaggcagagg

SEQ ID NO: 89557 - DNA, 1023 bp, Homo sapiens
accaggccttagggaaaaaaaaattgatattaacccctctgcctctgcttcctataaaacaatgaagtttacacctgccccagctccaccataaggggagcttgtgtctcaaatgaaatgactatatatttgatggtacctggtaagccatcagatttgtacaaatgtcagagatgaaggcaacgatgacaatgctgatgattaaagagtagaagggtgtcggacagtctacagatctttgtatgtgcagagaaggctttcattcagctccctcgccagtgtaagaaatgaggcagccagaggaagagaaaccctggcatgtaggtagctaacagcatttccctgagaacatggcccctggacagatgggccttggcatttgcttctaaggcctcacaaaactgagggtgaaccccaatactttatttttggcaaaacagctgagaaagaggcccagatggttggaagcaactcccttccggagacaaggggttcttggggccagagcatcagaaccaccacacaccgccatgaggtcatctagccccatccccttattttatgaagacagcattacagtcttcttggcatgtattagtaaaagcaactcttccagccccagatacctcaccaggctcagctgaaacacttatcacttacagagggggcaaaaatctcttttccaatataaaggcaaacactgattttttaattaactgcctcgagggggtcctgccaaaagtgcaggcttggagcaagaggctggggaggggcacagaagctctgggaagagctggtgagggctcagttcatgctccaaagggggacagctgacacttctagatcaggggctgtggggcttgtattaagattttctgtctgtgcatttcaaagtaagttttgttcctgcttctacctatcagcagacaggagcagaatctgggggatttggagctccagagcctgttctctgtccactagagtcagtagagccacgctagaaaagctcctgggtttcaacct

SEQ ID NO: 89558 - DNA, 1029 bp, Homo sapiens
actcatacagtatgcaaaagacttggaaaggttgcaaacctggagaagttggcaggaaacaaaacaaaacaaaacaaaaaccttgtttaactttttcaactttataatgtttccatgcacttcttagatacatttgatcctgggacccttcagtgacctagcagctgctcaatcctgtggaacaatttgttcctgaaacacatgttgggacctgcacgtttagcaggagatcgggcagcaagacacacacaactctgtttttgtggtgcaccttggccatgatcaagggcgcaggaagcacacggggttggcactgaaccaagctgccctcaattgggatctggggagcgatggacctctgtgacttcttttcactcgggaggtttaggttcctcaagacatgaagaaggggcttggggctgggcatgggtttactcaccaatcctagacaacaggaaaaagcagctttttcagaaggtgggctcaggataaatcaaagcaatttccatttcccgagtgaggggtaaacgtagagaactcagaggtgtgtttttgtggagaggtgggtgtgggtgaaaatttcacaccccacttaggggcagttaaaaacagacctaagaacacagagataaagaaaaaaaaagacacgaaacattgaagcaattgccatgaagctcatgtacttaactctgtggctgtttattggatttctttaatagcttattgactctcggttcacgaggaattctaccagaatcagggtcctatcttggctcaaggtccacaacagattgggaacaactattggagggggaagacaggcttagggaccacagagcagatagctgagaggagtgggcacatacccatcttgtctcataagtcaccatcaggtagtgaggaccacaaggaaacagggaaacatccactgtatttattcacctctgaaggaaccaagaaagttaagtgcacgagcatttaggaaaggtttccaaactgaaagatagagattcaatgggtaaatttctg

SEQ ID NO: 89559 - DNA, 1272 bp, Homo sapiens
attggggctcactcagacacgtgtggcttgctgctcttggctgggctctgtcacatggccttggctggaatgaccaggcagacttggcgttgttctgtgtggtctctcatggtccagcaggttagctcagcttgctcacatagcaaaggcaggaatcttagagacacagagaccaagagaaatatgcaagaccctttggggcttaggcttggagctagaacagtcacttccaccttcttctattggccaaagcaagtcacaaagccagcccacattcaaagatggggaaatagactctacctcttgactgagagagctgcagagtcacatcacaagggagcagaagtgaagaggagggaatggaggccatttttgtagttgttgtctcatagtgctcatctggtcttctggctcagttcctggaagctcgtggcccatcagtgagagagagaagtgaagcgttagtgggttcaggctcttgcagagacattctacctgcccagacacagagcaggtctcctgtcacctctcaggatggtgaactccatgacagtatgggccttattcatccctgagtcccaagacctagcaggtgcctggcacacagtagcttttcagataatagttggtaaatgtgaaattatttcaatttgttttcttgaactcaattcagtggtctttggtaagtatctactgtccactgagctcagccctattgaatccaagggagtcagagattttgttcacttctcggcctggctgtcgggaccatgaaccaaagcttaggcacaattgataggggactgcagagaagggacaccagcagccttcatggtgctggccatgtgcaccacgcctatgtcgggacagctcagggcatccaaggacgggcgtggtggggccctgtctctggaaactcttcccaggttcttggcatgacgtgggttgggtggattttccgctaattgtccaactggctcagttcagtcacatccagctgtgcctgggcagcctggggggttcccctttcctttgcaagcccaatcgctctggaagggtggcctatggctcccttctacctcagtgctggctgtgcgagcgtggcccagattcttagaagcaggaagctttcttctgtcaggagtccgtgaggttggcttcccctgggcccggcctggaacccaggcttggtgttgtctgggagggccctgccggaggcgtcccctctttctgcactccaacttggaggaggagggttggccttaggtagat

SEQ ID NO: 89560 - DNA, 1036 bp, Homo sapiens
aagaatccccagggagctcttgttaaagggcaggctcctgggtgtggccgccagagatcctgattctgtgagttaccacgacacccgggagtctgcagttcaacatggtcccaggagatcaggagaaactgtcgtttttctatgactgacaagataccttcaactatagggtctcctcagaacttgctgctgcccacgaggttggccaagcagaggtagctgtgcttatcttttgggtgaggacagtgaatccttcgaggagaaggtctccttagggtcacacaggcggtgggggtgggactggtactctggacgtccagggcagtgctccggcagcttgggcaaaaggacaaagcttggacgtgggctgcgcttgcatggggatcacgcgggcatcaaaggatgctggggtgctggccccttccctccatcatgtgtcccccgccccccattttaggctgggccaggccatggggcctccagggaatgtgtgcatttgtactgggcctcggcacgtgacctcctgtgaggagccggttttatgggatttgctcgtgttgctgtggttactgatgtagtggagaacagagtcagggggccagggcaggatgagtggactttgatgggaaaacggtgaggcaatgatgggagggtgggctggcaatgagtgtccagtgctgcctggccaggcctgccctcttactgctggggccaccagcgctctaggagcagtagactatagcaatgggaggcatctcatttcacaggtgaggaactgagaggcagaggaggacagtgtccggcccgaggccctgccctttcttcagagcagactcagagtctgtgccatcctcctcccctcaccaggccctgctcttattcttctccttcaggtctggctgtttctctgattttctctctaattccctgagggtggcccctcacaacccacatggcaggtggcttttccaaagcacttcagtgtgcatcttcacatgaaaccctgcaaggtgatcagggcaagtggctcaggttt

SEQ ID NO: 89561 - DNA, 1087 bp, Homo sapiens
aacagcagatgtttataaaaaatcattagccttccaaaccagggctctgtgtaggtgctgcttacaggcagacctgactaaccccagcaggccatggggcaggttgtggagactcagaccacagctgctctctgtgtgtgcacacacacacgtgcagacatacatgtacacacacacacatcacaggtgccacaacatgcatgtacatgcacatatccatgaatagacatatacctgcacatgaacacgttcacacaaatcccacagacacatgctcgcacatgcccatatccatacctacaccatgcacacacacatgcttatacattcatgatcatgccacgtaccacacaatacacacatacacagatgcacgctcacagacacatgcacatacacacagccttgagactccagaagggcaaacacagcacgtggaatcctggtcctcaggtcctcctttgccccagtgcggagggcaggttgcagaggcctctgggaaaggccatatgagtggccgtgttagattcattgggagccatttcacccctaggaaacattttcattttgtgtcatcacagccttgtgaatggggagcgtgcacttccacccagggctgcaggaggatgtgtgagggagtaggggctgagctaagccgcagtcctgctgggcctttattctcagctcatggacactccatcggcttcagataacatctggagccaaagcccaggaaatgggcaggggagggagcagaagccaagtcagcctgtgcgctgctgcagtttcagggcctggtggagtccctgtgtcagtccagagtgtcccctccccaggcctacatgacctctgccagagtttgactgacactcatcgaaatgtgaatacccacgtgagccccaaggcagtgaccttaccagtaagttgctgaaggaaggcgaggcacagtggttcacacctgtaatcccaacactttgggaggccgaggtgggcggatcacgaggtcaggagatggagaccaccctggctaacacggtgaaaccccatctctactaaaaatacaaaaaattttttatatttataggca

SEQ ID NO: 89562 - DNA, 1010 bp, Homo sapiens
ctcctctaaccttctttctttcctgtcttcctttctcatgtatttccactgacgtccaccgtctctttttctctcatgcacacctcccctccccaataccccagagtgctagacagggctgccccatgagcagtgatggttgggaatctaattttactgaccctggctccctctgaaagcaagcagatatccactcactgatgtgatctgatttcaggggcgtgtggaggtcaactcccatggcgcctccactcaccggctgctgtctgaaatcccaccattagaacttcatagcaccagctccttaaaacgtaaccactcctgagaaaagccatggtccaagctcttcttctaaactcttccccatcatcacacatcagaatggatggcttcgggagccaggcttggggcagaacagaggagggcacaggagaaaggggcatcagacgaaacaattctcccaggagaaatgggaggcagaggaataaagctactctctgtcctgtccaccgtattcacagggccgggcttgtgtaagcatactgtgtgttctgcacacctcaataggaaggggccccatcgaagtggctttctgaactgggtcccctccttttggcaccagacaatgctaacgtggtccaggtagccaccctagcatgtcttgaaagttattggggtttgggccagatgcggtggctcacgcctgtaatctcagcactttgggaggctgaggagggtggatcacctgagttcaggagttcgagaccagcctggccaacatggtgaaaccccatctctactaaaaatacaaaaattagccaggtgtggtggtgtgtgcctgtaatcccagttactcaggaggctgaggcaggagaattgcttgaacccaggaggtggaggttgcagtgagcctagatcgcatcattgtactctagcctgggcaacaagagcaggactccatcttaaaaaaaaaaagaaagaaagttattggggtttggagatttgctttt

SEQ ID NO: 89563 - DNA, 1041 bp, Homo sapiens
aacccaggtgggatcctgaaggcactagctgacagacgggcccctcaatcctgtcctctgaaggattgtatatatacctctcgaccacgtaggaaccatgtaggggtctctagctatttctgtggatggcagccggagcatgttagcttaagaaaaatgttgtgtgtggtgctctagtcatcttgtggtggacatgtcgctattaccgaattcgcaccaaatatttctcattgagtttcttgttttggtgcctgaccgaaccaacgacagccccaatcttcccgtctttatgagagaaaaggaaaaaggaatcaaaggtggaagaaaaaaaaagccaaattctgtttacggtgaaaaaggattttgtttttcacccaatttgggaggcgggaggggggggttctcgttttatttttgtttttgtttttaccttggcttttgtttttctcatgtttacagtgcacggagtgtggaagggggtctaggagagggagagctggaaaaggagctgatggggtcttatcctggcctctgagggttcagcggaggtgaggaaggcagcagagctccagcaggtgaagggagagttcatctaggcggggctccccaggcccagggctcaacttcatggccccagctatatccccccagttccacactaaaccagggagggctcggccctcagctactggtacccaatgtgttcctgggagccgagagacccatggtcactccaactccttcctttaggctgtgctcttgcctgtcacaaagaggcaacgtagccactgcctccctatgcaaaaaattaaccagatgatgcagataagacagcataggtgatggctgcttggtcttggccacagtgctctcagccagcactaagggctgaggtcaataccgcagaccttggggaggaagctgagcatcccccgggatgtctccagtcctgacacagtccctcagagatggccctggctctgaggtcacatcagctaggtttgggaggcccctcagcttggtttgggagtgcccgtgttc

SEQ ID NO: 89564 - DNA, 1035 bp, Homo sapiens
gaatgtttgtatggtgcctttgtatcaactggtgtgctccttcccattctacctccgtttccccctgaaggtatcgctaccttgaattgagtacttaatcattctctcattgttaaaaattgttttgtcatatgtagatgtacccctgaacaatgtattgttaaactatgcttgtttagggccgtattcgtttcctattgctgctataaaaaaataccaccaaattagtggtttaaacaacacagattttattatcttacagtcttggaggtcagaagtctcactggactaaaatcaagatgtctgcagaactgcattcctttctggaggctctcagggagaatttgtttcctttttcatttcctagaagctccttgcattccttggctcatggcaaagcccacagtggagtatctttcagtctctttctctgactccaattctgttgccacatactttcttctctctccctggttgtcacatcgtctcttataaagacccttgtgatgacactggactcccccagataactcagggcaatggctccatctcaagatcctaaacttcattgcagctgcagagtcccttctgccacgtaaggctgcatagtcacaggttccagggattaggacatggacacctttgggggctattactcttcctactatggggctttctacaaatggtggcaacttgcttttgcatgcaatatgtgttgcatttctaagatgcatcttcgaacatatcgcatgtttatgtagctcttctcctgccacaggacatttgctcaattcctccttcagacctctgctcaagcattgcttcctcagggaagtcttggctccctaggaaaggagatgctccccagccacctgtcctctaagagccataatcccatcctccaaaggtccagggactacccaagcttgtaactgcattttacaaccagtgatttctctgccccatgtgtctggaacttcagcaaggcctgttggctgtcctagtgcctgataaggagcagaaggaccactgtct

SEQ ID NO: 89565 - DNA, 1417 bp, Homo sapiens
actactattgggtatctccttttgtaacttgttccccccccacccgtgccatttaataatgagtgtcttgctaagtcatcatattttctgctcagtagtccctcgcttctatagtcctgggaggggactgccatgtgaagggacatggggtctcaccatgggtaggaggatgacagtgtggctggctagctgacccttcatgcatgctgtgggaagaagtctagctggttagactattttttaaggacccatgagtttcgtagcagactcctgggctggacattgatttgatatgtttgtgaactaactagtttgcaaaatctcgggtggaaatattactgttttcttggcctctaggctgtttggtaaagacttttaggagtagaagcatttagagttagccctcggtttaaatcttagcttagctacttgttacttgggcaagctactaaacctctctaagctgcatatttcatcagctgtaaatggagataatgagattttctttcttccttcctttctttctctcttttccttccttccttccttccttccttccttccttccttccttccttccttccttccttcctctctctctttcttcctttctttcgtcttgctctgtcacccaggctggagtgcagtggcatgatctctcctcactgcaatctctgcctcccgggttcaagtgattctcatgcctcagcctcccagagtagctgtgattacaggcacgcaccaccatgcccagctaatttttgtatatttagtagacatggggtttcaccatgttggctaggctggtctcgaactcctgacctcaagtgatccacccacctcggtttcccaaaattctgggattacaggtgtgagccaccatgcttggcccgatcatgagattttctgcatgaggcgtttgtaggaattgagaccatttatgtaaagggccgggttcataataggtgctcaaagtgtctctcttctgaataaaccaaacccaaattttctccaagaaataccttggtgatctctttgaaaggaaacaaccacttcaataaataaataaatggataaatgaataactattgaatcagaaccagaccggagcccttctgtgttttgaatggactaagaactggacaggcattttgctttggcttcggcctctgccctgtgagttgtaccttttcctctgagctccccactgctgtggagcctggagagtatgagaacagggtctactgttactcagcaaagcatcgctggagcacttcatgtgtgcagcagagagctgctggcagggccccaaggggcctcctcagcccagggtctggctgggagactaagctgacacacacgtaggaggtgagctagacttctgaagagggaggtgcgtgggcatcatagaagaaggc

SEQ ID NO: 89566 - DNA, 1002 bp, Homo sapiens
cgaatgtgggagaggctccaggcatggacccagcactggaagggccttcttatacccttatttttacagatgagtctgagacccagagagggaaagcaacttgttcatggccacacagcatgctgacagtgtaaactgaaccaaaaatccaggtcctgtctctggtcacatgttcttttcatgccatatggcctgtgctctctcttgctctcctagccaagcttgtcctcggagttaccagtgtcatcccagtagggtcctggggcctcctcacacagcgccacctctgactactgttaagagtcttgagagtcagtaggacggtgatgaagcctcacctgaagcttcttctgggctcagtccttgtcctggagccgctgcctgctatgcatggctgtgaggctgaccccaagtggtggtggttattttaagtaattcacgttggagggaggaagtgactgaggaaaatgtgaaaatgagtagctattgcaagatgtgtgtgataaatgaaacagggaacataaagacagatgaagaggcacatctgttatttttgctcctttttatagcaacctctaagtttgacttttcacactaagtaggaaccctttagttcctgagcaatttcctgacccagtccctcattagctcagtgggagcagaggaggatggagggggccagggccctgagagccaatgtgagtccctagaaaagagtcccccaccccagtcctccaggttccccaagtgtggcaggaattggaggctttgtgcagacgaggtttggtgggctgagaatcccagctcttctctggcttctgcttctcctccctttactgaaggatggtgtggctgacctcagtcagtccctaaacccaagacatccgtactcaggctgttcctagcaaagcagcctggttgcaaaggagatgctttctgtaagaatatggacactttctttttaacatgggacaatactggcattctctcctgagtcatttt

SEQ ID NO: 89567 - DNA, 1017 bp, Homo sapiens
ctgtaatcccagcactttgggaagccaaggcaggcaaatcacttgaggccaggagtttgagaccagcctggccaacttggtaaaaccccatctctactaaaaatacaaaaaattagggcatgatggctcatgtctgtaatcccagctacttgggaggctgagggatgagaattgcttgaacctgagaggcggaggttgcagtgactcaggatcatgaccctgtactccagcctgggtgacagagtgagaccaaaaaaaaaaaaaaaaaaaaaaaaaaaaagtaacaggcattgtgcaaagaattttccaagaatgtctcattcttgcaatggcttctcagaggaaagtggtgttattccccattttacaaatgaaacaggtttaggtaagtttcccaaggtcacagtgaatgagtagtggacttgggagtctgacctagacttaccccaaaagctctctgcgtaaactgaagtgacgttaattagctgtgctatctaggagactgatatgggaatctagacttaaaattatgagaactggtttcagatgatggccagagtaataaggaaggagtggatgctgaagccatttcaaaggaagactcaagattcagtgactgaatataggagtaagggttgagtgcatttttcatccatttttcaagcctgggtaacttggatgttaatggcactatctacagagacaggaggcagtttagagtgaagacgaatcatgtatgggagacagtgatgaatgttaagcatgggatttcagaaatgaagcatccatgaggctcattcctggtttttctgcagtcttttaaataaaagtacaaacctcccttgtcatccatttttgccttcacttatctccattctgtattatgttctagtcacgccccagtcactgatcccttcctaggccatacttggctacatcttagccttttcttttgatttttctcttcactgccttgcccattacaaatttggctgccacctgaggccctgccatacc

SEQ ID NO: 89568 - DNA, 1370 bp, Homo sapiens
tgggatttacaggcgtgagccaccgcgcctggccaaaataaaatgtttttatctttcttcacttagaactatgaaggccttttcttgttctggtaaccccccacagtgtaattggtgctgaaaatagtttcgtgcctgaggtctgttgtcactcactcactttctgacaattaggtgagccacttgaggattttctggcctgaagttataaaaacttggcatctgtcctaaggtaattgtaaaggcaaaatgaaagcattgaggtgaatttaggttatatggcatttatctggtaatgtgtttcagaaaagctagaatgaaaatgtgatgtaagggatagcaagtgtaggttgattcataattcttggtataaaaccaagttttccttagtcttgaggaatttgaagaaaggtaaaatgttggattttaagcaaagtaggattgaccagagactgttctgactttgacattcagacctttcagatgttcttccttcagaccagtccaagacactcagcatttccagccaagttgtcttttttttctgccaataaagtattcattagttgacgtttgtttgtattttaagtaaagtcaattttttttaaagcattaatttaattcacgggtatgcctttcatttctctggccttcagttggtttaaaaaaaaaaaaaaaaaaaaaagcacttagccggaccattctttctttagtaaacatttttattttcttaatttttcctgaaagattttcttcattttcatggaatgtcataatgacactaccattattttctagctctttgcataatagaaaaatgtagagcagtgcaccatttaaacacgtctgacattggatttagtggtcctaggttcatgtgatttgggagccttaagttgttatttagattgattcagcctgattcaccatcttttttactacagttctacatgaatgtggtgaaacaggtagaagaaaattaagcatttctctgcttttggagtctaatgttcctgcctagtgactggtttgtaacacccccctcacccctactttgttaggaacctgcaattcctaaaagaaataaataaagctgtacccaatgtccattctttaatgcttgcctggttgaataatgtttgttttttctgtttatgtcagtagtacatgcttattgtggaaaatttagacaatacagaaaagtataacaattaattgcctatgattctgtcaccagaaaaaatcacttgatatttttgcatcttccttgccattgtctttgctacttctgcatatttttacttagtttcatcattctcagtgtaatttatatcttggggtttttccccgcaacctacaggcattattcc

SEQ ID NO: 89569 - DNA, 1277 bp, Homo sapiens
cctgtctcaatccatgctaccccaaacactccagggaacctctgaggttttattgggtgcactttgaaaatttctcttctatagtgtgtttgtttgattttaaatcacagagaaaactgggttttactcttagagaaacattttcatccagttttttagtttgcttcatttgacttcctaaatcatttttgagttcacaaggatttggtacttttctgtttagctttctctctctaagctttatctaccttaaaaacaaagtcctttttttaatggccagtccaaccaattgatttctcaaactgaagtgcccaggtgtggactcatcaatttccgttagaatagggacatcctacttaagagttggtgcagctccaaggagctgacttgtccttgcttggggttttttttttttttctttcaccttctcaagtttccatggcctttgtgtgttctttttatgttgatttaaattcatatggttttccacaaatcccttctttggctacattgtctccttattcaatggattatccctttgtgggggctgcttattttaaagatgttgggggggaaacaaacccaaatctacgagcagtagttgcacatagttgccagttttaccttcttagtcattagatttccaaaccatgttgcagttttttggtccagatatagtatttctttctaataaagttttatgttgctgctctaaatacagatgcaatatttattgactctgtaatcagatagaaaaaacttaacttggtttgtgtggtatgacttataaagaaatgatgtatatttgttattttgttaccctttagattgtcagagactcccccaatttaatcaacaaagttttataaagtaaatgaaaatattaatagaaattagtttatttacttggttcttataactgatatctctgtgcttttataattgtgatttgtttttttgtttttttttctattttctgtgaacagttttaatgttcggttttggtgttttacactgaaattacatataaatttttaatttatttcatacaggcaacttgcattttaaaaaatacactttgaagtttatcatcttgaaattggggcttacgttgtttatctgtcttgagcattagtactttatgactttggccttatggcaacatcatgattattaatccgtcagcctttaatgtggtcactgtttcttatccagaccctgactttctagtagtttattttgctagcccagatttctgcttaaccaaatataaggga

SEQ ID NO: 89570 - DNA, 5255 bp, Homo sapiens
aatgattggtgctatagcttgtatcacttgataagcatttttgtaatacccttatttggagattataagagaataaatatacttaaattttttgagttataaattcatactggttagtagatattttaaatgtacccactgatattctctattttgcataaaagcataatgtcagactttctctgtgtggtggttatattcggggtgtctctgaatgccagcataaaaattcacggaattgaatagaaattggcctgtcttaatgacctatggtttcttttttaatgttttgaaataattaaagagagtttagtcacacagggaggtctaggtgaactgatgttgaagtttattactagacttttcagacctaaaaattttatttattgttattacttgaatatgtcaaaagtatattactggacaaccttttacacattcctctttctaaaatcgaattggacaattacagttctctggttcagaaaattacattagctcagaacccagtaacccttgataaccctgttagcgcagcaattcccgagtgtgtgctttgtgcagagcgttggactatgtactgctcttgatgtggggacagcggggacagagagctgtcattgaaatagacatctgtttaagaagcgatacttagatgaacctctgtatttctgaaaaataaatgtgaaatatcttaagagcttaagtatgtttttttttttagatggttcaaatccagatcattagctcatcatttttattgcttctcattctgttaagcggcaaagggggaaatatttgttttgactagtccttcactggaaagttttggacttctgcatttgagtctctgggagctagtttttccagttgttttatcagagaatatattcatctttgggttttaaacacttcaaatatcactgatcatggtatagaacttctctgtgacagagtggtaagcacttaccacaaatgttttgtgatttgtgataaagatgatttagggaaataattctggtctcccaaaatatgagacaactattaacaaagcatttttgttttaggtttggattttctttcccttattccagttgatccccaggtatgtatcctgaatttaagcaactaatttgtatttgattgttggttatgtcatactaactaaaaatgaccagttgcataaaatcaggacagtcatctctgaattacttacattgatggaaaggaagtactgtgcaaatatttcacaattttatttgaaggaataaagttgttttcagtttatgatttttgtctttaatatctaaattttaaattctgttttatttagcttaatcagttggcatctcctacaagcatttgaatgattagaatgaatagaagcagtgctgggtggctagaagttaaaattttacaaatacagttttattttttagctaaaacattctgtatatagaaaatcaatagctaaacctgattagacagacttgactcattaacttgattcttcattgtttttaaagacattcagatttggactttggggaggccccagtttaaagttgctatatgtcaatcatccccgttttctctgtcaaagatgagaaaccctagtagctcggtgtcccaacatgaagaccttgcagtgagcctggattgcacagacaggcttatagcagaggcagagcagaggaggagaaggcatgagaaaagtgaagggagaaaatgacatagaacaaaagactttgagaggagttgagtatagggagggatagaggaagaaccacgggtcactgcttcatgggctgctcagtcagctaagcacaagtcctgtatcagcctcctgtttcagtactctgtatctgattacatgaacagcagcagaaatttgggcccaaggtaatgtgcagactgaggaatttcttatcattcggagttgacctcattacagcagtatatataacgaaggtacctagtgaaagtgtctatgtatttttctaggaaatggattcttcagatgtgaggattactaatttttatgtgaccagttcttttaaaaaaaattatcttggaacctagaggtttttatttcatagctctgttttgtatatttagtagtggtctaagttatttggtgagtcagtagtagaagggtgatgtggggccttcagtttgccatagaatccttaggttttactacttgacctccatattatcccttaattcttgtcattgtagctacaattagggatgcagggttagaacttaagtggctgcaatctgaatactactaagaattcaacgcacagagcctgttgatggcagcactgtagcatctagcacaactttcatgaatgagtatctttttcctataaggcaatcaaaaactacctgagaggcagcaggaataaaatgtaagtttctgggctttgttctagatttaccccccagttttagtggaaagttagaaattgatttgattttagaaaagagttttaatactggacaattcaaccatctttagagctccttggaagctctttaagaactgttctccctgtaactaatgtcccttgactctgtatgtggcattcattttattgatgaaccaaaacagttatctatccaaagcattaaataacttgttcttttgaagagcagtctgaattttacttgttgctgtccctctggctggcaacttaaacctgggactgttgttcctgttttattcaccggccttggaaatcatgtagtctaaacaacttgacttaaattcctgttccataatccagtgtctctaatgataagctgcataatctttagaatggggaatatgaatcagatatccttactgatctttcatacagttgaactaatgacaaacttaaaccatctcttgcaggatatcactagacctcttgttttactaaagtcagtgcagtcgtttctcacataaaaatattctatactgatataatgcttttggcttgtctctcttcactcctctgttaatattagagtagtacattcaggtttgtacttgtttgggatcagtaatgggatcagtaaccaggattgtaaggggacttgtgaaatatgagcactaggaaaggggtgttaagcaggcatcacgagaagattaggttagatcttctttaacatttattgcaaaacttggtgattacctgagataattttctgtcctgaggatcctgtgatagctagctaccgtgtagtctgtgttttagaatgaatgttgtcattctgatgacacaagtattttacgtttatgtacaaaggagtccaatgccatcattcagctggtcagccttaacattcataaaggatctgtttgatactcaatccataccgggaaaggctaacaaatacttttaaaaatgttattaagcaaaaatgctggtgtaagatcaacaattctttcaaaattgacacccaactaaatacagttagggagcaaattctttttgagattagggccaatatttagtattaaatgacttcagttattgttgacattgtacttttacctttgtatgtggtcagcaaacaagttccacaagtttagagagaatcaagaatatatgctgcattctctaaataatgtaaaatagctaaattcatgctatcttccacccaaagatgtgaagttttgagcaatttttaaatcccactgggatttaaatatgtgactattgcttgtgcatatctaataatttctagtctctttatttaaaatcaagtagcctcttcctcattggcatcattgtttgtttcaagcagtactgtcctcctatgtttttggatagtctcacctcacccttaacagcaagcagtacgtctgtcaccaccaccagctcccatgaaagcagtactcatgttagttcatccagcagcaggagtgagacaggggtcataaccagcagtggaagtaacattcctgacatcatctcattggactaaaggaggactcacttgattctgggaatcattcatcagaactgctttttcttggatctctagtctgtggaaacgttcttttttttttttttttaataatttggtatttattgaaagtcagatggattcttttgctttctgaggggtgaacacagaagactgcaacaagaaccaaatgacatgcaaggatttttcttaattatgctgtactctcagcatcagatacattcaaccataactgtatcttcctgagagatggatttcactttcatacgttaatggatggagtctacaaatcagtgaaaaaagtttttgttaaaataaagagcaataaaattatgtaaatattcaagtaaccttttttctaattaaaaaaaaaattgtaatcactgattctagaatgacagcaacttctgtttaaccttacgtgaaggaaaaaaaatatatggaaagaacttaatgtttgctgaatgagtcctttccatggagatttgctctgtttcattgaagtaatgaagtttcagtacgtggccaaagcttggattccacttttcgtcctgcatttccacttttcttcgtgattgcatcaaagaaaaatggcattcgtgttacttggtttttttcctgcttatcatttacactttgacgttgtttgctaatgagtgctgtgtgaagttctgggatttggctactcttcattggtgattatgtttaaaagcactatgcagattctgccctgacataaagtgtgttattatgtttttagtaattgtacatttttcattctagagttttctataaatttgaggcttgccttctcaaaaaagaaactatgcagccattgaatgaaatgtctttggggtacggtgtgactggaatgtttgttagaaatttgttcacactatcaaatattgatatcttggagccagcagaagagcagattttgggaggtggtaataacaaaatttaatttcttcccaacaacttaattttctcatttattttacagaatagtagtgaaatatttgatgaaactttgtattttggtagcactacatagaaaatgtgttttagatttatgatgatcatatttctcaccaatgtaatttcagtctcagcagtgattttcaaacttagggaaagggacagcattagattttttttttttttcatttttttaaaatgatatcttacctgaaactacaaacgacaaaagagaattagaaatgtttgaattaaagtgaagaagggttgggggagatgggcctgaaccc

SEQ ID NO: 89571 - DNA, 2898 bp, Homo sapiens
ttttccatgtgatattttctgactgcagttgaccacaggtaactgcaatcacagaacgcaaaatcttggataagggggaatctactgtaaaatattaaggttgctagaattaccttagtatcaggacttctgcaaccaaggccatattacaaaatttaaacttccctcctttactcttcttccctctccatagctattgcttttgcagacatttctgtcaattatatttgagcaagttagaaccagtacattcatgacttcccttctctccgaaggcccttttagtggaatacaattctctcctcctgttactagttttcttctctaggtttatgaagttaattttgacctatgatttattttttttctccccttagtgaggtctttattttaagcacaatgcttatcctgttggtgaaagtttatgttactgaaacaattgataattggctcggtataattttgccacttgaaatttgtttagattatgtgaataaaatttagtggaaaagaatagacattttatagtatccatagaaaaaaatggcttttaaagttattctttgcttcttagatatagttactccacatgtaatttgggagttggtattttaagaagttctttgtagacccagctagcacaaattgtaaagtatttgtaaagtatatacaaagtctaatgccaaggtacaggtgaggattcatgtcggtgacaaagatggaaattcagagattcttaattcccaactgccttttatggctgtaacatgggttgttggaagagtgtctgcatgtcatctcagtatgtgttataagcaagcattctgaaaggatttgtttcctaaagaccttgaattaaaaattaatcctgaaaaaaggtaatgagcatttctgttcattaaagtgatcctaccatttagcagtagcatagacacaatttaccaatcacttgccctgttagtttttcagttctctgaacctggattaatttttaattgggggaaatttacattatttcagaatttgggcataaagtgagactttatttctttttagaaatgtgcaaacttgagaaaaatgcagtaaaatatgtctgaactggctatttggtaaaaatgtgtttcaagctgatattgagcaaacaagactaatatccaaggctgatatttagccagtattaacagttatggtgatactggttgttattattgaaaagctttcttaccagttgataactgaatagaataggatctattttgctttagaagaattgctagtttatcatcatgtatgaattatgtagcagttactatatctaaatagtttagttttactttgattttattgttaatgtgctcttttgtgattagtaatttggttttatttttatgcataatttttatgtagttagtcatactgtgaagagttttggtattgataaacttaataatttataataaaatattaaatagaacaccaagaatggagagataacaaagttttaatacatttcttaacattccttttaaacatcataaacatgaatcttctgaatctgcaggagaacaaagaagaaatgatattaataatgaactgaagcttggaacatcttctgatactgtgcaacagtgaatacaaaataaaacaaataatttgtatttatggagtggaaaacagcttatttcaaggaaaaatatgactgccttattattgctagtgccatattgtcaggtgcgaatggtgctcaaaagttgtatcattaaaatttgaaagtgctaaacatttacatatttaatcatgtagcagttatgttttgttaaaagtttatgactcaaataaggaaaatgtgttgtcatcaatgagaaaaaatctaatgagtcaatttcacagtgaagcacttaaaatttttaaattaaaattttatcagtgttaataaaataatgttaacactacctgctttttagttaaaagtaattgagcattttcaaccatgaaatacttcggagggcataaaaatatatcagtatgacacgctgcagttgaaacttatggtgaaataagaaacagcattttgctaaacttacgaaacaaggcagtaaaattttaatcactactgatgaaacttgattttatataagagttttaatattctgcttaaaatgtaaaatgcaagaagactttgatggtttcgttttttgttagaaagaataacatctaaaataccatatcaaacttcactgttagtacttgagaaaaaaatggtttcagtgagagaaatatttacattaaacaggttttatatagacagcacccttgtaatgcttggtaaacaatctagaattccaaccaatattttagaaaaatttctaggtattttattatggtgttgtataagtcaccacattcaattttccgtggatgaggtatcaatatacagataagtaaatctcttaattgttttctaaataaactttatatttaccacacacatgaaatcatcaaagagaattacagtacatctgaagaactggaattgaaataacaaaaataggatcctcagtgggtattctctggtgatagagcttcaatttttaatttcaattaaaataaataggcttgatataattttcaaactgttttatatcaagcttgcgtattttaattgaaattctgaaattgaaatagttgaacatttagaaaatgagcatttttgagtggcttggcttcagtacacaatattccaacaccattgtcaatacttagcgttataaaaaggtttcagttactaacatgaactgagagatacagcaaatattaaagatgattgaacatatgaaactgaaaaactataaaaaggtagaagctattgtaaaaatgaagaaaactgaaaaactgaaa

SEQ ID NO: 89572 - DNA, 1693 bp, Homo sapiens
ataagcttcctaaatggatcagtttttgatcaaagatttctgaactctgacctgtgttatttattcacttttctgagactaacatagttgccaactcaacaatgtatgtactctcaagatgactgttttccacatttgtattgatatccatatttaagtggtttgacatttaaattgaggttatgaaatagttttccagagtacaaagaatgtcatgcaatttgtcatcatttctcattactgatatttaataatcagcaataacaggaaagggaaaggatgcccagaggttatcccagtctagctttgtgaccatggttcccaccatcaaccataagaccagtaacagtgctcagtttcctacatacattcaaggatgtctttcttgtgaagttgtagttgtttaccctgggctaagagaaaatgcaggttaaataggaagaatgcaaaaaaaatctctgtttaagcttgaactttttcaaaagtatgtttaattatactgcttcttgaaattataaagtaattctatagtgtatatacagttttatataataccaattgtgaagtatttattacatatgtttaatttgtatttttggtagcatgaacagctaattttaaaatcataaactctcttaggatttcacctacctggtaggtgctatcatggtagccagcatttttatttctggatattatattttaaatcctgaacactcatcctcgtttctgattgtggcctattgccatcaagttggtcggctttaagattgggtaattttgctcagatgattcccaggaaagattgcaaataattaatacaattcgagttagacttgaagaaatttggattgtgctacagtgagtagcttcacttctcaaggttccctgatttaaatcaaaccttagggatcttctatgttagttttaaatttctttatagataaaattactgatacccatatacatattacatacatattaataaaagtgatgtctatttctatttgtggatggaagtgttatatctcactccagcactgtacattgtgtttgaatgtcaacttgctcttatgtcgcagctgctgttgagagccaagatatgttcatgttaaaatgaagactattatgggagaggagagtagagtggagtgctgtgtagtgagtagctgccatatagttgtgctgaaactggtgaacgaacgactgagaatgcccagtggtgcagctcttctctcctgtgaactaacagccagattgtttgtaatttcccgtgctatttaaaacagggttctcatgtatcagccatcttctgtaagggtgcccagtgtgacttcggttgatcctgctgctattccgccttcattaacagactactcagtaccattccaccatacgccaatatcaagcatgtcatcagatttgccaggtatgtggagtgtttttgtttcttttgttttttaatgaaagtttattttttttaatcttaatctgtgaagccagtatagttttgaaattttcagtagaggtgctaaggaaatttgaaagcttcgggtaaaggtcttatctgtttttatacatcacatccagttgttattttaactacagagcaatctatagattcctggtgataagaaatatagtagaataggaaatgttagagattttattcttccttttgaagaatttgtac

SEQ ID NO: 89573 - DNA, 6811 bp, Homo sapiens
tatatagtaacctttatctgctgatgtttgttttttgtgctgtgttagaggttgttcttactgccagcctcagctaggaggctccaggtatctacttctctctagccatttatactcattgagttacacaggtgatgctcagtaagttacttaactattatgttgcctgttacagatttaaaacataggacaaagggagtgtaataattgttgtaaagtataaagtattgcaataccaaaagaaaagggggtcagctaacattacttatgttttcaaggtaatgtgtattactttcttatttcacctttaggcaaagctgttgatcacatgtatgtacttcttaattgttttttaggctttttatggaaattctcaatgactgttctgatgtagatgagatcaaattccaagaagatggttcttggtgtccaatgagaccgaagaaagaagctatgaaagtatccagccaaccgtgtacaaaaatagaaagtatgtgtagaatagcagcagagagtaaagcagtgagactcgtgcaacattatcattaatcttggcccctagaactatacgtttggaattcagcttgttgactcagtcttttgatgatatatagttttcccccaaatgatttttattctttcctgaaggaatgtgctaaagtttataccatcttatcagctatttcatagtatatttttcctgtgtagaataaaggaaacattcatctaaaatcattttaaaatatgatgtttgttacaaaacaaaaagtcacaaatgaatttatatggacagtttttcagaattgttcttagagtatctgtaggtggaaccctaggtggaggtgaggttagagaggctgcatcattggttaatggccttggtggtttggggatggtcacaggttagttgctcagaaagtaaacaaattgttaccttccatttctttgtggagaagaattttaacattgccttgattacctagaatgtatactcatccatcaactgcctgcatccatccacactaagtagggaaactgagggcatttggagtaattgaaacgcacaggtgaacttagagtttctttttatctaacagtctcattgaaacccacacgtgaacttagagtttctttttatctaacagtctactcactgcatttcagttttgttctgattacatttgaagttctaacaaacaatgtaatgaatggagtaagaagaaaggggaaaaaataaaggatttatgccattattaattattcctctgcgattgacactaaacctgagtgcagtgaccaaggtttctctcatctttcagaaaaatggggagtgatttagttgataagtttctgttgcttttccattatcaactgtcattcatttttaactaaatacattacagataataacatacttttctgtgaaaatgtgagttaacaaatatggtatgtgagactgtctttgtgggtagaaagaacctacgtgattagcagataattcataagaaaagtttaaatgtcttagtaacttaattgagaggtttgggtttttttcaacttatcaagatgaaagtttttatcaagttctggcttatggtgaaaagtctgtactttctttgatataagcataattgctagaatggaaatatctggttctgagctaactgtgccacatgtgtgcgagaatacatagctgttgaactcacccattcttgtcccatgacctgagaccagttccctaactctgcgtgtctttctgtaaaacgactgctgacctgcagagacaggatgagcagtaggagctgcacaaatccttcagtggtattggaggcataactaagaacattctgtctgaatgagacttctaaccatctgtcaaggaatagtgctcacctgtctccctaggtgaacaaccattttacagacagaggtctggagttagggagttggtatttgtccatgggttggagtatgtggcttcactggctatatgttgtcaggaacatactatactgaatatactagactctaccactagagtttatttgtgttatacctttaatttttttttccttttgtttctttacatgcaggttcaagcgtcctcagtaagccttgttcagtgactgtagccagtgaggcaagcaagaagaaagtagatgttattgatcttacaatagaaagctcttctgacgaagaggaagaccctcctgccaaaaggaaatgcatctttatgtcagaaacacaaagcagcccaaccaaagggtttgttaatttatagttcactattgttcattacccttgcaactaattgctcttggatagatttataaatgtctctttgggaaatggcataactgtagaaggctattttaatttgcctttgttgagttgaaatattttcgagtaagcacattgtttataggaagcaaattttgatggagaaaatatttacatctttggaaagtgagcgtgtgaggtatttatttcctacctgagactttttgttattttcttgaacctgtttgtaaggaaatttggcatctcagaccagatgagaaagtctggtgtaatggagtgtggaactgggaatctgacaagtatggattccaattttggcacaccatcgcttacttgttctgtgatcttagatgaaatacttaatttgattgagcctcttttttgtgttctgttaaatggagctaaataacgcctatattacaggatcattttcaggttttaatgagatgaaagaaagcctcggtgtcaggcatgtggtaatttcccaataaaaattgattcctttcccttttcaccctctccagggcaaaatataggtgggtaggatggcattctacctgaattttagcgtggattctctgtaagttatctggcagaaggcattactgacctgcattaaaaatcaggtttgggtatttaacaatagttgctttttcagagaggttttgaaccataaaaggagataacaggagagttctcctggctgtctacgaacacattctttcaaacttgggtttgctagtgtcatctttttggcctcttggtccacttggttttctaatggctttactgagttataatttacatagcataaaatgtacccatcttaagtatataatggcacaattcagtgattttagtaaatacatagagctgtgcaatcatcaccatgattcagtagtagaatattttcaacacccaaaaaactttcttcatgttcttttgtagtttattcctatttacaccccaaatctaggcaatcgtttttttgtgtctataatgcctgtttagacattttatataaaatgtcttgttttgcaacattgtttatttttataattttaagaattaaaccttttcagctgccttctttgctgttaaaatacttacatttccaaatataatttacacatatattaaaggcatatatttacttctacccatttaattagaatgaggtggggtttttgtgtgtgtggaacaaaatgaggaagtatttcaagtggattttttcctggtgtgccaatcatttattgctcctttgagacaaattggttggtacatctgtaatttaaatgataaacagaaaatgaagttataattttgaaatggttacgttcaaaatgtattttgaaggggaatgaatgcttagatgtgatgtttctggattttactctgtaatgatacgctttagaatatagtggaaaaacatgagttgcaagtactgcagttggctgaattcatgccaggttgagaggtcatgcctagtgatgctgactcatgagttgttgtgatcttggagcatgtctctggtggcatgccacaagggtctaccctctgtcctttactacatttttatctgtgtttgataagtccatgaaacaggagggatggcacatacacagtgggcgacaaaatctgaaatgacctcagtatgcagaggaataaggatagtttacatctgtgatcagctactatagagataaatgttaaggttcctcatttaggctgaaaagaaaacaaaaactaacattggtaagtataagatagaaatttgtgactaaaccagcaacacatgaaagtttattttaaaagtctgtataaagcgcagctacctagttcgttccatgaagctgatgtagcccttaacacccaacctagacatacatacacattaatacacggaagaactcttaagaaacagactcacatagaaagataaatgaaaattctgaattcagtcttaggaaatcatttaattatatattaaaatgacatctgtgaccaactagagtttatcccaggagtgctttaatattaggaaatacattgataagatggatctcgtcataaggacaactttgtagtcatcttcatggatgttggaaaggccttcagtaaattaattgccatttctgatagaaactctttcaaatgtcaggtttcagttaatggtttgaagagttcaccactgaaatcagtttgttcttagcattaataaaataagcatagtgtccaggatccataccatgccagttttgttccattttaggctatatgactctcagagcatttcagtcagtgctgatcatcaagaatggtattaacaaatgagtatggccagagcaggggaacgggaaggtgaatagtggaatctggagcaagatggatgagtggatcttaaggactgaagctgttaaaccaggagaagagattatttgatacccaccttgtagttcttaaaagggagacaatgactagctggattaagtttgttctttattaccagatttaggtccagtggactaaagatacatggataaactttctattggagctttctgaatactaggaaatttaatcttttgtcccaaaatcatattttctgtgttagagtggctgccacctgtcacagtgtcatagtggaggctcatgctatagttatatcatctctgtgatcccctcctactcttagacttttgtgactttgttcttggttgtccttttcatatcctttcttgtagttcagcatctagagtttttatggttttcctgtgctgtgtaagtttatcataggatttcttggccatcaaagatagtaagcaaatgagaaagaacagagaatgagaaatcaggaaaacttactctaatttacagccccgaaattatgtgagcaactatttttttttttttttaattttttgagacagggtctcagtttgtgacccaggctagaatgccgtggtgtgatcgcggctcactgcagtcttgacctcctgggttgaagcgatcctcctgcctcagccctccaagtagctggaactaccacccccagctaatttttttgtgttttttttttttttgtaaacatggggttttaccatgttgcacaggctggtctcgaactcctgagctcaagccatccacctgtcttggcctgccaaagtgctaggattacaaaatgcataagccaccacgcctggcctgtgagcaactatcttttaagaggtattattattttagtaaaaattattcttataaacaattttacaaagcaccaagaagaaagcaaaaaatatctcacctagagagaatcattgccattttgatggcagtcctattccctttctttgcttacgaaccggagtctttaaatgcagtcttataatacctgtcagaagaaacttgtatgttaatcttaagacatttagaaaacctctgatgtttttccatattaaaagataattttacatattgtgccccttctgaaaaatgagtggttgctttgccttaataagaaggtattctaaagacaggaaacataataaggataaatctatatgtctccagattgataatcattaagaattggtagcaaaattgcatcttttttatacttttatgatcataaagtgggagcatacagtgaacttcagggttataaatagaaatggtcaacctattttcagacatccaagtctgagcaaatgtgagtttcatgcaattctctgatccagcatataatccggaatactaatatttgctatatagcagcattctagcaattcacttttgtgctgtgatattatggataaagttacaaacgtttaaaatataaatggtcacttgcataatgtatacacgtatctgtgtgtgtttaccaatcctatgaagaggcagtaacaagttttaaaagctttaaatctttttattaacatatagcatcacatttttacatccatcatttcaccatccatagccatttacattttttcatggaatctgttactcatatctattttttgcataggctttagaatcattttgtttctgaatgtggtctttgtgaagattttgataacaaaagcctgctcccagtatgtaatttgataatcctaactaatgactactttaagccattctatgtaaagttgaatttgtattaatggttgcaacattcaggtaatgggaattaaccaacactaagtagtttagcttttcatatgtttgctgaggttttagatgttgatttactaatttgtaccgccattggattttcacatttcacatgttttgacagtcaaccttttggtgttgcctaagtaaggagtagctatttactcatttaaagtttcatgttactaagtgacaggacacgtacagttattaggtgttactgtagtgacagacaggtgtgtaggtacattcacttgactccttttatagatgtaagtcaaagggtcagggaaggaaagggagctctgttattgttgttacgtgtaagtctatt

SEQ ID NO: 89574 - DNA, 1240 bp, Homo sapiens
ataaaaatcttagaaatattcattacagcattgtttgtagtgataaaagattgggaacaatttaaatgtcagtcattagtgtactgattaaataaattatgataccttcatataatggtagctttttatataccgatttgtgtgcagtagtcaccaagttatatgacagaagtgagttggaaaacagtgtgtattgtatactatcattcctgggaaaatatttctttaaatacacacttggtttatgcttagaacatctgtgaaaggacatgcaagagatggataacagtggttctctaaatagggaaactggggaccaggtaagaaggagtcatactttcaatgtatatgaatctggatttacatgttaacccgttttgaaaaagtgaaatggtttttcaaaaatcatagggcagtcaatgaataaaaatatattgtaatcttcttgggaatacattctgatttggatttctatttcatttttatcatcttcttgtatgacatcttccgacttttacaactgaccatgttccctctgagctcattctcctttctgaaatagttttccttgtgtttcctgtcctgtagttaggaaaaatgaggctgacaatcccatgccgtgcagtgacttgtacacatctgcagtgttttgatgctgccctctatctacaaatgaatgagaaaaagcccacctggatttgtcctgtgtgtgacaaaaaagctgcctatgaaagtctaatattagatgggtaagtatatcccttttaacagctgatatggactaatacaacagctgttggcaatgcctttgttcactacaacttactgaactaaattctaaataaattctactctagcataaatccagatgtttgtatgttttccgtcttatacctaattatactcaatcttattttttaaactgtggttagtggcatttttatctctataatatgatttgcgttgagggcaatgtttttgctttccaagattatattttataaagcccacaggaaagagggaaaagtttgctttgtgatgtcattttgcttacctagaatttcttgaagtagcaattagggtctatgcaaaaaccagaggaagtgatagggtagatacagacatagctcttaagttcaaaactggaattcatgcccaggtatttctgactctggagtccaaactttaagcatcatctctcatattatattgcatgtcagaatttggaaaatgacatgaa

SEQ ID NO: 89575 - DNA, 3240 bp, Homo sapiens
cttagaattataatattttctctataccttcaagttgatgaacttgactttctgttgatttttggtcttataataaattatgtcaattttgagataccagttaatacaacaaggaatttacattttagaattacttgtttatataactgaaataatgaatggaaaggagatttcagttaatttctgaccatcagcttcagtgttaatattacatgaagcatcagtttcagtgttcttattacatgttcctaaacagaataatattcctgttttatggatggagaaattgaggcattatttatagcaggaattttttgttttaccaccaaggtaattgcagagctgggagtaactttacagacattggaataaatgattgtagacattgaaaacttttgccatgtaatggggataatactcttccttataattaaaatgattaattgacctagaatttacaccataagttgggtatttagatatctaaaagaacattaaaaaatatttaaaatacttggtttggcagctattaaaagtatgatgtttattgtagaatcaattgaatgaatatatttaataaaatgggaagataggttttttttttttaacatttatgtgaaattatattttgtctgttcatagctctataaatagctaatgaaggttcctttgtgccagatctaacaggtatgggattggacgctgttgttttctggcttgactttttaatttttatcattcttcatgtgtcttacatactatagtagctgctgcttgtcaataaaatacccatttggggtacaggagttaatttatcaaagctttcctcagaagaaagctgatacctggttcatttgcgtgatttactcaaaggccatgtagtagcaggtggtttcttctgccagaattagaactttggaactctggatttgcagtgttaattcagaccactggcctttggaatttgtttctgcagtggaattcctcttttaagtgaaaatatgagaacctcattacataaagtcgataaaagcagaatgattttggttagcaagattctggttagtcataggagggtacattttcagggtggcccctaaggtaccagttttgctaaataagaaccatagtttggaaaccattgatctaacctatattcccataccagcgaatgttttaaagtgataaatgatcaagaaatacctttaaaatgattgagcttttattttcagtgaagtagcttggtgaattttgtccccttcgcagtgattgaccattccatggaagttattttgaatgttatttttagaaaccagagtttcttaaataagtatttcatgtaaacaaagagaatattatctctcatctttaatgcaggttttttttgtttgtttgtagaattactctatgtctgtatatcttgtacggcagcttacatcagccatgttattacagagattaaaaatgaaaggtattagaaaccctgatcattccagagcactaagtaagtaatgtttaataagaccaagcatttaaaaaaaaaaaaaaagattgagcatatgagatactttaatgctttaaatattgctcacatcaatatattagtatatatttgttagcttgtgtatatactaatttatatacattactggtgagtaaaattgtagacacattaccacatagtagtttttaattatcaaaggaagtataaatatttttatcttttctgtttacaaatttaataattgttggaaacaaacaatagtgcataataaaaactgtgatgaatgtgtgttggaaaagctttgacgctcagggtactgctgcattccagcttcctctcctaattgttgttttgttcttaagtcttacatagctttctattttgaaagtcttgcttgccagcagttttacttttaaaaagaaattttaagaatttaaacaaagaaatttgcatgttcataattctttaacttatattgggagtgtgatcgtgttgtcaatacattaatatgtaacattttgttttaagatgctatatatttctataattccatttctttgtcacccttaatttttttaaatttttttttttctcttctttttaaagttaaagaaaaacttactgcagatcctgatagtgaaattgctacaactagccttcgggtatccttgatgtgccctgtaagtaaagcaacaaaacattttggggaatttgactttttataaatgattaactttcctataaaagtaagtgtgggaatgaatgatatattatgaagaatgctgaacttttgtcttttcccattaaggaatcttcatgattaagtcacaattctttgtattatttgggcatgcaaagaatacaaagaagagggaagatagctttaggctcagaataatctgttgtaattaatgttgtagataatatacagctagtaataaaaatatattaagagctgactccttttatcagaatataaatgatactgaaaaatagcaataaagtgactagggcctgataaatgctaattgatggtcttagtttagtgagttaggatgtgtaggatgtctttgtaatgttcttttaaattgcacaataatttttcttttatatctccttacatagaaagtatgagggagaaatcagtcagcaactctcacatcctcctgtgtacttgccactgagctaattgtgggagaaaatattgaggcttgcttagaatgttaataattgagtttgaaaaataaaaccaactcccataaaaatggtgcagacttcacttacagttaggctgttttactaccaagaggagatgggagggtcaggagcagtgaatgaattggaggggaaccctttccggttaagaagaacttaatgagaaaaagtcatggaatcaggaatttataatgtagttttgtgggtatttgatgactacccaccattttgagaaatgtgcagttttttaaatggggagaaattgtgtcagaaaagagaatgatttgttgagtctctactgtatgttcttttatttaactgtcttagcaaacctgtgtggaggagttgtcttcattttgtagatgaagaaactgagactgaatgaggttggctaacccaaattacacagttattggtagaacaaggataaagattgtagtgttctgatattcctgttctttttccaatataccatgctgccagattgggctgaaatatacatgtcctgattacaagtacat

SEQ ID NO: 89576 - DNA, 1139 bp, Homo sapiens
tccttatttgttaacttaacctggtttaaaagattaccatttctgttccacccagagaaaaggcagtggaaaatatttttatcactcaccagattttaaaaatgaaattcattagtttgttctttctttcccctcacttcccagtttggtttttttctttcccacctccaatatgtgcatgtattttgaatggggactgctaaggatgaatcgttataaaaagttgtgactttatctgtaaagcttggtgtcctatgaaaaaggaaaaccattcatagccaatgtggcaagatgtcagcatctttaattttaatgttggaacatggatttttttcctacctttctggacttgtgaaatattttgtaaccttttttcaaaggttattttcctattttgggttgataatgatcataagggctatatgatttttaggctaaaataaaaatagtgtaactgaaattgggcaggatcctgtatctatcttggagaaaatgtttaatcttcctgcagatgatttgaaataatttttctttcttacggttatagggctatgcaccaccgcctaaaaatgggattgaacagaagcgccctggacgccccttgaatattacatctttagttaggttatcttcagctgtgccaaaccaaatttccatttcttgggcatcagaaattgggaaggtaaaagctctccgttttgggtagcaggacagtgaccccactgagggttgactttctgtgttttttcttaagctgttggcttcagctctttctgtttttggattgtaatctctaaaaagcagtaattttcagtttagaggtggcagtgtggagattcttaaagttaaaaactttaactctgagctttcctgaatatcatctctttattttcctggaaaggaaatatgcatatttatatttcttaaggtaatggtttaaccacaattgtatgtatgtttgtgtttagtattttaataaactagaagctttggatgataaatatttatgaagaggaacaaagaaagttttatccgtttgggggagaaatggttaaatgtacacatgttgtgattagaaataatctgttctagcctttctataaacaactgatatttcagataacctgtaagcatttgta

SEQ ID NO: 89577 - DNA, 1622 bp, Homo sapiens
agaattaccagtaaagtcacactactcaaatgggatacagaatagattgaaaacactttatgctgagtgagactaaaatgattctgagtttgctgacacttcattcttacatgagtgttactctccctgcttctgttgcccttttctactgtgtcagacagtgttatgtcttaaattctaatttccagagtgcacattttagttcatgagttatttctatccttctgacagaccctgtaacattatttttatttggttaacctaccagtggacataccagcagacagaattatcttccaggcccaaaacaggcaaaacaaaagttttgttcaaaattacctagatactggtgttgatactccttgtgcttgatgctcattgaatcagctccttgagtctttatgagaggacttttcttaggagttgtttttttttttctgagcaactttttttttttttcacttgagcaacttaagatgggcataaccttcctactctctctctctcacacacacacacacacacacactgtctctctctttcatttccatattataatgcaagttattgaagttcttctctttgtcttttattcccctgctcaaacgtttttaatgattttcagaattttgttgcaagttatagattacacattatcatgtggactaccatttaataattactgtcttgcctcttatgagacagtgaagggtgttcccaagttgtggtagacagggtgtgttcctctttgcttgtgatactaccagtactagttttcattggtcctaaggtgcatattttagcattgccgaaatccagaagtgtcttaaaattgctggtgaccaggtgtcagctgtgacgtattatcattgcctgcacctgtgcaactttgatgttattggcatggcgtgactggttagctgtactccctggcttttcagttaataaataatttaaggacattttgagaaagaagcatgaatcctggctgttgtctgaaaacttttcattgatggattctcataagatccagattgtatccccattaacacatccagttaatggtgtcagtgacttgcagagaaatctgagacattagtggaatgaaatacagttttaaaagatacttttctctctaaaattcctgcttgcacataggagagtgtcatgtggaaaaatgtatgcattaatgactgagtgaaaagtgattcagaagtttcttctgtacaaaagggaatatgttaattcattttgcttccatttctttgccatatatacatagtattttctctttctcaatagtacataattaaattacatcactgacatcctagcatcagtgaaatatggtatctacttttcaatatgtagattttttgcagctaagacattttaattttctaaaaaatatattattttggctctgaaaaatcagagtgaagtcttgcggtaattgggaattggatatactgcgaatcagaaatgagtatacttgctatttaaaacgaacagttggccgggcactgtggctcacgcctgtaatcccagcactttggaaggccgaggcaggctgatcacgaggtcaggagatcaagaccatcctggctaacatggtgaaaccc

SEQ ID NO: 89578 - DNA, 4413 bp, Homo sapiens
attgatcacctttcagggaataagaaaaatacaaataatgcttttcctttttttcctcctggggagactgttctgagaattctcattgtacttttttaacccattttctttctctttccaacagggattttttgccaggtggtaggagagattatacagtccaagttcagttgaggtgagtttgaaattttctgttaccttagttttatacttgcttactatgtgcatgtagttctgaattttaaaacatataagaatgtttgagcacactatttaagaatacttttttcttttattaatgcagactttgcctggcagagacaagttgccctcaagaagataactatccaaatagtctatgtataaaagtaaatgggaagctatttcctttgcctgtaagttgctttttattcaccagatttgcatataagtttaatataaacactgacaaggcctagaaacagtgcaacagtgacagctgaataccagtgaacagttttagcatccagattaaatactattttccactagggtaacccatggcttcttggataaataataaatggcttatttcaggtctgaaggagatggaaaacataagcctggaattttttttttttttttttttttttttttaaagagacaaggtcctactgtgttccccaggcttgatttgaatttataggctcaagcaatcctcctacctcagcctcctgagtagtggggaatacagttgtgcaccactgtacctggctagagcctggagcatcttacttaagaaatcaaggatgctgtgaaacactcttgggatcatatcaaacagcatagttgaaggggaggacttgggcactttcatgtataggacagcatgtgtgggatgtctgcattagctgggcctggcctgtggatggcatggggaaaagcagaggctgctgagagtggctaactacagagatcaaaaattcccagcttgggccttgatgatgcattcacttgtggtgggtgggtgcaataatagttggttgacaacacatttaagcagtgagagagtatatgggcttcagcacctaggatgtatacaatgtaaatgcatgcagcctgtctctggcctaatagatggcttttgactcttcaaatcctgatagtcaagtcttaataaaataaaataataaatgtagaactggactatgtattggtttccattttggatacattactaaattggtaccattctgtaagaaggccagcaaagccataatcaaaaaaatagtacaacatggcacgtttgtcaagcactacaaagttggaggtgtatttactgtaactgaatcactaagagagcagtgactccctgactaggcccagttgtcatttcaccagagctgacactcttcgcaactattgaggaaatggggaagctgtgtaatatccctgctgaacacgagactgggctctggactaatatatgagcagtactcacgagtagccaagcaagtcagacaatatgatctaggactctgggctctccagagccaagtgctaagaattgggccccaaagtgaagaaattccatgactgagactgaccctggtcttgtggacagagggatctgacttctcttggttgtcaggagtctcatttgtcgcatacacagcctgtggacttagagacctgagaaatacttgttttgtgaacctttaaagggcttgagcaacactgcatcactgacgtgactctttttgaaagatgcatctgagactgaaatccattgagacagtcctgggagtgaaggggaattgcagaggctgagtaggtatggtcaggggggattgcttacatggcccatacatgtttccccgggtgggacatttagtttgtcaggtttccggctactagcaacaagattctcaggagctatcctttttttcccactcccctcccatccccacccaagatagagtcttgctgtgtcacccaggctggagtgcagtggtgtgatctcggctcactgcaacctctgcctcctgggttcaggcagttctccagcctcagccttctgagtagctgggattacaggtgcctgccaccacacctggctggtttttgtaattttagtagggacagggtttcaccatgtgggcaggctggtctcgaactcctgacctcgtgatccacctgccttggcctcccaaagtgctgggattacaggcgtgagccaccacgcctggcctatcttttatttggctagtttgcacaaagatctgaaccaagggaagaagcagccctacttggagctgaaagataccaatgggtaactgcatgtgtgacaaagaaagcctggcaaaacagattaatacacaaccctgtgcacctgtcccatggccttttcataaccatttttctttgccctagatgtgctaagatttcattttttcctttttttttttatttaaaaaaaaaaaaaggctctcaggtctgttgcccaggctggagtgcattagtgtagtctcggctcactctgcagtcttagcctcctagaggctcaagcgattctcccatctcactctccttagtagctgggactacaggcatgcaccgctatggctggctcatttttgtattttttgtagagacagggcttcgccgtgttgcccaggctggtcttgaactcctgggctcaagtgatccacctatgttggcctcccaaggtgttgggattacaggtgtgagccactgcgtctggctgctaagatttctttgacctttgactctcattgctatttgcccctcccattatctgtgatgaaagataagactatggagggcttcttggtgtctgtggactcaccttgaaggcttatcctgtatcatcgtgtgactgtgccagtgatgggagctgcatctgaaatgtgtgaggttgtgcctaaactctgtggcattgctatggaaaatatggtggctacagatgtgtaaacatagacgttaccagaatttccaaatggaccagtcagtgtcacattttgggatgataccttcctgtaggaggtctacagtaccactgaggatggcttggagtttgttactcttccagttcttttgagggagaagaatttaggcagttgagtacttcctctggggcattgttacttagttactgctgatttctgtcccaaagcacccactaacccctgattacttgtattagactatttgtgaacatattgactactacataaagcagcctttgtctgatgagtctggcatccctggagccaggggcctgcagcagctccatgggcagttgtgaaggaggagaagaaatagagcattgagagaaaggcaaagacatattttcaaaaatagaaggcaatggggaggatttgcctgacccttatagggccatcccaaagaaaatcaaatgcctgcctttcccaaagagtctttttaccctagctccgtaaagtcctatagaacagctgacagaaattcacatgcgcatctgatggaaaacatcttaaaccaccacttgatccacagttgctattgattgggataatgaaatgtggagtctttttaaatataaaacaagattctgcagtttttaagaattacgtgagtatgctgcagcctcagaagaagaaagctgctgtggccctataggagttatagtgagctcttgccaccatggagagcctcagggactttgttccagttttaagaagcatcaacaagccacaaaagaaatttgataggtggtccttgcccgtgatcctggtgtattgaaccatgaatcctggagggaaaagcttgacacagtcatgaattgcccattagagctctgaatatggtggcatttgtctgtgtcctggaagaagtccttatgtgtatgatcttactgtaatacccagtctttatggacccatggcagttgaccactatacttcatgtacaaagtaaacataggaatgggaaatggtattactttgaaaatggcaacgtgtccctagactgttaaggatcaaatagtgatgcaagcagcatatgtgctttttaacctacatcaagatgctgagttttacaaaacaccttcatgcattcattttccaggttcccttggtgcaaggaagacagcagctcatagtagggcttgtgggatggtgacatgcagtgtggacagacaagaacctgctgcagagaccatctcccatctttgactccaagggctgccagtgtacagactgacagccagatgagaacattccatgtttttaatgggcagaagaaagaaaaaggccctctttgtttagggagttattttaagaagctggattatttttcttctaaacaatttgtgagaaatatctataaatcttgtgtagctctaaggttgaagaaaggaagaagggttgacaa

SEQ ID NO: 89579 - DNA, 1871 bp, Homo sapiens
gcacctttgccgccttttttctctgtactctgcctggcaaacttcttgagtcatgtttcaagggccagttcaattcatacgtcccctgtgatgcctttccagatttgctttaatgtgtcatttgtctctcactgtgccatgtacttattttctgttaaggcatcattgcatttatttcactgcttgcatttgcaaccttcttaatgaaagcagcattcttctactcatttttatcacctcacaacccattacagtacctagcatatggtaaatgcttcttttgtatctgatggaccagtatgtaaaacttcctagaacagtgattggcagaaatgaatgtcagaagatgccttggtcattactcataatgtttgtgaagatatttagcacattgtatttcccagtttttgttaatttcccttgccagaataaagtgtaactccttagtgagctgttcaaaaccctttatgcccccatccatctttctaggctcatgtcttgtcttttctctttcttcacatcgtgtttcccatctaacaagtttctgatctgtatctctgtcctttctttttttctgggaattactgcactagatacccacagttactcatgttcctagtggagccactaagcagaagtaggcagaaccactgctgtaaaaaccctgttttctagttagattggactaattgtgataatgaccttgaactttcaagacaaaaattttccctttttctgtagcacttactttttataatgtactgtaccacttaccatattttattttaggtgttgtatttctgttacctacttagcatataaatcctttgaagcaaatactgtgttgtatttgtctttgaagctccagcacccagaatatgaaatgtgtcttgatatgaatgagtggagtgatatgggttgctcagaagaggtcagtattgtcaaggatatggggatgttttgaatagccatttgagaaggctgctcttggtaaggagaacagtgggagcagtggaaacagtcacagcagccagctgctcccatgtgttgagcacatcttatatttaggcacttgacatgtgttgttaacatgtttaattgtcacagcaacttgatgaggttggtgcagtaattttccatctttaacagatgtagaaactgaggcacagaatggttaagtgatttgcacaatgttgtgcagcttgggactgtagaacttaaggtggttgtcactgctgtgctttactgccttccagtggagctcgaggattgggaacggtgagtagactggcccagttagagcaccatgggggctcagtgtactccagtcttctcaagaaaggactacactctagtgatcttctctctgacagagtccaagatttatgacaatggctaagggcaatactttttaaaactgtaatgtgtatacatgtcacctgaggatcttgttaacatgcagattctaattctataggtctaggatggggcctgagagtctgcatttccaacaagctcctaaggaataagtgctgcttccccgtagactccatgttgcgtggcaagagtttggagggttcagtatgaaatatattttacatgggaccattagattctcatctagaaattataagaggttctgtatctttaattggatacataattatgaagttgcatggtatggagatgctgagactctaggcactaattctttatcctgggtctatattagaatccccctagtagctataaaaactaatgcttaggctgtacttgagatcaataagaatatccagtgaataggtctttatagtaaaagaaaagtctttggccaggtgcagtgtctcatgcctgtaatgagacactttggg

SEQ ID NO: 89580 - DNA, 1047 bp, Homo sapiens
cagactggcctcaaggagatttttgcttagtatatttccttctgcattactcgtttccttaatggcattggaatctgccttgacagaggcctctttgtgataggccactcttcatttaccacatcctgtctgtttgctgcacttcattgattctttttttttttttttttttttttttgagacggagtctcgctctgtcacccaggctggagtgcagtggcgtgatcttggctcactgcaagctctgactcccgagttcacgccattctcctgccgcagcctcctgagtagctgggactacaggcacccaccaccacgcctggctaattttttgtatttttagtagatacagggtttcaccatgttagccaggatggtctcgatctcctgacctcatgatccacccgcttcggcctcccaaagtgctgggattatgggcgtgagctaccgcgtctggcccttcattgattcttttatgtcattctgaatatttaaaactcagcaaggcaactctacctttgagggagctagtatggtctttagagtaatactaagtataaagtgaattctgaaccaaccacttaggtccgtatgcccctagacaggtgactaaacctcactttctcagcatgcaaaattggaataatgatcaccacctcactgggtggtttgggagattgatgctataacttgctctgcctcttcttgtcctggtgagtagcatggccatctcttcagttgcagcattccaaaacctggataccctcctagaaactccccttcccttatcctgccttctcacatctagtcattcatcaagtcttaccattttttatgtgtgaatatcactcagtggtatttatgtttaatagctttcaggccctcatttgaaattactattattttttgagccagggtcttgctctgtcacccaggctgaaagtacagtgccgcaatcaaggctcactgcagcctttaatgtccgggctcaattgatcctcccaccttagccttctgactagctgggactataggcatgtgccacca

SEQ ID NO: 89581 - DNA, 1046 bp, Homo sapiens
ttttatatttttagtagagatggggtttctccatgttggtcaggctggtctcgaacttgcgacctcaggtgatccacccaccttggcttcccaaagtgttgggattacaggtgtgagccactgcacccagcctgcattagtattttagaataaagaatggttacgtacttaacgttaaagaaacccctttgtagtgactttactcatgattccaagatgaatgcagtttagtacttcctgattttggagtattttaaccataacgtttcagaatttggcaggtactttataaaaaatgcctggttattgcaggtggttgtagtgttggatttgttattgaaatattatctttctttttttttttcttcccagttcaaagcagtattcagcgatttcaagagaagttttttatttttgctttgacacctcaacaagttagagagatatgcatatccaggtaagaggaatatttggaatatatttctcatgaatattggtttattcacctgtagggctgccataacaaaatttcacagactggacagtgtaaacaacagacttttgtttttcaaaatgctggaggcttctgtccaagatcaaggttttggcaggtttgatttctcctgaagcctttctccttggcttgcacgtctcagatggccttttctctgtgctagtgcatccgtggtgtctttcttttctggtaaagacactgtcatattggattggggacctaccctgtggctttatttaaccttaatttcctccttaaaggccttgtctccaaatacagtcacattgggggttaggacttcaacgtataaattttggggatacacaattcagtccataacagttgacctgtttctctcatgaaagggtagtatactttgactaaagtcagccaaatatttagtaaatactgtgtgttagaataaaatttttaacctttgaataaaacctcaatgtcttttagattactttttgttatatttggcaataattttttaaatgaaaaatttattcccaggttgggcatggtggct

SEQ ID NO: 89582 - DNA, 1439 bp, Homo sapiens
ttttttaatgtctcattttgcactctcttcttttagttctccatttgtacttactttagaccttttgaggtttctggctgaagagactggatgctcatgtcattaattaattaagattaaaatgcagcatgtttacttgtaatctcaaaatacacgttattacatttggcagttaagaggtcattggtgaccttagccacagatagtgaaaagtggagtccgaacaagaaaaaaagggttgaggagtgaataggaactggagaaatggagaggcttacttatgtttctgtgtttgatgctccataattatgtttataatccaaagttttattttactttttggccttcatcttaaacggcatctccctcttccctcctttttaaagcgttctgaaaaaatatgaaccattttgtgacatttctaggagaataattgctataataaactgtgcttatagaaaagaatattttagctagggaattaatatttttctgacttgatgtgacttgtggttgaaccgctctgacattggatatccaactggcatcttttttatcttcatgtagcaggaaaactggacagtgttatatacaaggaccatttgccttttttttttttttttttgaagactatcgctgtagtgcactggtgtgatctcagcgcactgcaacctccacctcccaggttcaagcgattcttctgcctcagcctctggagtagctgggattacaggcacgtgccaccatgactggctaatttttgtgtttttagtagagatggggtttcaccatgttggccaggctggtcttgaacacttgacctcaagtaatccacctgcctcggcctcccagagtgctgggattacacgtgtgagccactgtgcccggcctcattttgcctttacttgggtgatgttgcaattgttaggaagcaaaagacttgaggcctctatatatattaacttttttgtttgttttaatggacactagaacattattgaataattcattattaacctattgcaggtttttgtgaagtcataaatacatttcaggtaataatatacataagggtgacttcattaagcaatattttttaactgggaagactttcatatgcaaattaggtatcttcaaaacttaaaagttttgacattcaaaattttcttatatgagtgttttgtgtaattaaatacagagcaccaaaagcaaaatacaacaaagaaaaataaacaaaaaacatttaattcttgaatacagttctcctggggagcattttgacttcctttcattagataatattatagttaagaatgaaatgtaatattgaagcgttttgttatatttttactgtgcattagtatttttttttttttttgagatggagttcactcttgttgcccaggctggagtgcaatggtgcaatcttggctcactgc

SEQ ID NO: 89583 - DNA, 1033 bp, Homo sapiens
taggaagcattcttgtttttgtttttgttttttatagacggagtcttgctctggttgcccaggctggagtgcagtggtgtgatctccgctcactgcaaactctgcctcccgggttctagtgattctgctaccgcagtctcctgagtagctgggcttacaggcatgggccaccatatctggctaattttgtatttttattagagacggggtttcgccatgttggccaggctggtctcgaactcctgacctcaggtgatccgcccaccttggcctcccaaagtgctgggattacaggagtgacccactgcacctagcctaggaagcatttttactgaaatataaaccagtttattaaaaggtgtcaatatagtgcttgcagggggtgatggtgggggatgacttggcaggttttatattaagtatatttaacatttaggcacattaaaatattaatttttgacctaaatgtcttatcaagataaagtcaatgttacaaagtaggtgacaaaatatatctgttgaactgcttgttttttcctgaaattttggtatcttaaaaagcatagacttttgatgaggacttccacaagtgaaaatatattacatgtatagtatcttactgttttcagaatgctttcacatgttcctgcatttagtccacaaaaccatcttaaaaaggcaggtgagaaaagtgttacttccatttgaaatgaggtgtagagagacttgtaaatttcctaaataacttggatagtaaccagtagggctaaggctaggatataggactgttatattctggtctagttaagtttaaaaatttataaagaggaaaaagggatccatagatttagagctgtcataactattataccagtagcctactcatttagtaattataaatgaatctgaatacttggaattgataagattatgccaaaattcatgaaattgtggcattatttcatttactgttgctgtataatatagtcttccaaaacatagtggtgtaaagcaggtattttattatgcttgt

SEQ ID NO: 89584 - DNA, 1191 bp, Homo sapiens
ggcctcaagtgaacctcctgcctcagcctcctgagtagctgggactataggtatgtgtcactgtaagtgtgtgtcactgtaccttgccctgcccagttgttttgttttgttttgttttttttgagacagggtctctctgtctctcacccaggcagggtatagttgtgagatcacagctcactgcagcctaaccttctgtgcttaagtgatcctcctaagtagctgggaccacaggtgtgcaccaccatgcccagctaatttttacattttttttgtagagaccaggtcttgccatcttccctaggctggtcaggaactcctgggctcaagggatcctcccgtctcggccttccaaagtgctgggattataggcatgaaccactgtccccatccccaattttttttttttttttttttactgtggtaaaatacatactgtctgaccattttaaaatccagtggcatgaagtatattaatattgttggaaccatcgctgccatctatctccagagaacccttttcatcttgcaaaactgaaactctatatgcatttaacagtaattcactattccctcttcccccagctcctggcaaccaccatcttgctttctaagattctgactactctagatttctcatataagtagaatcatacttatatgtcttattatttgacttacgtgtcatattatctgtcttcttgtgattggcttatttcactaaacgtaatgtcctcaaggtttgtccatgttataacatgtcagattttttttcctttttaaggcatagtaatattctattgtatgtatacatggtgttttattcatttattctccaatggacacttggattgcttccacattttagctattgtgaatgatgctgctatgactgtgagtatacaaacatctcttcaagattctgttttttaattcttatgagtatacacccagaagtgaaattgcgggatcgtatggtaattctatttttaattatttgaggaaccactaaactgttttccacagcagctgcaccattttacattccccaccagcagtgcacaggggttccagtttctccctgtcctcatctgcacttactattattactatttttttttatagtgaccatcctgatgggtgtgaggtggcattgcattatagttttgatttgcatttctttaatgatta

SEQ ID NO: 89585 - DNA, 1765 bp, Homo sapiens
cagtatttcctggaaatttattacagcagatttattgcagtagttctattatcttatagatgtaccgtaacttacccagtacttttttgatgtacatcttcaatgggctttcactgtttattcattcagaagtatttttgtgtatagcatgtatcaggcactattcttgcagttttacagacattgcagctatgaacaacttttgcatatatttctgaatacttgtacacatatatatgaaggataaatgcccggatgtgaagttgttgggtcaaaatatgaatattttatattttgatattcacctttagagggaaattcgacagtagcttccacagcattgcaccaatttgtagtccatttgtgtgtgtggaggtactgttttccctatacactcatcagcattgtattgttggtcttttaatttttgctaatctgaaaggtgaaaaattaataagaatcaatctctttttatccttaaattcttgaacattaggacacactcattaagcttttggatatgattaaacagtattcaaatgatatgcacattaatgttaaagccattaaaatataatattctaatttactgtatatattatttttattaactcagttaataagtatataataaggacttaatttggatatggctatgtagtcttcccccaccgccaccgagacaaagtcttgttctgtcacccaggctggaatgcagtggcgggatcttggctcactgcaacctctgcctcctgggttcaagtgattctcctgcctcagcctcccgagtagctgggattacaggcatgtgtcaccatgcccagctaatttttgtattcttagtagagacagggtttcaccatgtcggccaggctggtctggaactcttgacctcgtgatctgcctgccttggcctcccaaagtgctgggattacaggcgtgagccaccgtgcccggtgtctgtgtattcttaattgtggagaagccagaagtatgagatgggctttaaggtgtttgttacacagttagggaggtaatgttcacattcgaaataagtagcaagtagataggtgtttgcatgatgaagcactgtcagttgtacatctaaaggtcagttactgcattggcctaatgaatggagaattcagtcaaggcttcttgtagtgagacttgagggagctttgaaggatgaatgcgcctactttggattggcagagtttgtaggagaagaaatgccaagaaaggggagaactgtgagtggtcacagaaatagaaaataaaatggtttattttagaaataaatagaataaaatacaattgcatctatatagcaatattcagttttttacaaatacagttttcacttatcactgctttaaattataatcccattacatacaccaaagtttttctaatttaatcagatttatttaatcagaataaaatagaaaataaaatggtacacacccacaggtagagtaagccctttgaactgagtaagccctggagggggcttgaagaaatgtaggtttgctaggaaagagcctggggtcgttcagagataggacgttggtgagcattttgagcagaggaagggggttgaaagtaataaggtggactaactccacactggtgggagactggcaggagttggggctgctgtttcatttgaagaaggttataataggctttcagtagggtggtggtagtgaaaatggagaggaagcatcactggtgattattaataaaatgataatttctgtat

SEQ ID NO: 89586 - DNA, 2013 bp, Homo sapiens
gccccacatttccactatactgatgagacaagcaggttgaaaaggaatcccaagtgactgtggagtgtgtagcacgggctgggttgggggagtgatgaggatgggatgggacaccaaaccacaggtagttctcctgggtaggtttctgacagggctttggtcagctccaggtgttcttcctctttcttgctagatgatgcatgtgtggtatctgacccaagtgtgatttgcctctgagttcagaattgactggaaatcactaagtaggtggattcctgaggctgcaaggggttaaaaatattcattaagttttgctgaaaaaatagaaggtgtgatgtgaagctgcaactgcttataacctttgttttacgcccaagcacaagccagtagagtagtgtggaggaaatgttgccctttaagattgatgactgctcatttccttgctcttcaaaggtctttttctcatttggatacccagctgggaatttcagttgttttagaagtttgactgctaaataagatgtatgtgattttttagctttaatattttaaaatatctttattatgttgtttgtttgttaatgtttgaattggggtaaaaaattcattgcattttggatcacagttctgacttgatttttatggatttactactcagcatcaaaagttacacatctaacattgtgaaaatctgattttttgtttggttaattggcgataattctgtaacaaacattacattgtatattgggaggggttggttttgaaaaggagtatattcattggtgatagattttatagtcataaagcaaataactgtttgcattagagcataatcagataatgaagtggttagtagaaaccaatagactatagattaccaaaattaagatcttgtacaacaaaatataattaacaccgtaacttgaatgtaatttttacgggattgtcttatgaatggtaatgattctaagtggtatgtgaaatgctgttactagcacatgccaattgatagaatgctggaaaaatcacattttacattatattttagataggatttttgtatgcttgagggtgacttggcttatgtttttttttctttccttttagaatatggtttctagttttagggtttctgaactacaagtattactaggctttgctggacggaataaaagtggacgcaagcatgacctcctgatgagggcgctgcatttattgaagagcggctgcagccctgcggttcagattaaaatccgagaattgtatagacgccgatatccacgaactcttgaaggactttctgatttatccacaatcaaatcatcggttttcagtttggatggtggctcatcacctgtagaacctgacttggccgtggctggaatccactcgttgccttccacttcagttacacctcactcaccatcctctcctgttggttctgtgctgcttcaagatactaagcccacatttgagatgcagcagccatctcccccaattcctcctgtccatcctgatgtgcagttaaaaaatctgcccttttatgatgtccttgatgttctcatcaagcccacgagtttaggtaagtgtttgagaattcagtttcttctgaacaagatagtaaatgaaatgagagaccttcaactattgattaatgatgtgctgttaatatagtgaaattgaggcatcaatgccgaatgtttgaatatacggataaaaattcggcaaccatgactgaaatctaatagaagctttatttcatatcatttgatctttcttcttctccaattcttttattgtaaaatacacataatataaaatgtatcatcttgatcattttaaagtgtacagttgagtggtgttaagtatgttggtaatgttgtgcagccatcactgccatccatctccagaactcttttcatcttctgaagctgaaactctgtacccattaaacaatagccttcctctcctcctctcccactagcccctggcagttaccattctacttcc

SEQ ID NO: 89587 - DNA, 3666 bp, Homo sapiens
actaaaatacaaaatttagccaggtgtggtggtgtgtgccagtaatcccaagtatttgggaggctgaggcaaagaatcccagaggcagaggttgcagtgagccaagatggtgccactgcactccagcctgggtgacagagtgagattctctctctcaaaaaaaaaaaattatattgccttggtgtagtagctcacacctgtaattccagcactttgggaggtcaaggtggaaggatcacttggacccagaagtttaagaccaacccggacaacacagggagactctgtctgtatgaaaagtaaaaattaactgggctggcctcccagctactctggaggccgaggtgggaggatcacttgagcctgggaggttgaggctgcagagagccaagatcgtgttgccacactccagcttgggcaataaaacgagatcctgtctcaaaaaaaaaaaacccaaaaattatattgccttgtattatctagaatttttagaatactgtcaaatgacagaacatagtatacattttagaagtcttagctttgtgatttagtgtttcatttttagtatattagctattgctttctgacagataccagttatcatgttaacagaatttctttcttttcttgtttattgagagatttcatcaggaatgaatagaattttatcaaatgcccttctagcatttagccattaatcatatggcttttctactcaaaccaaaaatctgtttgcattttctctatcagttgtcagaataatgatgaatttttcccttaacatcctttaaaggagatcagtgatttttaaagtattattatgaataaaatgaaacattactatatttaatcggtttgaatccaatgcagttattattctttttgatgctcaaattttctcatcttaggctactaggagcccattctggatgttttctttgcccttctgacaaggccccgtgatctttgatagcttctctgttttctggtgcgataaaatgttataggcttatcttgtgcatttcctgccccagacctgcagtcagccatttatttccccaaggagtctgggttccttttatgggaaatagtatttatgccataaccgcttttttacctcaccttcaaacagactaacagtttttgtttaatgaaatctagaatacctttagatttacagaaaacttgggaaggtggtagagtccccacatgcccacacccagtttcccctgttcaagcaaacttttgagttattgaaacactcttaaatttacaatgatagaaaattcttcgtgtccccagtacacagcttcagaagttaatcaactccagtcttttgtcatatatgtccccacctacttcccccaaattatttgaaaggaaactccatatattgtataattttatacataaatactcaatcttatgactgtaaggatagaaataatcttaaccaagcaatttacttaatttatgttaaaccattcttatattggtagattacactgtattgggtgcattgaggacttttatgtctacactcacaggaaacattgatgtgttaatattggtttgtaaattgtgttacacaaagacttcttatggtccatgttgataaatgagaaagaatgtatggtatactaggcccgccatttcataggcttttgcctaaaagtttggttggatagggtggacttctccctgctgaagtttgaaaaccaataatttgcatgttttttgaatttcatgttttgtgttcagcatttttctatatttgtcttctaacacgtatgtattttactccctggcttttattctcttgaacagtttaaggaacagaattccatcctttccttgaaagcttggtggaatttattcatgaagctgtcttgtttgggtagatgtttttggatgtggagggagggcaagacaatatacctcttcttgaatcagatggagtaatttgtatttttctaggaaaccacttttatctgtatttaagttattagaatatatagttgcatgcactattttctttgtttaaagaaatttgtttagttttttttttttcatttataagaccatacgtttgtttactttcccttttgtggatctgacttcactgcattttgctttctaattaattttttttttttttttttttgcttttttctttttatcctgtaatgcttccccagcccttttggtttattttattattacttttttgcttccttaattgactactttattttaaatctctgttgtataataatagaagcatttagggagatgttttccctgaatttggaatgtagcattttttttattgtttctcttaatagttgattttcaatttgatttctttaacctaggagttattgtaatcattatcttgtaagggagaaacccattagtctctcaaataaaagtggatttaattatagggattacatgatttcaccaggaatacaggaccaggaactggggcctccaatgacctttgaaaagagtaagcagtatctttctggcttgccacatagttcctcttatgtatggcattagcttggtcactcttttttgagggattatgttaatctggcagtttttctttattcctacttataaatgaagatgtagatgattattattcttttttgagatggagtctcactctgtcacccaggctggagtgcagtagtgtgatctccgctcaccgcaaccaccacttcccgggttcaagcatttctcctgcctcagcctccctagtagctggaattacaggtgcgagacaccacacccggctaatttttgtatttttagtagagacagggttttgcctttttggcctggctgttcttcaactcctgacctcagatgatccgcccgctttggcctcccgaagtgctggggttacaggtgtgagccaccgtgtccgtcctgaggtagattattttaatattgtagctggagtaggcaatattaataatgcagtttgtcagttgccctcagcagcttctcgtcttctcctgtattatatacatcatagcagatggggaatctacagagttcttattgacctttaccatgatttctaaccttattagcacttccccaaattctaggccgttattgcagcttctgtctcatgttttagaattgaagagcaatctcagggaaatatttttattcactggtgattacatgtaactgtcatgtatacctgtttgatgaggtattttttttttttttttccgagatggagtttccctctcgttgcctaggctggagtgcaatggtatggtctcgactcactgcatcctccgcctcccggtttcaagcgattctcctgcctcatcctcctgagtagctgggattacaggcacctgccaccatgcctggctaatttttttgtatttttagtagagacggggtttcaccgtgttggtcaggctggtctcaaactcctgacctcaagtgatccacccacctcagcctcccaaagtgctgggattacaggtatgagccaccgcgcccagcctaatgaggtattttctacctaatgaggtagcaccttcagcttgccttcatctttgtatgtagtgtttcaattatataatatcccagctttaaaatttttaataattttgtgtttattttcatttg

SEQ ID NO: 89588 - DNA, 1613 bp, Homo sapiens
cctgcctcagcctcccaaatagctgggattaaaaggttggagccactgttccttgcctatattatctttttttttttttaaagatggagtctcactctgtcacctaggctggagtgcagtggcgtgatctctgcttactgcaacctctgcctcctgggtttaagcgattctcctgtctcagcctcccgagtagctgggataacaggctcccacaccacacccagctaattttttattttctgtagagactgtgttttaccatgttggccaggctggtcatgaactcctaacctcaagtgatttgcccgcctcggcctcccaaagtgctgggatttcaggcgtgagccaccatgcccagccaatttttgtatttttagtagagacgatgttggaccatgttgaccagactgatctcaaacttctggcttcaagtgatctgcccacttggcctcccaaaatgcacccttgcaccctactaccaatttatatgccttcattgctcagcattttcattctgtcttatttttatatttttcctgatgctgtcaggatgagatctgtgttttcttaacctcacaaatttgatagttacttcatatagtaaaggtttgtttagttgactacctccctccccacatttgttttctgtgaaaaacgaacatcattctgtgattttaatactcattctgggcccagcatggtggcttatgcacttttagaggccaaggcaggagcatcacttgagcccaggagtttgagaccagcctgcaaaacataatgaaatctcatctttactaaaattaaaaagattagcaggcatggtggtgtgtgcttgtagtcccagttatgctggaggctgaggcaggaagatcacttgagctcaggaggttgaggctgcagtgagcagtgtttgcaccactgcactctgggcagctgagccaagaccctgtctcaaatagcaacaaataactcattcctctagattactctggttcggcagtggtgagctttttgcctttcactttcattgagtgtgttaggcctgcctttgtcttcaggacttttgcatttgctatggaatgccttggaatgcttttcctcaggtatccatagagtgctttcctcctgcttcagttacttattcagttactatttcagtgaggcctttcccctttaaaatggcaaatcctctacttcttcactttttgtgtcccttcctcctttgtttttgttcattttattcatcatgacctgccatattatatgttttatttaattctttattaaggttttggtctgttaagctctccaactcattaaccagtcgttggaatttttttatatttataacttggaaacaattgataccttttcagtgttgagtatttttatctagtaacatgcatgatacagtctgtttaatttattcaaagcttttttttttttttgagatggagtctcactctgtcacccaggctggagagcagtggtgcaatctcggctaactgcaacctccgcctcccagattcaagcaattttcctgcctcagcctcccaagtagctgggattacaggcaccctcccatcacgcccggctaatatttgtatttttag

SEQ ID NO: 89589 - DNA, 1029 bp, Homo sapiens
ttttttcctttcaactcttactgcttttatttccatttcttgtcttattctgctagctagaacttttagtactgtgttgaatgaggggtgatagtaggcatctttgcctcagtcccaatattagagggaaagcaatctttccgccctgagtataatattggcttaattttatttttttggtagacctgtttatcaaattgaggaagctctcctctattcttgtttttgagggtttttaaatcatgaacaggtgttgaatttgtgaaatgcgtttttcgcattgattgatttgatcatatgatttggttttttgtaactgttaatatgatgtattctatagatctcaaaacaaatacagagataagacacagtgaaaatgctgagcagcagtggcatataatgaaccagtcttgcatactggaataaactccacttggtcatggtgcataatgaccatggtgtttaattctttttatatattgctgaattttattgactaatattttgttaagggttttaacgtctatattcatgacgaatattggtttgtagtttaatttttttttggagacagttttgctcttgttgcccaggctggagtgcaatggcatgatcctggctcaccacaacgtccgcctcccaggttcaagcgattctcctgcctcagcctcctgagtagctgggagtacaggcatgtgccatggctaattttgtatttttcttagagatggggttctccatgttggtcaggctggcctcgaactcctgaccgcaggtgatccgcccgccttggcctcccaaagtgctgagattacaggtgtgagccaccgcacccagcctgtagtttaattttttgtgttgtctttgttttgttttggtatcatggtaatattagtttcataaaatgaatttggaaatattctctcatcttctgttttctggaagaaattatattgaattgttgttagttcttccttatttttattttttaatattatttgagacagagtttcgttcttatcacccagg

SEQ ID NO: 89590 - DNA, 4224 bp, Homo sapiens
ccgagggcgcgggggaggggagcgggccggcggagggcacgcgggcggcgcgggggcggcgggcctgggccgcggcgagccggctcctgagtgctgccagtggtccgcacacctggcgcggggggtcggggcgccctccaggaggggcacatggggacccgacatcccggttcgcagtgagggccgatgtgggaagcaacgtttgatcttgcaccttcaccggggtgtacgtgtctgtggctattcacaagtctgcatgctactcacttggtggaggactgttttctgaaagctgaagttgcgtttaggaatctctcctcttcttatggctgatgctaccgtttagtcaggtctgtcacgagaaaaggccccttctcccacccttgcctcctaacatcttcgaggaacctaatgtttggggatccctgccttcaataatcggccttaaacctcgatattttcttagtgttttagtaagaaatctgcaaagtctatgttgtgaggtttgtgcaccccttttactcttgaggaaaaatatttttttcttctcagtcttaaaacaagatcataactttattgttgatacccttgtatagcagaggtctggaatagggctgtgatgggggtagaacagaagagactttttccccccagactgataacctttaaagtcctaactaagtgtgacgaatgagatggatttgtgtgtatcgctgaattactggcgacataaatgagatgtttacggacagaaaccctgattttttttttttttaaatgtatcaaggtagagatgagtgtaaacttgaaattacatttactgcaactcgtttgtgtaacacttatgatattaggatttctttttcaaataaggaagaggaatccggtaaaaggttcagttttgtatatttattgttttccgcaagagatgggatgggggaaggatgttggctggttacctgcttagtggacgtgagcaaaagaacgtatcctctgctctaaacggagattgttggagtttgcacagtgcctgccatattccctcctgctgtttcaaaaataattattaagttcccagtaaacacatattaatacatgttatgccccatactagtttatgcagagaaccataagtgtaggtaaagggtgttcatacttgataagtttaagggttttagtggctcagagccccagctgtagagcttttaacacctgtggagcttttcaaacaacgaaccctgaacctcacctctgtaaattcatgcgttagatttaggatgggttgagaagactgaactctgaagttatatttatttttacctgccatttttaatttttgtgtagtaacagatgtatacaagttttctaagttcttttttttttttttgttaatgaaaactttccaggatttttattagactcttgtgaatgttgttggccaaagcttaatgtaaagcgaagaatttactcgctcttatagagcagagtaaaagcagtcagtgctcagattggagtgcaaccagcaactggaaagtgatagaaaccaaagaagcttttttttctcttcctttctgccttcctctctgttttggtttgtggatcagcttcatcctcttttcctgtaaatcagctgtctttacttcttgcatttttagaagatggcccctctcccacaattcatatgacgtgcccaacagagactaactggggagaattttcagaggagtgaggggtgcaggctgggcacatgcagtaagcatcatctgcttttctttgccttaactgctctgtgcagacccatgttaccctacacttgaagatgaactgtaccccgcccttacatcccattacagacagtaatgatgatgatggtatatacccattttaatatagtggttattccatgcctggttctggtctaagcattttttctatacttatttaattctcacaattttttcaagaaattgaagcacagagaggttaacctgacctaaatcacacagcttgagatttgaaaagctaagatttttaatcttagacatgtagcttttagagtctgggcttttcagagcccgggctacactactttgttctggtaccttggggtctaggtggagcttctagccatcatcctgcgattgctcctaaattaaatgattggtaacatccttcttgtgtgacattataataaaggaagaaaaacagactaaaaaacggaatagaaagaaagaaaaggggaagaaataatcttggattctcaaaatgatggtccttggatcagaatatattgtggtggtcagagtgatgctcaagtaaattataggaccaggaaaaattttgggcattagtttgttggctaacttcttggcagtagagaaattggtcagccgatctggatgccacatatttggctgctgatatgccacagagaggatttccattacccttcaaggctactcattttggacaagtataaccagagcagttcatatcctggctagtgctgcatctatactggagatagggaattttgggaaaggtaatcctcagtgtggtttggtgaccctggtgcctttgcttttcagacttgtgtgtcgggggtggagttgggggggggagggttggttattcgattaggcaactgttaagggggtcgcctgactatttcagttttggagactgctgcgtgagccagtaccagagatcttggctggtcatagcagaatatggcagctctataccttgttgcctttcagtccgggtgaccagaataccagcccacctctcttccagttcttctgggagagagaatctgattggctgagtttaggtctctacttctgttctaatcatccatagccgggggcttagagtcaaagcacacaaacctgatcagcagattatcctgatggattgaaggaaaggaagtggggaagttctctgaaaagggaaaatgtggcctgtgtgctcaaagatggttacaataatgtgttatatattagaagctttcaaggtgccagagaagaaattactcaatttaccagttgcttatttatggcatctgtgttgttaggagctgaaggagtgattagtttgtgaatgaacagattttgaattaactagttgtgaattaatgtgggacaagatcataagatttgatggcctgaacttctgtcactgctgccttgcttcctcctccaaaaatggtctggagggcagggcttggtagctcacacctgtaattccagcgctttgagaggcaagaggatcgcttgaagccaggatttctgggttacagctagctctgatcttgacactgcactccagcctgagcgacagagggagaccctgtctcaaactagtctgtagaagagctaagcacagggatggaggagagcaggagttgagtttctggaatcacttacctcttctttaaccagagcagctttttctttacccttccagttgcatatttccaatattgtggtctgctggtggcagtcattcacaaaaaggtccctgctacactttaacctggttaatctactttccctacttctcatcactcaatggggaggagggggatctattgtagtgactttttttttttttttaaggatctcccttctgtattcttcatccccttcttttcatgcattgagaatttattctgtgtgtgtctcagaatgagagagaatgtgcctgtgagaatctggttgtgcatttggcctgagagagccagcgatgataactttatcaatagatactgggtaaaccagaacatttaccaaactgggtaaatttgttgtgtcataattcgaagatcagatttgggtctttcatgctaagaagcctaagtaattctgtaacagaaggtcttctgtctagaaggcttaagtgtttggtttccttacacctaccaggagtcaccatcctgataacttcaagtgctgttaggatgcagcaggagaatgggaagttaatgggggatttgaggttagaggtcctcatcacgctcctctccccatttattgggcagggatacagactaatagctatgatagatataacagaatcttccatatgattcaaagctattatgggatgcaactaaaatttccaaggcttcacctgagctcatgtctatgaaagcacgttcgaaacaaaatatatttaacttaaagtgaaataggctgggcgcagtggctcaaggctgtaatc

SEQ ID NO: 89591 - DNA, 1167 bp, Homo sapiens
cacgcctgtaatctcagtactttgggaggccgaggcgggcggatcacctgaggtccggagttggagaccagcctgaccaacttggagaaacctcgtttctaccaaaaatacaatcgcagctactcgggaggcggaggtaggagaatcgcttgaacccgggaggcagacattgcggtgagccgagatcgtgccattgcactccagcctgggcaacaagagcaaaactccgtctcaaaaaaacaaaacttgcggggtgcgggggcaggggagtggaaggaagacctggaagtgcagtgcggatgaaacgaggggtagtgggaagaggcggtaggtaggaggctgattaaacagggccttaaaagttacattgttttaaagacctctcgtgtgtgggttccacccaattcttcaaggaaattgaaccctggacaccgtccagcgatttttctggccatcttgactcagcatcttccttcatcctatatcagcacattacgggggggccatcaagcttccttctatctacttactctgccttggcgtttgactccttcctagctatcagatttccccgactttttagcatggcccttctgagcgctcttatttcacttctccccgcccccaaccccaccgcctaactctcccaactctgcagtccgtgaccttcaggtgcccttcaaggtcagaaaaactcggcaaggttggtacttgcaggacattagcaattcaaagaggtgtcacacaacctcaccattagatgggaacaatagcttacccaacacccatatttagattattccgccacaactactctgggggatggttttatttgcggcggctttctccgtccataggcaccgcgtgaagggcaccgtaagaatcttcccgaatgctcctgtcacgcgtcccggccgcctcttcttcctccccgccacttcccgaggccaggcccgcggataacgcctcagttgcgacccagctctaggcagtccgcaggggcctccgccggggagggaaggcacgacctggggccgagcggggccaagccgcggggcagcacgccggggcaggcgcgggcgggcgctgtcgccgcgcggactgaaggcgcgggcggaaggcggtcgcgcgggtgggcagggggcaccgctaggggcggggcttcgg

SEQ ID NO: 89592 - DNA, 2989 bp, Homo sapiens
aactcctaattttaggaaaggtattggacctgttcaaactttgtttcttcatatgcaaaatgggaacagtaataatctctcataatgtggtagggattaaatgagacaaggagtggaaaggactgccttactcaagtttccttgatttagagattgtttgctttttttgtctgtaagagactgaataatcaacaaaacaaagagacttagctctgttagttttaaaaatgaagggggtgtattttactggaaggatagcagggtaacctatgtcattaagccaaggaaacattgagcaacaaggttcagaaagggcagagaccagtgtagcttcaggggcctcaacagctgttcccttcactccaaagtgtcctgccattagtatgactcatcttcaaacttctttagcctacacatcaatcagctcaaacttgcaaggaaaagaatgctgtctctgactaatggatggacttttctctcaatcagtgttgctttcaaatcaaatcaactgtggctagcatgcaagatctcagatatgaataggtctgcagggcctataagaaggaaaacaaagttgacatgcaccccaaaaagtatgtgattccagtgcttggaaatgcctggcacacgatgaatactttatgggttttggctattagtgttgtgactgttgatagaataccctgtaagtttcagcctccatacatttgattctgccatattttaccactgagatgacatcccttctctttttgaatgaaaataaatcattcttttcttttcttttttttttttttaattgtgagatgcagtctcattctgccgctcaggctggagtgcagtggcacaatctcggttcactgcaacctccgcctcccgggttcaacaattctcctgcctcagactcccaaggcactgcaggtgcgtgccaccacactcagctaatttttgtctttttagtagagacggggtttcaccatgttggccaggatggttttgatctcctgaccttgtgatctgcccgcctcggcctcccaaagtgctgggattataggcatgaaccaccatgcctagcctcatttcgtcatttattctgaaaatacttatttcatacttgacgtgagtcaatcaatggggatagaatagagaataaagtccctgccttcactgaacttatatgctagcaaaggactgggggtgcaggaattgatcatacccataatacatgtattaatataatttgaggtagtgatatattccataaagaaaatcaagcagtttgagaggatagataatgatactggaggaaggatagtgacactaagtgaaccagggataaagggagttgaaacaagggactgcggaatgtgataaggcatttgattcttatttttagagtaatgtaaacccattgaaagattttgaataggagggtggtgagatctaatttatatttataaaatattatcatggatgttatatggaatgagagagaaagcaaggagataagatagatggctactgaaagttatccaggtcaaatggtggcagtagcagtggaagtattgaagaacgatcagagttaggatatattttgtgtttattttgttataaaatatcttaagcatacaagtgtagagaataatacattgatatattcaccttccagatctatcaaatcctaacattttgccatatttgcttcagatcctttcttttttaaagaaagaaaactgtgttaagtatagtggaatacccaaaatagcctttacagatcctattcccatcccccagaggtaccagctgtcctggttttgatagtcaccattcacatgtaaggttttgaatttttatcacatatgtatatatccatgaatatatagcatttatgttttttgaaaaacatatataaagagtagataactttttccaacttgaccttttcatttaacattgtttttgagatttgcccatgtttttatatgtagctctagtttattcatttttttcttattctacacaaagcatttttttttaattttttgagacagagtcttgctttgtcacccaggagtgcagtggcacaaacatggctcactgcagcctcaactttccaggctcaagtgatcctcccacctcagcctcccaattagctgggactacaggtgtgcaccaccatgcacagctaatttttgtatgaagggagatctccctatgttgccccagctggtttctaactcctgggctcaagtgatcctcctgcctcggcttctcagagtgctaggattacaggtgcaagtcaccgagcctggcccacatagtattcttttgcaggaatatatcacagtatctactatcatgttgatggacaggttcagttttcattttttcacgattacaaacagtgatgcaataaatatccttgtacatgtctcctagtgcacatgtacatgtatgagagtttctctaggtcagtgcttcctaaactttttcaggtcatagaactcagaaatgataaaatttgtgtgttacattggtaagctggagggaatttagaagcatgtatatatgcagcttggtgaaaaagatcacacaaacattgatacattattattaactaaagcccatactttattcagatttctttagtttgtacctagtgttcttttctgtttcaggatcccagccaggataccatataacatttagctattaaaaaataaaaataaatagaaaataataataataaaaattttaaaaaacaaaaaacatttagctattatgtctccttagtctcctctaggctgtgacagtttctctgactttgtttttgatgacctttatatttttaggagtactggacaggtattttgtagaatgcctctcaattgaaatttgtctatgtttttctcatgaaaaactggggttatgcgatttaggaagatcacagaggtaaagtacattctcatcagaccatatcaagagttca

SEQ ID NO: 89593 - DNA, 1961 bp, Homo sapiens
ggaattaaatgcctaagatctctcgccttagtgatggcaaatcaggatcagaagccaatattctaactaactcccaggtcaatgttttcctgtctttcaacaatctaattttgaccactccccaaatccattcacccaatcaagatccagagtctaataacacctccccgtcaatacctcatttcctcaatcaggaaccgaccctgccgtccctttcatccgacccgttgtcacccccaaacccgcctgtgtctcatttatttttccctccatcacggctgcaagcccagcccgggatttaaccacctcggccgagcgcctctcactgcgtttgcgcttctctagtagcggactctgtcgccatagcaaccggagactcggaatcgtcccgcagcaacagtaggagaggggttcttggtataatcatgttttatatatgcgttccttaccgcttcccgcgcctgatgcgtgaatttcagggtctggtaggaaagctccatcagacactgtgctaggaccctagagaagggagaaaagtagtcagttactgggctgaccggtcgatccaaggaacctgacgcttaaccagcccgcccctttccggattggctagagcccagacacgcccgccaatcgctggccacagaaggattctttaacatgccaatcaatgttagaccatgcatgtttaatccagagtgtttgcatgacactggccaatgaagagatcgaagagggaagattgttagagcacagggcgggctttgcaattgttttggttttcttaattcgtttctaaaatacaagctgacccagggccatgtaccataatatttgtccttgatttcagccgttgttcaggtctttgcgacccaatgcttctatacccaagactatattttgacgtcccgtcttctcctccctggattagggtaaaggtttggaaatctattctgcttttctttgaaattctctgtgcatggtctatctagactggacgaatctgctgtggacactttggttgtcaagagccttctgggatgcaaactgtgcatcaccaaacttccccttctcctccaattcctttcacatcagacctgttctcattagacgtggaaaaacatggacgtgttttcctctgctctatttttttcatgtgttaactagtctgtttcttcaatgtctttcccttctgtctctcttgctgtgaatcctattccaaattatcccttcatcattatcttcggtcttcttcatccatttcttcttcatccatttctcccttcaggatacaaaaatattcaagtttcctcaatctacaaaaaaaaaaaagttctcgtaagtgttgaactgaatcacctttctcccattcagggcaagctttctgaaaggactagctatcctcttcctcatttcctcaccttccacccatttctcaacacattctggtcctgctcctttgaagcagttctttccagagtcgtcaataacttcctaattgggaaatccgattacagattatttaatattctttatcttattccaacttggcaccatgtgaaattgttgaccactttctaattaataatcataactgtaatttattaaacatctacagcaccaacgtactatgcgatttacttggctatctaatataatcctaacacaacatggagaagttattaatgccccaatttgcagttatgcaaacaggcccaaaaagccaaattattaataagtagttctagatagagttaggatgcaaacctgtttcctgactgaagccagtgctcttttcactatgccttgcttccacccttcctgtccagtctcacctctaattcccacctggatacaggcaaccccactctaacacaagcgaactgcttacaatgcttgtgaatgactaatgagtagtttatttggcttggagaaccactctcacccctgctgcataagaa

SEQ ID NO: 89594 - DNA, 1961 bp, Homo sapiens; identical to SEQ ID NO: 89593

SEQ ID NO: 89595 - DNA, 1961 bp, Homo sapiens; identical to SEQ ID NO: 89593

SEQ ID NO: 89596 - DNA, 1961 bp, Homo sapiens; identical to SEQ ID NO: 89593

SEQ ID NO: 89597 - DNA, 1719 bp, Homo sapiens
cggccaacatggagaaactccgtctctactaaaaatacaaaattagccgggtgtggtggtgggcgcctgtagccccagctactcaggaggctgaggcaggagagtcgcttgaacccaggaggtggaggttgtggtgagccgagatcacaccattgcactctagcctgggcatcaagagtgaaactctgtctcaaaaaaagaaaaagagtataaacatgttattttgaagaagctgctacaagtcgaagcagttgcttctggggagcagtaattaagtaagggccagttgaggtgaagcaggagattcgttttttttcaaattttgttgaactattataattttaagtgatgtgctgccattactttgttaaaaattaaaaactgaaaatatatttgtaaataaataatttgaaacaacaaaaataaaccaaatacaaagaaaatattctgaaaatcccaatacagtagatgatgtaggtaatcagaatgtcttgtggacgtgcagtcctctttatatctaacacactggatcacatcccctcctccagcttctccagacccctactcagcacaattccttgcacatagaccccaagagatcaaaccatcagtgagcatacctaaatattgctcttagcgccatctagggactaaaacaaaaaataaggcttgagttcctgccttgctttcaagttccaagaaatttatattatctgttacatgcaagcaacagataacaatataattaatccaattaaatactaaatttatggcataaatgctatggagttgtcagacgttagattagggagaatgtggctggagcactgagaggcaacacagaaaatggagaggaaaagcatggaggcagaggttgggctttattgcagtgctttgtaggtcttgtcaagatttggagggtttatcccaagtgtaatggaaaggcattaaaaggatcccattaaaagagtggcactattttaagaaaatcaccctgatcattggatgaaggttggactgaagagaggcaaaaaccaaggggtaatagctaagatgctattaatgtggttccagtgacagggcatggaggtttagatcaggaggtggatgtgaatatatggattattaaagatacaatatagaagtagaatcaataagatttgctgatgtcttcctcttgtagaggacagaggagagggactaggagaaagaaggagctaaggataacccccagaattacgatttgagcaatcggatgaatggtggtttcactggggtggcttcccctatggggaaagactgggaaaggtacaggttttagagaggacattcaaaagttaagcattaagccagacacgaaggctcacgcttgtaatccgaggactttgggaggccaaggcaggctgatcacttgagcccaggagtttgagaccagcccaggcaacatggtgaaactctacaaaaaatacaaaatttaaccacgtgtgatggtacatgcctgtggttccagctacttgggaggttgaggtgggggaatcacctgagcctgggagacggaggttgcagtgagctgagatcacaccactgcattccagcctgggtgacagaataagaccctgttgaagaaaagaagaaggagaaggagaaaaggaaaaggagaaggaggagaagtagttaggcattaaacaagttaagatgcaaggcacagtggctcatgcc

SEQ ID NO: 89598 - DNA, 1719 bp, Homo sapiens; identical to SEQ ID NO: 89597

SEQ ID NO: 89599 - DNA, 1719 bp, Homo sapiens; identical to SEQ ID NO: 89597

SEQ ID NO: 89600 - DNA, 1719 bp, Homo sapiens; identical to SEQ ID NO: 89597

SEQ ID NO: 89601 - DNA, 1026 bp, Homo sapiens
ttttaggagcccatgcgattaataaaaactaaggcattttaacaacactcattttaaaaactagtcaatgaccttattaattagctaacacagtcgatattttgtaatataaaaggttcaccaaggcagagtagtaacttttgaaaagtacgtataatgacacatgagaataaacaaacatgactttgttttaggattcttttgtgcatacacatgaatgtgtggatcaattccagttttccaaaaaccattatcgtgcattgactctaattatttttttgtttgtttttaattgtgcagccaaattaaaaacaatgacataattctttggccttagagcattatagaggattcttacattcaggttaagaaaaagaaagtggcagaggtatacagattacgtatagtcttatttgtattaaacactaaatttaaaacggagttggagaaaaatctctatttcatatctttgctaccagaagatcaccagcagcatcagaaataaaacatagaagcttgtgatacaaatctgtgttagtcacagctctccagacaggcagaacaaattatacaaacatgcatacacacgcacacgcatgcacatgtgtatgtataaatatatgtgtgtatttttttactagatttattatttactagattattttgtactagattatttattatttactagatttattatagggaatttataattataaggatttattattataacgctcatgtgattatagaagctgacaggtcccaagatctgcagtcaacaagctggagaaccagaagagccaatgatatagtttcagtccaagtctgaaggcccccgaaccaggagagtagatggtgtggttctaatctaaaagcagccagactcaagactcaggaaaagccaatatttcagtttgagtccaaatgcagaaaaaaaaaacaaaacgctgtcccagtttaaagacagtcagaaagtaggaattccctcttacatgtgggagggtcagtcttttattctactca

SEQ ID NO: 89602 - DNA, 1026 bp, Homo sapiens; identical to SEQ ID NO: 89601

SEQ ID NO: 89603 - DNA, 1026 bp, Homo sapiens; identical to SEQ ID NO: 89601

SEQ ID NO: 89604 - DNA, 1026 bp, Homo sapiens; identical to SEQ ID NO: 89601

SEQ ID NO: 89605 - DNA, 1318 bp, Homo sapiens
tagtttttaagacgtgaggaaagggagaaagcgaaaagttaaaaggaaacaaaagtaagataaatagccagatggcctggagccaccacctggtccttgtagttaaagaaaaaaattaaaaaatctacccctgacctaaactacttgtgttatctgtaaattccagacattgtatgaggaagcattgcaaaactttctgttgtattagctaatgcatgtagcccttagttatgtcccccatgtttgcttgatctatcatgaccctttaacgtggtccccttagtgttgtaagcccttaaaagggccaataatttcttttttagggagctcagttcttaagacgcaagtctgctgacactcccagccaaataaagccacttccttctttaacccggtgtctgaggggttttgtccgcgtctcgtccctctacagtttagttacttgcaaatcagtttcttcatatcagagcttgttgttaagctttgttaggtaagggatatctaaagtagcctttattctaggctgtgcctggctttgcttactcttatgcatagccttacttggagctctactaaatgctcttctgtcccacaagatttctccacttaagtcagtcataatgcaaatgtctctaaatgttatgagagcagcttcatatgtttttcctctatgtatgtgcagctcagtattcagccaaaaatcaataattgtggagctctttttttgcatagctcctcctctctgaaactcttccctcccagttctaagcaactcagtcttcccaaactccaatctctatcgcttcatcttagcaaaactgctgttcattttttttttttttgaagtttcgctcttgggttgcccaggctggagtgcaatggagcaatctcggttcactataacctccacccaccccagttcaagcaattagcctcccgagtagctggcattacaggcgcccaccaccatgcccagctaattttttatatttttagtagagatgaggtttcaccatgttggtgagattagtctcaaatgcctgaccttcaggtgatccacctacctgggcctcccaaagtgctgggattataggcatgagccacagtgcccagccgcttttttggggttctccttccagaaccagaatctagttattgcttccaaatagaaggccttctctcataattacgttgtccaaaaatcacataatccaatgcttgaaaagagtttactcatatgtttagtccagttttccagtttcttacaggagacctggtctggtgccaattatgccatctcagttgaaagtagaaggtc

SEQ ID NO: 89606 - DNA, 1318 bp, Homo sapiens; identical to SEQ ID NO: 89605

SEQ ID NO: 89607 - DNA, 1318 bp, Homo sapiens; identical to SEQ ID NO: 89605

SEQ ID NO: 89608 - DNA, 1318 bp, Homo sapiens; identical to SEQ ID NO: 89605

SEQ ID NO: 89609 - DNA, 1137 bp, Homo sapiens
gagacttgttaatgtgaattacttcaatgatggcaaatttgggttgaatttgggttttatcattttgccaaatgttacctaaaatgaatacctgtgaataaagaggtaaccaagtttgggcagatacccattttaggctgcaaatgagtaaagacaaatcacaagatgtttcttggttgatttacttatttgacttttaagcacttccaaaaacatccttaacaacggtgacatcaccagaataagtatgtaactttcaaaggcaactgctttgaaagataatagttaaatatacttaacaaatatggggctctttataggcaaacctcctatgcacatactagttttcatctaatgtgctatatataggcttactttttgtattgcatccctttagacttgtaatgcctgttagccattattcttttcacctcagttaatttcttctttttattctgtgaaactgccaggtatatcgatacagcaaatgctttggagcaagaaactaaactggggttacgacggtttgaagtttgtgacaacattgatcttgaaactattttgatggaatatgagagttattattttgtaaaatttcagaaataccccaaaattgtcaaaaagtcatcagacacaggtacatgcctattttctagagataaggctttgtctcatctgtaagattagtgtttctttctcatcttattcccagatagatggagaccctcaccctgcaccaaaggagtaggccaggaggattgtgtagccattctcatatccagcacagacaactgaaatatgattacctggacactgatatccctttaggcactttggcatttgtttgagaaaatgtgttttcaggcaatgaaagcaaaaccccagtgtatcataggtacttttcagatgattagcattactttaatttccttagagatgaaaagaactgttggaagaggataaatgacagaagactttttttgtttttaggagacctattatctgtcttgaaaataactacaaaaatgagtattggggaagctaatagctcatgtatagataatgaaaagcttttgaaagccatcaatccagataatgatcaatataatataaaaacccagtataggttagcagtca

SEQ ID NO: 89610 - DNA, 1052 bp, Homo sapiens
ctatatggcactgggatctgctcagcttctggtgaggcctcaggaagcttttactcatggcggaaggcaaggggacctggcatgtcacatggcaagagagggaacaagaagggagggagatgacctgctcttataaacaaccaggtccctcgtgaactaatagagtgagaactcactcattacagtggtgagagcaccaagcctttcatgagagttcctccccaatgacccaaacacctcccaccaggcccacctccaacactggggatcacatttcaatatgagatttggagggggcacacatccttactacatcagaatccaagctttaggacaccctccctgcaaatttagtaggtatgttgttcttgagggcataggcttcagagtcagcctgtctagattcaaaacctggctcagatgctcccccactatgtaactttgggcaagttggttaagttgttttataatttctccaagcctcatttctctcatctgtaaagtggaaataatcatagcgtcccctttaagtctcatgatgaaaggagagccttggtgcagtgctagcacatagtaaacactccataaatgttaactattattattatttttttttttggtgcatccttgctttttccttcctacctctaggggggacagggtgatattggaaggatcatgggttgggagagagattaagtgggtttaaatcctggccttaagccatttattagctgtgtggccctgggcaaattacttaacctctctggacttactcccacatctatgaagccaggatgtcactcctgactaacagaagtgttataagaattagaagtaggctgggtatgctggttcgcacctgtaatcccagccctttgggaggctaaggtgggagtataactcgagctcaggagttgggagaccagcctgggcaacataaagagaccccacttctgcaaaaaaaatttttttaattagccaaaagtagtggcgcacatatgtagtcccagctctttgggaggctgaagtgggaggatcccttgagccca

SEQ ID NO: 89611 - DNA, 1050 bp, Homo sapiens
tgccaacagggttgtactcgcttacagtcccatcaatggttcatgagtgtgtttgcttctccacaccctggccaacacaccaatatattttttaaaataaacatttgtcaatctaataccaaaaagtaatagtgtatttcagtgattaaacatgcatttcaatatttcagtgctcgaatatgtatttctttgattctgaatgaacttgagcaacttttgaaaggtttagaaaatatttatatccttttgtgatgtgcatttttattttggatattttaaaaaataattcaagaagaaacagataacctctgctaacctcgaaggaactcgtctcatttcctttcagaaattacatcattttctctttattttctgagcttttgggaagatcctcaactggacaatcttggtcatgctgtcaggctccttactgtgaagctttcaaagaaagcaaacccttcaggaccttcccctaaagcagagaagctttttctaccatttgtttctctttctattccaattaaagagttatttatagggaaccattgggttgtgttcctccctcccctactaatgtctgtgcctcttaggagctgatcgctactgaatagttgagtggtctctttagcaaatgcatacatctgttgatgcttacatctttcaatgcaccgccccccagttgtatgatttaacttcctccaggttcctctgaaaattttagactaatgcttccagaaacacttacccatgattctgtatattccctatgagtggaaagagcaatgcagaggacagtatgaatgcctagactccaggcgtggttctccttccaactgggtgtttggtctagcagaggctcttggtctctctttgcctttagtgagcaccttaaaaacatgtacgggttttatattctaatatttcattcctcattgggtagattgccactgtcgtaatcacccttaatatcaggtatatttgggcttctttgtgtatgtgtgtgacaaggacggaaagttatttgccctgaattaggtggtctccattgta

SEQ ID NO: 89612 - DNA, 1035 bp, Homo sapiens
gctgtagttctaatattgagttcaactgtgaaatccatcagatgtgccaaatggagaagacagaaagcaacaaagtgaattgttctttagcccaagtggtacagtgaatttgctttaacagatgttgaaaactaaattttctactgtattcccagcacgggtgacttctttttctcttcattagccagagatgactaatttaaatttagaaccagattttaatttaaattaatatttccattaataacctattcattgcagatacctattatactgtgtaacagttgttttggaaattttatgtaaaattaaaactatcagtattttacagatgttttaattagacattgttattaacaggaacagtgcagaaactagaatcaagccttataatatcttatagaccatgcatttttgaagttagtgtccactagggtcctattaactgtacatttgcaagatttcattatttttgcctctgacactatgggaaaaattttttagaagctattgggacagattcaagcttttatgcacttggttactacagctgtaaaatgaaatctcgtcttgtagcatggattattcttctcatgttaaacccaccaaaataaaggggactaaataggtaatgattttcctagtgcatttgcatactgtgataatcctgggccttgcaatagttctacagggctcttgggcattgaattattaggatgtaattgtacatcattgtagtgttcaccttattgaagctcactctgatgttaatgagcttcgggttttgatgcttgtttagagatcagcagtcttggatgggagggaacaaagctaaataaatgttagtttggtgagcactgtgtttttgtttttgcaaatgcctcatcttagtacttctatatcccagagtgcaaaagacagatgtgatatgactaccaccccaaatcagaaggatgagcggagtggctaagagtatactctggatcctggtaacacaaaattagctctctggccttgggcaagtcacctcacctc

SEQ ID NO: 89613 - DNA, 1174 bp, Homo sapiens
ttaaaagtttccccaagtaatgtagacagtgattctcagctacagcatttttatattaatgattgtgatggattttataaattctgaattgagctaattataataattatatagcttgacagtatgctttggtttttagttgtgacttgagaagtattttgtatgatattttaaaaaaaggagaaaaaaacagttacaaagatcatcttcactaaattaaatgccatggaataatttagattgtagtttgttttataaaatcagtgtaaatgtagtgaaatgagggtgttgctgctatcaaaagttaaaaagaaaacaaatatttaactcattattgttttaacttttcttaaaagtcatatgactttctactttgtctttaacaaggtctcaaactaatcttttagaagatgacagggaggaaggcaagtgtgtaataacttttaacacagctaatctttacattatacagttggctggggaacagaccagggaattggtggatttggagaagagccgggaattaaatcacagctaatgaaccttattcgatctgtaagaaccgtgatgagaggtaagaagaaaagctaatagagcattcttaagttttaatgttgtggtttaagtagcaaggcttctgagtgtgaataccatatatgccatttgtagtgggaattttttttctctttaacatggctttgctgcttgaaagttactgggttttttttttttttttcttagtttgcttcttacttctatctaagccagttggtacaaatagaatgcttagtataatacatataatctgtttgtgtgttacctgtcagagctaaaagacaaaattatattcttgccttttggaaactgttgtttccaagttgtaaaatcacatacagtattgggaggtttccaagagaaagctgggcgtgttggtttactcctgtaatcccaacactttgagaggccaaggcaggcagatcacctgaggtcaggagtttgagaccagcctggccaacatgggtgaaaccccgtctctactaaaaatacaaaattagccagtggtgcatacctgtaatcctagctatttgggaggctgaggcaggaggatggcttgaacccgggaggtggagggtgcagtgagctgggattgtgccacgccactgcactccagcat

SEQ ID NO: 89614 - DNA, 1049 bp, Homo sapiens
agacttttagcctccaaaattatgaaaaaatttctgttaagccacccagtttgtgctgctttgttatggcagccctaggaattttatgtggatcaaaagatattttaaaagtagaggctgggcatggtggctcatgcctagcactttaggaggccaaggtgggcagatcacttgaggtcatgagtttgagaccactctggacaacatggtgaaacctgtctctactaaaaatacagaaattagcagggtgtggtggtgggcgcctgtaatcccagctactctggaggcttaggcaggagagtcacttgcctgggaagcagaggttgcattgagctgagatcacgccactgcactccaacctgggtgacagagcaagactatgtctcgaaggaagaaaaaaaaggtataaaaggcagaatttactcttggactttgggaataagagtggatgaagtcaaagatctcttggccctctgggttaagccactgagtgaagggtaatacctttactgagttaaacagtattggaggaaaatttggggtgatggtgctaggtaagaaggtgaagatataatgaaataaattttagtcatgctcagtttgagatttctatgagatacgcaagtggagatgtaaaatagccagttgcatttaaatccatagaacagcagcacgaattagggcggagattgaaatttgagtttgtcaagcatagataataaatgaagtcatgtgagaagatgaaattatgaaagaaaacagtagagtacaaaaagaattggtgccccagacagccctagaatctcctctagtatttattgtttaggtagagatggaagaactgacaggagaacttgacaagtgagcaaaacagagagatggaaaaacctagacagtgggatttcaccagagtcaggaagtgtttgaagagatactacaacagtgggatgttactgagtagcttagtacagtagtcccccctcatctgtggtttgtctttccacacttttcagttgtagcctgccatctgaaagtactaattggaaaat

SEQ ID NO: 89615 - DNA, 1415 bp, Homo sapiens
ggaatcacgaggtcaggagattgagaccatcctggctaacacggtgaaaccccgtctctactaaaaatacaaaaaattagccgggcgtggtggcgggcacctgtagtcccagctacttgggaggctgaggcaggagaatggcgtgaacccgggagtcggagcttgcagtgagccgagatcgtgccactgcactccagtttgggcgacagggccagactccatctcaaaaaaaaaaaaattattgggatattcttcatccttgttccagttccaagtgtgtgaaatccggtgtgtattttgcacctgcagcactggccacatcagagcattgattgcacatcaccggtctagacaagcggcaggacttgcagtcttcagcgaggggcggttcttagccagatggaggcggggcttcccggagagttcgttttgggccccatcggcttccgtaggaaggcgccggccgtggaggcgccacgtcccttgcggcggcgggagagaaatcgcttggacttcggggcggcctcggacggccatggcctttaccctgtactcactgctgcaggcagccctgctctgcgtcaacgccatcgcagtgctgcacgaggagcgattcctcaagaacagtgagtgggaccgcggggcgcgggctggggcggcggcggagtccccgggggcgcgtaacctaatggggccgcgtgaggggacaccaagggccgggacagaagaacagcggaaggctcggcttggagtggaagccgagcctttcctctcatcaggtttgggctcaacagccgggagaatattcaacagacacccgctgtgcagggcccagggggttggggtggagggatatagaagtcagtcagggacgcctctgcttgcgattacttcaggtcagtaatttaattcagttttctgtgactacttttttttttgagggggagtctcgctcttttgcccaggctgaagtgcagtgtcgcggtcctgtgactacttttaatagtcgaaaacccggggtctgagtttcgggctaagagttgggggtgtggggccgggcgcggtggctcccgcctgtaatcccagcactttggcaggccgaggccggcggatcatgatgtcaggagtttgggaccagcctggccaacatggtaaaaccccgtctctactaaaaatacaaagattagccggacgtggtggtggaaatacaaaaattagccgggcgggaggctgaggcaggagaatcacttaaacctgggaggcagaggttgcagtgagccgagattgcgccattgcactccagcctgggcaatagagtgagactccgtctaacaaaacaaaacaaacaaaacaaaacgagttgggtgtggaggggaaggaggcgtgacccattttggagcatcagtagttcacta

SEQ ID NO: 89616 - DNA, 1032 bp, Homo sapiens
tgagcctctccagttcccatttcctcagcacatcttcgatgacttcaaatgaatgatttctctatttcatctggccctgctagtgtttcttggcagggagactggtgtgccttaagctactgtatcccaccaggaagcagaaaactcttttccatctttgtttttgaaggatatagtcattgtaggaattttgtgttggcagttgttttctttgaggactttgaatctatcattctctatcttctggcttccattatttctgtcgagaagttggctataagtcttactgctgctctttgaaggtaatatttcttcttttctcttgctgctttaaagattttctgcgctctggtattccagttacagtgaagttaattttgtcaccatgtcccaaggggctcctgcatgcttctctgtattttccatccttctgtctttctatgctatcttctgacctataaccaggctcttgggccttcgcctgctcaggtcctcatgaccctcagttggatcactgctcagcccttcctcctgtctccctgcttcaaagcctgcttccctctaatcctttcccccatcctctaggcctaaagagctttctaacaccaaatctgaccatgccattcctctgcttaaagtatggagcaattccccatttcccatgagtaagtaaattcccagcttcttaatatgtgacttaggacactacttagctttggactgatctgtcattattttctgcctttaacgttaggctctaaaaattcttgatgggattataattctctcatgtccatgcacacacaaacatgcactccccaagttgttcccctcccacaagcctctgttcatgctgctccttctgtctggggagctcttctatccccttttgtctgactaagccacatatatttccaccacatctcagtcatcttcacctccagggagacttcccatcttgtctctgctccccacctccctcctgtttgctcccataatgacttttgcatatgtctattatcacacagactc

SEQ ID NO: 89617 - DNA, 1037 bp, Homo sapiens
cattaagagaaggggactgagtggcttgtgggggaaatgggggatggaggaaggtcctggtgtgtttctctgtggatgctctgctctggccccagattttcagaccccactcaggtgcagagtcccagcagtaaccagccccaccagcctacagtcagctttgagatctgctgttgcttctctaggttggcctcctgtggctcccagccctctctaagcatgcctctcctaaaaaacttgttctcatctctttcatgtcagtgatattttagtgacctgtgacctagtggtttgtctcctgcagatgcctggctgttgaccccaccctggaatccttggtctctgttatctcacatgctctaggcttttcctaaacttttgggactgccattgccatgttccttggtgagtctctctccttctatccggtccttaactgttggggaattctccgtatttgaccacctgctcttctcatgctatgactctccagggatctcagccactcccatgtgtcaactcacacagtgtactgatgataccccatatgactatctccagcccagacctctgctcagactcagttgtccaactttctgcctgcaatcttcaccagatgtcttggattcttcaaactctatgcatacaaccgtattccccaacctgctcttcctcttgatgtctctccagctagccagagggtgggggctcctccctcagctccactgctcccatcaagctttcatcaagtttttcttactccatagctaagtaatggtgatagctgacatatattgggcacttggtgtacatcaagtacttctctaagctccctgaagacttcgactcccataatctggacaacacccttacaaagtagggaacgttagtagcatccccatttcgcagacaagaaagctgaggcctggagccacataggtaggaaatagcagaaccaggacatgaaccaggtgctctggtttcagagtgtatgtggttatttgccaccctctcacctgtccaataatctctccaac

SEQ ID NO: 89618 - DNA, 1069 bp, Homo sapiens
catctggccgggtggggagtgccagctggcaacagggtccaccgaggcactgactccctgccctggggctctcagcaagtccagccagccagcctctgttttcccaagtgtaaaatgggtgtcaggccatttgcttctgtgggagggcctggagggctgtaattatgggagggtgtgtgaagtcctgggagccctcgatggggttttgcaaggaagctgcagacagccatgggtcatgactggttgggagagttatgaaattcctttagtaaaaagaactatgtggggagtgggcgggaggggttgatggcgactcaggaagaaagtgtctggcgcccttgggaagacatcttagcacaccccaaagccctctctcacaattcaatcaagttgttccttctgttcataccaaaagggcctttttaaaatacaattaggctctgttttattatgtgtgacagacgaggccattaaccattccgactattaaatcagacttcattaaaaaaaatggaagtaactgtaaattgccttgggtcacgatcgtttagagccgagacatttcaaagaaaaacattagggagctcacgaccatgatgaagttaatcaatttgacatcccacggagggccgggtgtgcctgcaccagaagagcggcttcacagcctctccccagagcctgctcctggggagcaggggtgtctctgcctctcctctctccaaaggagagctgggaaggctgtgaaaataacttggaaatttgggggaaagggaatttcttgtctctcagtgaggtgttattggtttgcttttctgaaaaactatctaaatttatcaaatgtgataccaagtcatacataatacattttcatgtttttgcaccaaaaagtgactttagagctgtaaggagcagtgctatataagtataatgtatcttccctagccctctaagtggggtggggtggggtggggtggcttccacggacttcctcatttctggacaggttgtgcccttaccaggcatctacttcttggcaggagtcctgagggagagaaccctgcgctggggt

SEQ ID NO: 89619 - DNA, 1068 bp, Homo sapiens
tttacatagtgattggctggagagaggtattgagcataaatttttttttaagattcaactgggaaatggatgatttacatgattttagtctctttagttgtctgggtatttcttgactgggaatagcaatatcttaaaggccatttttaacaagaatgctaaggatggaacacttgaaggaagcagtcctgtacagtcaaatacttcagttaccttggataatagaatgaaaactcaattgcctactttgaacaaattttttttttggattttaatggctggacagaataacattctgctaattttaatccttggtcatttccgatgtaatggaaaatgcagtttgactcagaatcggaggcctggggtttggaccctgattgtgccaatttatgtgactttagataaatcttttcatcagtctaccttaaagttcttcatttcctccagttccctaaaatgaggaagttagtttttagggtggttatgagaactaaatgagagcacttgagagatcattcagcctgaagtgggtactcagtattagatggctaaatctgcacagtctagaataccaggcaaaggttactctgaaggtctttgctaataacaaatctttctctaagaaagtttgtaaatgtgatgttaaactcagaaatgtcacatagaacatattggagcaattattgccgcaaaagtaactcgtagcaaccacaaaaacccagtggtgtgcagcaataaacagtttatgaattagataagtgatttcggctagatgtctctggagcagttgtagtctttcctcgttcatgagggagttggcctcacctggaaggacttggcatttttccacatgcctcctatcctccattaaacaagcatgtttttgtggaggttgtagaaggcaacaacagccaagcccaatcccataactccctttcatgtctgcatgcttcatgctaactagcattcaccagaaacaagccacatggctaaacccagtgtggaaaggcactacagagttattagaccaagggagagaacataggaggggtgaagaattggagc

SEQ ID NO: 89620 - DNA, 1099 bp, Homo sapiens
tttccgtgaatgttgtgttaaaatgattaaatgcatcagccaatggcaagtgaaggaattgggtgtcctgatgcagactgagcagtttctctcaattgtagcctcatactcataaggtgcttaccagctagaacattgagcacgtgaggtgagattttttttctctgatggcattaactttgtaatgcaatatgatggatgcagaccctgttcttgtttccctctggaagtccttagtggctgcatccttggtgcactgtgatggagatattaaatgtgttctttgtgagctttcgttctatgattgtcaaaagtacgatgtggttccttttttatttttattaaacaatgagctgaggctttattacagctggttttcaagttaaaattgttgaatactgatgtctttctcccacctacaccaaatattttagtctatttaaagtacaaaaaaagttctgcttaagaaaacattgcttacatgtcctgtgatttctggtcaatttttatatatatttgtgtgcatcatctgtatgtgctttcactttttaccttgtttgctcttacctgtgttaacagccctgtcaccgttgaaaggtggacagttttcctagcattaaaagaaagccatttgagttgtttaccatgttactatgggactaatttttaattgttttaatttttatttaaactgatctttttttatatgggattacattttggtgttcactccctaaattatatggaaaccaaaaaaagtgattgtatttcacatatggacatatgattttaagagtacatgtttttgtttttttaatttggtgttacataaaagattatcctatccccccgggagataaatttatactacttaatataaccccacaacaggcgcacaccacacactgcacagtgctatttatacatttttatttatttcagagtttgcctatgctacattagcgctctaatacataagatctatgctgtaaacaaaaacatcttcaaagttgaaatttgctgaaatatacttttaacaaaataacatttttaaggctccattgaaaaatactagataagatataatctcatataatca

SEQ ID NO: 89621 - DNA, 2363 bp, Homo sapiens
aatgttttccctacgataccagatttccatcttggggcatattggattgttgtatttaagacagtcagaataatgatagtgtgtggtctccagaggtagtcagaatcctgctattgagttctttttatatcttccttttcaattttttattaccattttgtttgtttagactacactttgtagggattgaggggcaaattatctcttggagtggaattcctgtgttttgagccttacaaccaggaaatatgagctatactagatagcctcatgatagcatttacgataagaacttatctcgtgtgttcatgtaattttttgagtaggaactgttttatcttgaatattgtagctaactatatatagcagaactgcctcagtctttttaagaaggaaataaataatatatgtgtatgaatttatatatacatatacactcatagacaaacttaacagttggggtcattctaacagttaaaacaattgttccattgtttaaatctcagatcctggtaaaatgttcttaatttgtctgtgtacattttcctttcatggacagaccattggagtacattaattttcttaatctgccatttggcagttcatttaatataccattttttggcaacttggtaactaagaatcacagccaaaatttgttaacatcaaagaaagctctgccatataccccgttactaaattattatacatccagcagattctgggatgtactaacttagggttaactttgttgttgttgataatactagattgctccctctttaattcttcttctggtgcaaggttgctgcttaagttaccctgggaaatactactacaaggtcaaattttctagtatcttacagcctgattgaaggtgattcagatctttgctcaatataaatggattttccaagattctctgggccatccttgacccacaggtgatctcgctggagtatattaacttaacttcagtgccagttggtttggtgccatgagatccataatgaatccagaacttcaccattgcttagatataagagtcccttggaagaataatgccactgatgatgggggtcagaaggtgtattaactcaacatagagggcttttagatttttcttcaaaaaaatttcgagaaaagtattcttttaccctccaaacagttaacagctcttagtttctccaaatatgctctttgatttacttatttttaattaaagatggtaatttattgaacaatgaaatccgtaatatattgatttaaggacaaaagtgaagttttagaattataaaagtacttaaatattatatattttccatttcataattgttttcctttctctgtggctttaaagtttttgactattttacaatgttaatcactaggtaacttgccatatttctggttctatattaagttctatcctttataatgctgttattataaagctggtttttagcatttgtctgtagcaatagaaattttactaagtctctgttctcccagtaagttttttcttttctcagtaagtccctaagaaaacatttgtttgccactcttactattcccaatcttggattgttcgagctgaaaaaaaatttgatgagaaacaggaggatccttttctggtgaatataggttcctgctttaagaatgtggaaatccattgctttatataactaatatacacacagattaattaaaattgtgagaaataattcacacatgacaagtaggtaacatgcatgagttttgaatttttttaaaaacccaactgtttgacaaaatatagaacccaaattggtactttcttagaccagtgtaacctcacacctcagttttgcttttccaaccctgacttgaaaggcatatttgtatctttttattagtgatagtgaagctgtgacactaaccttttatacaaaagagtaaagaaagaaaaactacagcgattaagatgagaacagttctgcagttgttgaactagatcacagcattgtaggcagaataaaaaatgttcatatctgagaatattcctttcgccatcttttcccaaggccagacctcctggtggagcacagttaaaagtaacattctgggcctttgtaatcggagggctgtgtctccagctggcagcctttgttttaatatataatgcaggactgtggaaaacagttggcatagaatattttcacctaaaaaagaaagaaaagacatacaaaactggattaattgcaaaaagagaatacagtaaaataccatataactggacaaagctagaagaacctttagaagatttgtctgaaaacagatttcaagagtgagcttttatacactgctcactaatttgcttgatt

SEQ ID NO: 89622 - DNA, 1857 bp, Homo sapiens
gtttaaacatttcttcttgtttgcatcttagtagaaatggaaaataaccactcctggtcgtcttttcataaattttcatatttttgaagctgtctttggtacttgttctttgaaatcatatccacctgtctctataggtatcattttcaatactttcaacatttggtggttttctattgggtactccccattttcctatatttgtgtgtatatgtatgtgttcatgtaaatttggtatagtaattttttattcattcaacaaatatttattgttcacctgtttgtaccaggaacttttcttagtctttgggtaaaggtgaacaagacaactacagttcctgcctttgctgagacagcagttacactaacccttaattatcttacttgtctatgaaggagataaacagggtactgtactggagaataacagatgggatgcttcaggtaggacatcaaggaaagcctctaaggaaaggatgcatgagctaacacctgacattaaagaagcaagccaagtgaggagccaggggagataagcattcctggcaaagagaatagcatcaaatgcaaaaaggttcacactaaaggaaactcctgattaggtattaatgctttatacagaaacctctatacaaatccaaacttgaagatcagaatggttctacagttcataacattttgaaggtggccttattttgtgatagtctgcttcatgtgattctcactaacatatctccttcctcaacctttgctgtaaaaatttcatttgcaccacatcagtactacttaatttaacaagcttttgttgtgtaagctctcactgttttagtgccctgctgcttgcttccagactttgtgctgtccagtaattatgtcttccactacccatcttgtgagcagagtaaatgtcctaggtaataccactatcaggcctgtaggagatactcagtggagcctctgcccttctttttcttacttgagaacttgtaatggtgttagggaacagttgtaggggcagaaaacaactctgaaagtggtagaaggtcctgatcttggtggttactcttgcattactgtgttaggtcaagcagtgcctactatgctgtttcagtagtggagcgcatctctacagttctgatgcgatttttctgtacagtatgaaattgggactcaactctttgaaaacacctattgagcagttatacctgttgagcagtttacttcctggttgtaattacatttgtgtgaatgtgtttgatgctttttaacgagatgatgttttttgtattttatctactgtggcctgattttttttttgttttctgcccctccccccatttataggtgtggttttcatttttctaagtgatagaatcccctctttgttgaatttttgtctttatttaaattagcaacattacttaggatttattcttcacaatactgttaattttctaggaatgatgacctgagaaccgaatggccatgctttctatcacatttctaagatgagtaatattttttccagtaggttccacagagacaccttgggggctggcttaggggaggctgttggagttctcactgacttagtggcatatttattctgtactgaagaactgcatggggtttcttttggaaagagtttcattgctttaaaaagaagctcagaaagtctttataaccactggtcaacgattagaaaaatataactggatttaggcctaccttctggaataccgctgattgtgctctttttatcctactttaaagaagctttcatgattagatttgagctatatcagttataccgattataccttataatacacattcagttagtaaacatttattgat

SEQ ID NO: 89623 - DNA, 1050 bp, Homo sapiens
caccacgcccagctaatttttatatttttagtagagacggggtttcaccatgttggccaggatggtctcaatctcttgaccttgtgatccgcctgcctcggcctcccaaagtgctgggcttacaggtgtgagccaccacgcctggccctggcctgatattaatagtatctacattctctctcaggtgttccattttggatgatggtgaataataagatcaccttattaattttagtgcgatgagaaaaagatgttcttgtaaatcacttctaaaacaaggtcatcagaagtactttgactttgaggatcaaccattttgcggaataatcgtgtccaaaattatatacacaaccttttaatttctgtaaatttttaatgcagtgtacctaaacatagccattttccctgcctgtggacttgaatttcataatcattttcctgtattcttttaaacagaaggcagacggtaacaagtactccttgctggattgaacttcatctgaatggacctctacagtggttggacaaagtattaactcagatgggatccccttcagtgcgttgctcaagcatgtcataaagcttcaccaatcaagtcccatgaaaagacttaatgtaacaactcttctgtcatagcattgtgtgtggtccctatggactgtttactatccaaaagttcaagagagaaaacagcacttgaggtctcatcaattaaagcaccttgtggaatctgtttcctatatttgaatattagatgggaaaattagtgtctagaaatactctcccattaaagaggaagagaagattttaaagacttaatgatgtcttattgggcataaaactgagtgtcccaaaggtttattaataacagtagtagttatgtgtacaggtaatgtatcatgatccagtatcacagtattgtgctgtttatatacatttttagtttgcatagatgaggtgtgtgtgtgcgctgcttcttgatctaggcaaacctttataaagttgcagtacctaatctgttattcccacttctctgttatttttgtgtgt

SEQ ID NO: 89624 - DNA, 1161 bp, Homo sapiens
aagaaaatgcttccaaagtcacactgaaatagtaaatgttacaaaactaatctcatttgtattttgtttcaggaagaggagtgcgcttatactacataggtggggaagtttttgctgagtgcctaagtgatagtgcaatctttgtgcagagccccaattgtaatcagagatatggctggcaccctgcaacagtgtgtaaaattccaccaggtatggattcaataatgtacataaacctatcatgtcaacttgcttagtttttcttgttgctaattttaggaatcagtagatgattgcatgctcatattctaaaacttgtaacccttttaaaattactttttaataatgatactcttttgacaatttcttttaccttttttaatcataggctgtaatctgaagatcttcaacaaccaggaatttgctgctcttctggctcagtctgttaatcagggttttgaagccgtctatcagctaactagaatgtgcaccataagaatgagttttgtgaaagggtggggagcagaataccggtatgaaatacatatttggttcttaaatttccacagtgtaattatgtttcattgcattcttgcatattctggagttcatttgtatctattttcaatgaggttatagagtcagctgatctttatgtaaaataaagttggaggcctccaaattcaaaactgttgcaaattactgagctgccattatggaagatattaaaacatgcacaggcgtgcattttaacgtaattcagagtgttaaatatcataaaaggggtgtatatgaagggttatgtcagtttatggaaggagagatgtttgcacacggtgctcaaggaaaacttgatggcacatgatctagttgtaaaaggtgcattggatttcaatagtcataaatggggtgggcagagttgggaagtgataatcttgacaatagcatagcaattcagtttggagaatagaaaaataaggctggacaattaaattgagacaaactagatgtaggttaagaggaggaacttcattcagaagtagaaggaatacttgctaatgtgccaggcactgtgctgttttaagtgtagtatctaaaaattattatttctgttgtcaattcattctttgtaaggttgaaatatatgaaattgccatcgtt

SEQ ID NO: 89625 - DNA, 1036 bp, Homo sapiens
gttgactgactttgcctatgattgttttgtatttgaacaggagctagactaaaactactggtaaaacaaagaatccaacataaagtgatttaatgacatgggagaaatttgaaaaaatctggtatgatctatgaaactggagttttgtgtgaaaaatactgaaaatctggtatcatctgtggaaaccgatacagatactatgtctacttcctgagcttttgccagtgcaggctggcatagagcatgtaaagatgattatattaaatctatttttggcttgaattgttcacgcatttcttccttttattatttttttatttttttctttttcagatttacagccagttacttactcagaacctgcattttggtgttcgatagcatattatgaattaaatcagagggttggagaaaccttccatgcatcacagccctcactcactgtagatggctttacagacccatcaaattcagagaggttctgcttaggtttactctccaatgttaaccgaaatgccacggtagaaatgacaagaaggcatataggtatgttttattttccttgttgtgaaaaataaatgctgtatactcataatgtaggcattgcatggtgtgccacatcaagagcttgtgtgcagtaaaaccagctttctctctggtggtttaagtgccgacacatttaagtgcacaggcttcactgcttctaatagatcctggtgatgcttcagctgcaaactcttcaacttttatttggcacccttggtactggaaagttcttcaataaatatgtgttaagataagtttaatttgctgagtctctaccagtcataaaattgccatgttcagatttgggggttaatacttttttataaatcatgtttttttgttttgttttgtttttgttttttttcagtttctttatatagctcccaggttttttccccctttggtgagtttatatattaaatgaaatctgcttgctgttcatctgaaatgagatatctaaaacaagaactgcatttaatatagttcaaaa

SEQ ID NO: 89626 - DNA, 1681 bp, Homo sapiens
aatcacttcattttcttttttgcgtatatggtatttgttcatttcatctcatcatattcatcaccatccacatttatttgtgaactacataaatatacctcagttctcaaaacagtcacaactgggtaaagagttgcagtagtctgaggaagttactatcacatcattgttggtatttatcattcttcacactagttccttttctgactcttcagtcacctccagaattaatatccttagaagcatctctaaaatgagtttgatttactaaacatagaagttgacaaagtttttcaagtataactgcataaactctcttttttaaaaaatcagtttttcccaagttgttagcctttcattggcatttgagtcatttatgtgacatatttataagaaacatctgctagtgctgctgcatacttttatcagatccattaaatagtacatttttgttcttgattctcactaaaactaactaaatggctgtcattcttttctttatgcttttattgtactaatttagcccatttgactgcacttttttttttttttttttaaagttccctcctttcttttccccttgcttcccaacaggtctcttgatggtcgtctccaggtatcccatcgaaaaggattgccacatgttatatattgccgattatggcgctggcctgatcttcacagtcatcatgaactcaaggcaattgaaaactgcgaatatgcttttaatcttaaaaaggatgaagtatgtgtaaacccttaccactatcagagagttgagacaccaggtaggaatattgcaagtttttttcttggttttgaattaaatgcctgaacttcagtatatttaagtactcttgtgacccaggaaaattttagtgtaaattctaataaattaccttaaattgtgcatattatttggtggtaattaaaatttttttatttttaaaaatttttaatgagaaaacatatctgtttcttggaatagcatatgatttggcatgaaagtgcatatccaggaaatcctgtagattggcagtctgctcagcgctatgctgatgtgcttctacatgtccctgctgcagtaacattttcaagcattttgcacttggagtgcttttagaagtactttaatgacatcatttgtatgtacaccgtttagtaaagcttgtaacaagacttttcatttagttagctgtctacctgaaactattaaaaaatatagcagtagctgcgtttttggaaaatttcctatatctgattttacagataaagacaatgttaagttttccaatggggatttatgaacttttatggtaatataatattaccaggatcacattgttcccaaaagtttgagataaattagaacttggaaatttggataatagactacctaagttagagccataatcagatttgtcattttctcagtaactagtatatatcgagtaggtggaccctagctttaaaaattaagctacaacttctcttcttgttgaaaactttaaaaaaggttcccccactcccctttgctctttgccattaacttggatttcttgaactttttcagttttgcctccagtattagtgccccgacacaccgagatcctaacagaacttccgcctctggatgactatactcactccattccagaaaacactaacttcccagcaggaa

SEQ ID NO: 89627 - DNA, 1072 bp, Homo sapiens
ttttgaaatactcctttatccgcattgaagttttgatgattttgtaatatgtaagaaatggacttttcagaaaagtacaacttagtacttgagacattggctgtcaaagttccattccaaaacttccttttaagctctctttcccttctctcactgaccagaagttactatgaaatgaaataaaggtagggaaaaagggagaattatctctgagctgcccatattctggagagaaatgtgggagaaaatttttaaggtggtatactaaattagaatgacttcaaagtctatttctttatttattctagagatgagaacaaaataattttcagtaaaacttaaaaatatcatgaccagataacctgaaaatcttaactgtggatgcatgtctatttttattgggatttttttctatattaaaaatcagttgacatctgtttttagataattttttaaaaaactggattataaaatgaagcacttagtaaagctgatggcagaggttttagatcttttgaatacaggaaagtggtaagggcattataggtatgattcattgagctagagggcgttggtgttcacattttaaaaacataatcatgacttatctggagtcacatgttccattttattggcttccttcatatagaaaatatagtaaccagcactacatgcctgtgaaaaagtgaagcaattgtatattttctgggtgaaggaagtattctgtacattctccatgttttacatcatggtattttgaataaccatgcttccatgttcacatcaattttttgtttttcaatttatgcacagcacttgctctgaaatttggggactgagtacaccaaatacgatagatcagtgggatacaacaggcctttacagcttctctgaacaaaccaggtgaatattctgccctctgtcgaatcttagagatcttgtgggaggggggtatattttgaaagacctatatggggttgcttagtataattttgcctaggatgtttccttaatgtaaaataaggcatagcatttaaaatatctgcttgccagtataaaaaatatattaaat

SEQ ID NO: 89628 - DNA, 1049 bp, Homo sapiens
ttggacttccaacctccacaggactccatcacacattactgtcacatcagattacagtccagccagccacttaagatcgtgccccttttctctcagactccctcttcctgctatttcagaaccgggaggggccttaaaaataatagctggagagtactggaagaggtagcgtgaaaagaattaatgagatagtaagattttggctttgctgtggctggattttaatttctgaagacatttattgttaatacaaatatctggatatgactaggaagtgttgaaatctttttgggattttgtgcagacaggataaaagcagcttgggaagagcttgttggagagcaatgactagagtggtggtggaagggagctcactaagtctagtttgtttcatgagctgtctgtatcctctttttgaaaattgagaattccaaatttagtggttgctggggacaggaagaatatgtggggagaaaagagggatgttacgtgtgtctacgtgaaatacatgccattttaacaaaagccttttctttttttttttttttgcatataatcatgatactggttaaattagccagtgatgctttattttcaaagaaatgttacaactacagttttcttctattatcatcatcgttttccttgaagcggtaggttagtctttactctcaaaatccaacttttaactctgactttgggttatgatgggaagcgctatgaaatggtcttggtgctcttatgaaactgtgatcactaataatacttaaattagaactgaaatatataaggagacttctcactaactccttcaccccagccttttgtcttttagaactttgcttatctttatggttagatagatagatagatagatagatagatagatagatagatagatggatagatatagatatagtttctctgaaatttgctaggacaacggggtttgggggcaatgaaagaaggttttatatttatgtttaggatgatagggacattgagagatactgaacacaaatttataatgaagttaagtaatttaaaag

SEQ ID NO: 89629 - DNA, 1602 bp, Homo sapiens
ggatctcggctcactgcaacttccgcctcccaggttcaagcgattcacctgcctcagcctcccaagtagctgggattataggcatgcgccaccatgcctgtctaattttgtattttttagtagagacagggtttctccatgttggtcaggctggtttcgaactcctgacctcaggtgacccgcccgcctcggcctcccaaagtgctgggattacaggcatgagccaccatgcccggccacctcttacagacttttaaacatcagagtaattagtaactttatgcagactgtcttggaatagagcagttgtcattaaaaaaactgtcatcttttatttctaacctcatgttcatacccttttgcttctctaggtaaccaggaatagctaaagagaagtctttttgaacccaaactgtagtattcttccattcttaagcaactgctttttcataataggataattctttcttctcattcatacataggcatgtgcgtgtgtctgtctgtatcgtaatatgtatgaaacactatggtggagggaactctgaatttcaagtttgataacctgtttttgtgtcagcttctttagtattgatgaatgtagatcctagggaatatgactgtactttttttactgttcacagctgtgaaaggcagtagtgctatctgagtactttcacagtatgacttttgggtccattgaaataatgtaaatgagcttcataagctataaaacattatagctaggaatatgatttattggaaatattcagatattctaggtcttcgttctctatttttgtttttcaggagaactcacattaaattgtagacattaaaatgtattgtctctgcttagaaaaagtttttgccaggcaacattgcatgatgtataatttagtttattaaatgtataaaatttgttgataaagtcagagcaataaaactttataaatatgaattagaactttgaggttatggggaatagggaccttttatcagccttatcatccagtttgtcatatacagtttataaatgtgaaagcacttgtgatgaggtcaagtatcacgtgaaacacactttggaaggcactttgctaagccctggaccttatctggtgcctacatttacagttaggtattttgagggggctcctgctccaggacctggtattcaaagtcccttgtgtatatggtatattcttgcatggggcatttttatcacttaccttatcagggaaaatacctacctgccctaggacctttgtccctttataaaaattactgaaattatacctaaattaatcaatttctgtaattttatcatgtaacacctgatgcaatgaacaatataccctcttttcttgtcctgtttaacatattagcttcaggaaagagtcaacctagctaaaataggcatttaaaaaattacagtaatcttttgttttcccaacatccttggtctgtttccagtccttttttttttttttgagatggagtctcgctctgtcacccaggctggagtgcagtggcgtgatgtcggctcactgcaagctctgcctcccggattcacgccattctcctgcctcagcctcctgagta

SEQ ID NO: 89630 - DNA, 1053 bp, Homo sapiens
tagcttaaacagaattattcaaaatgtgatacacaatggatttgtaagcacgtttactcagaatttcaagtaaaatgttagtaaagtgcctttatggttttataagccaaaaaatacaactaagttcagctgatgaagaacgggaaacaaattgcttaattttaagaaatggcaaatgttttctgttgaaatgtttactgaacagttcctcctctctactttcagccccttaatattagagtggggttaaagttagggcagaaacatagtcctggctttgtgtccctcccactcccctcatctcattactcttgttgcctctggcagtttaaaagctgtagttatagatacgtcactgtcgctcccttcccaccattttctgtggtgacacagagtaatttataggtagagcttaacctcaataaaagctgcagtgagctaaataataaaaaatttcaggaagctttttcatctcaaacatttttgagtccgagggatgggagacaacttggtcgtgaaatcagaatggcaattgatatttagataaagaatcagacataaggaaaaagctttcaatatattattatccacagtaaagcaaaattgaaattgcagtggggatggaggtctgtaaagttaaaagtaaggactatggggtctaaaatggctattttataatattgattatacataaatgtataggaatgcaaaatttattttcataagcataaattaaaaggactttcctaaggtggtactctgaccatgtaatcacatttttgatctttcatcccaaggaaataatcagaatattgtcaaagattcctgatgtttgtttcagtatcattttttccaccagtccattggaatctgtattgtttttaatatgaattagaaaaaacccagtcctaacctttagtttctttaataaagaacacttaagcttattttataccacaattaaacaagaatagcgaaagaaaagtttatgccactctttataaacatagatgcaaaagtcataaataaaatatcagaaactagaattcagtg

SEQ ID NO: 89631 - DNA, 1427 bp, Homo sapiens
tcctgccttcctaagggatagaaatacacgataaacaagtaaacaaattaattataatttgatatggtaatgagtgcaaagaagacaaccaaatgcagtgatatgatagaatgaagaattaaaaagctgctttgggtcggattgtgatgcttgcgtggagcttggagaagcagcagccaactgagggaagagtcttctaggcagagggaagagccagagtgaagacactgaggtgagcttcttgtattagaatatttaaaaggagcccagtgtagatggaggacaagacttgcccaaagcttatacagggcatcctagagtgtggtgagagtttgaatgttagtctgaatataacaggatgcaagtaagtttattctgatggattttaaagaggatcttacatatttttacaaagatttttctggctgcgggagagtggtatgtgtgtagtagggtagatggaagcaggaaaattaggaggctgtgaggaatctaaatgcaagacgatagaggctggactggcgtggtggctgtgctagcacacgaagtaaacagatttggcatgggttttagaagtggaactgaggacttcctggtgaatgggctgagaagtcaagctatatttcattcttcattgtgtagtgcttgggatttcaattaggtaaccatttatcatatgcccactatgtgcctggtgtgctcttcctcactggagttaagatacagtgtttgcttttaaactacttacttcctagtaagggagataaacttagaaaaagatggtttcatgaggcttggtagatgttataaaagaagtatgcttggggctatatccagaggaggcttgtggaaagtttccttctggaggaatactggtgattttgagttgagcggggtaaaggaggaattaggagaagcctgtttcatcacatgtagtgcggtggtgtggagattgggaggtgggggaggattggtgaagcgttccaaacaagttgggtatccttagagtataaagtaaggggtggcaaatggccatagtgtgtataggtagtaaggagtcacttcatgctgtgccagtgttcacacttaacctgagggtgacgggtgaggttggggccgtttaagtgccgtagggtctgaaggctcagaagtcagattaatttcaagtgcaacgtgggttgcagcgagaaaactccttgaggctgtcaagaatggaggccgggagactggtatcacttgattgaagggagctgtgtgatacagcagagatagagccatgtttttgcacaacttcaacaaggctcaagttgccattgcagtgaggttatccagagcagagcctgagagagtctaatcttttagggaggtacagcagtactaaaattggccattgctggtatttaacctgtggaggaggtcaccttagt

SEQ ID NO: 89632 - DNA, 1033 bp, Homo sapiens
atagtattggtggtgaaaaatcgttaaaagtatctgattttacttgcaaaattactgtattttcccacaagaggagtccttacaacattcttgtttttagaagggtttgtttccatcattcatttaaattcataaagataacgttttcatgggtggagaagtctattgggaaagtcataattcgaatttctatcttgctttgcagtttgctttctatgataagttgaaattattacttgatgttcaaggtagtctctacatcatcctttcaatatttctgctaggttcgatacaagaggctgttttcctagcgtggcttgctgcctttggtaagaacatgtcgtccatcttgccattcacgccgccagttgtgaagagactgctgggatggaagaagtcagctggtgggtctggaggagcaggcggaggagagcagaatgggcaggaagaaaagtggtgtgagaaagcagtgaaaagtctggtgaagaagctaaagaaaacaggacgattagatgagcttgagaaagccatcaccactcaaaactgtaatactaaatgtgttaccataccaaggtaagttttgttagatcccaggtttgatcaaattatgtcaaggaatctgaaggaaagttactgaatttgtgttcctttcaagttgcctgtaaaaagtgatgattgaaatatgactgtttttaaccttgtataaattgtttttgctagctgacttgttttataaattattttcttgaatagtgaggtttaatcaagctaaataagatacttagatttattatcttcattgcctacatttgtatgttatcctcatttccgtgattgaatgatacttgaataaagaattgaagctttttctatcactaacatagtagcaacctacagttttctcctcctttagtcaaaactttcatcaggggtgaaaagaggctgctcactttttaatgaattttatatggtttttctttgcgttgcagcattgcttccaagaaagaatagtgtgttaggtggcttcttaatt

SEQ ID NO: 89633 - DNA, 1016 bp, Homo sapiens
gagagattactcatgctaactcaaaaagaggttttgttctgaggatataattgtggagctggaacaggcctggacagtcctcagaaaccaagcctagagattggctgctctgcttttcttcaagacaccagttgtctctgcctagctctggcacacactcttacttgtacactgactgctagctcccctgagtctactatattttatgctgcctcctggccatgtgatgaacatagttacttacataaaggcatgtataaaactgaccctttagccttcagggttgcttctctttcctcattcctaatagtgatgaatgtaccattacatgccactcagttacattaggtagtcggtcacattagttgtgtttcaatccttttccctaaactgcacgtccagtaggtcattcaaaatgcaaattgtcactggaataaatgaagtaatactcctatcattagcagtaatttctgtcttcagctctttaatctgcactggccttattttcccctcatcttctgccacagtgcttcctgtgcaccgtattttagtgataacctaaatttttcgtctctcctaaaacgtttcctgtctttagaaaacatgctgaactttctgcctgctgtactatctctctcaatacttgtgctctggtgtcaactttagtgtcacctttcccttccaaaggttgaatcctgttctctgtgctaggataagactgtgtcacatgatactacggtgtctgtagttggctcctctagagcatactttgtggcacagagtaggaatccaacaggggccaaaggtagccaagtacactttttgctgcctgatagtcccaggttattagttggtagatgattacatgcgtttgatggagttttgtgtatttgctttattttatcaagttacatactacagtgcttatttatgtgtcgtattataggtctaccactatagacagtttaaccgggctgttaagttcactgttgctcttttatttgcattacagttcc

SEQ ID NO: 89634 - DNA, 1033 bp, Homo sapiens
caacataaaatgaaaagtcattctaaggatttggagatttttttgtaatacatactcagtgatagggtttatgtcagaataaaaacagtaagaaaaggaccacatagttgaggactctggaaagagtatgcactgttgtttaattaaatgtgcagagaatgctatttgtcaaactataatatagagttaataacttgaaggctttactacaagttcaggataattagacctcttaccttattgaaactttccggtgagtaatcgtagaatcctaattttactaaggtatcatttggtaagctgacttattcagctgtaaagatagtctttgtgttcttttgaaatctgcattatgtaagtatcacttattgctggaattagaaatagtgtctgaacttagatttcaattcttgcagatgttgaaaatttatttcagtagagaacttgctgccacaccattgaaggaaatctgtatattctgtaaatgactcattcacgttttgatagcaacttgattataaatctagttttcttttttgtatttcatttgtttttaacctggaacacattgttatctgttccttgtcagcctacattcagtctatttacacttcaaaaatattggctaaaaatgcttcagtttttaaaataaaagcttaactaattgaagatgtattatcagcattacttacaacaaatgttattttattacataatttaaaaattctccggagatattagacagatgtcagccaaccatggttactgagacatgcaaaggtaaggctggcaactttaagtgttcacttagttccaaaatggttttaactcctcttgtaagacatgggacactgaaatcatgtggcaataccaggtcatgtggccattcagatgacccagaataggcctaaacttaagttagtttcatttcagtgaagaaacaatattgtaaaggttttatagaaaacttttagatccccaggaatacagcttaactcataagaaacatttctcctaacgaaagtgtaacagg

SEQ ID NO: 89635 - DNA, 1010 bp, Homo sapiens
ctcaggtgattcgcccaccttggcctcccaaagtgttgggattacatgcgtgagccactgcgcccggcctaaaattcttaatagacaggtagttaggttgtagttcatgttagctgatcaattaaacttttttttaaaaaatgttttagttatcaggagggtccagctttggcctgaggttgtgcattggccatttctgctcgaaaccagtagtagtcagacttaaaacatgtgcacacctgcacacacagcagcaactagaaagcctttagagagaaatatgcagaatttcgaaatgtaaaacagataaaaggagtaaagctgttttgtggaaggaagaataggcagttgttgaagtcctgcctgatcagttttcctctcatcctcaccaccaggaagcctttgaagcacagctgaagaacagtaggtcttggagaaatttttgctgtagacctgctctatcttaacaggtagctgccagccacatgtggctatttagcacttgaaatgtggctgctgtgactgagaaactgaatgttaaattttacttaatctaaatttagatagccatatgcagctgatggctactgtattagacagcacagatacccaaggacatttacatcattgtataaagttgtgttgggtggcactactctagactttgctttaattgagcttttatggcctgaggaccccactcacgtgaattgacgtggtattagttgctgcttcagaagagggtcaggatagactttgggaatttgaagagcaattagagtacttgtactttatatttgtgctgatttgagtctgggcctgtgtagtgttgtcataggtgctttttttttttttttaataatctgggaatgataaaccaatatgtaagttacgtgtttacaagttgattatagagttgtggattccacaaaactcattataggtgataggaatataactcttagttaaaaaaaaaaaaataagtagtctctttacacagcagtccctat

SEQ ID NO: 89636 - DNA, 1058 bp, Homo sapiens
ctttctaatccaaatgatttgcctacactgttattatggacctattgtaaaatgtatttgagaagcagacaatgaacaacaaaggcctgggatagccaaattgtcccagtccatagcttaaagcttaggagagccttggagacccttaataagaatgtgttggcatttatttaaagtgtttctaacaagcaaagttatctggcttctaaacctgcactagattagaaacaagtagattatgggtactgtgggaggcttagagggggtgtggtgggggctggggagtaggatgttagcctagtgtctcttgtcagaaaaaacagataacagctcggtgaggataatagagataatctacaagacacaaaaatagtcaaagcctgactagcatgtctggggccattgagtgcaggaccagacctgaaagcatagtaatgaatgttcatcaattagcctaaatcatgtttgggaaaatctttttaagagtgcaataatctacgtaatatactttagattgtcactcaggatgattaagaaatgttcttaaaggggttgaagattgtgctatagcttatggcttatttcatgaaagatcacagtagctgttatgaccaagatgtttttcatttgttttgccattcagacagccattcagattccaagctgaaagggtagccagcagtaaagaaaggctgtttcagtgtggtagcaccctatgtcacccctttctttggtgtaagtaatttttttgtcagtctgcaggagtatcatataaattttcacttgtgctttgacagtagtgtatgcttttcactgtgttttgagatagagtatgctcgagatttctaggataaagcaagagtggatagttggccagtctctctgttgagggtttcttgactcttgtcatgtgacttctgcccagtattagcactgataatttttttgatcccctttcttgtaaccttacctcagggttacttcttaaaccatctacaccatcagataattattggtgaccttgtaatatgtagccttggctgtttttaagaatcagg

SEQ ID NO: 89637 - DNA, 1034 bp, Homo sapiens
ccatcggaagaggaaggaacaaaaggtcccggaccccccggatctgacggggcgggacctggcgccaccttgcaggtaaagcctgggcgcccgcgggcctccagctagggaagtgtttgcgtgcgtccgcggccggggcgatgggccgtgtcacatggccgctgcgggtgggggctggggtgtggtgagttcgggggctgtgggtgcgccggcccgggcgtgcgggttcggggccggagagccgggaagggacggggctcggttgcactgcgctgccgcccaggctgacgggggcgggggctgcctgcgtcccttcccctcgctgctctcacactccatagtttgtggttctgatttttaaagccgaagggccagagctcttgtttcaggagttgtggggaagccttgttagggacgcgtaatactttgcctccactttttttttttggtctcgtaacctttgttaacagtggtagtctcgggttttccatggcttgtgtgtactcacaaacacgcacacagctgataactctgtgatcatccttcactcacttgtgaaagttgttctgcgggtggagcctattagtttttatcacacgcctttggaaagccctcgaagtgatttctcgtatttcaaacttggtttttaaaattgcaacttactttgttctcttggagggggatattgtctttgggtcaggtacttttgtcttttacttatccttaaaatgtccttttgatcctaaacagaaaaagaatgcctgggttggttttgttattcctttctcttgaccctttaaaagcaaaataccaccagtgtgttgtcaaccatacctttaaaaaagaaatttccaggtaaaacgaatttgcaagcagcattttccatcaaagtcatgtcttgtttgttgcaatttggactatcttaaatttgggtttgtgaaacttttaaaacgacatgtgtaaaataattgttaataaataaataacttggaataattacatctttttagaaatggtctttgaaatgtgattta

SEQ ID NO: 89638 - DNA, 1071 bp, Homo sapiens
cttcatttggtaggcatttgctgaatttgcctgagcaggcgctggggaggaacaagttaagggagggtggagtgagggaacaaacatttctttggcacccggtactacatgccaagaggcgctctcttaggtgcacaaagatggattatatgttcagcccgagagcagagctgggaactcctaggagagcggatttgggaggatggggcatcttcaactggtgtttctgatttctggacgtgctgggagattagcggacagagcaggtggggcctctgaaggctcttctgtttaacctgaacatcctccctttcaactgcagggaggatgacgctgacctgtgtcgtgtcatttctacctttctacctggggaaaggtagaaaggagtcacctgcccctcctccacccagaaacaggcctgagagctcttgctctccctgcagctgcaggggaagcctccagatgccatcctgggagtggggaggcaggaggaggaatcaatcaacccaaaactgtgcaatcgctaagccgatgatctcagccaagcccacggtgagggaagaagggctgctctgtgtttcctggaactccaggcatcaaacagatcctgtggaggttctagcatgttcttcctctctgggctggctgttcccatttccatctggcttctccttattgggcactgggcttgaagccctttgtcgcatcaccagcctctttggataagaatgagcagatctgcagctaagactggagagcttgtgtcctttctctcccatagaacagtaagggcatttgggaggggagaaatgaccaagtggaggccagtatgccttgaggagctgtttggcagtgccatctacccagcacattgatgaagctcaaatgcgtcctcttcatgctaatgcctgtagcactgtgggtgggggaggcagagttgagaaaacacatggaagtctgtatcctggggaaattgccaaacgcctcttttctctccttgtaccttgtgccacctccctcttctctgcgcactttgatagatgacctattttgatgctggcaaagatgtga

SEQ ID NO: 89639 - DNA, 1051 bp, Homo sapiens
tttctattggacagttctgttcgagagagaagctgcacaaagagataaccagcactcaggccacctctgcttcaggagttaagagaggaaagagcactgtgggctggagtcatctgacaaggggttggaggcagtggaactggaaggtagatgggtctgattctggtaagacaggcaaggggtgggtctgtctggcctgggtccagcacagtggggagcaggatcccatcctgcagccaagtgcctggccggacaacttttctggaagtgaaggctttggtagggaccatgggaagttaaggctggacagataggcctgggtcatgctgagcattcaaggtctcagcctctgtccacttccccaggactcatccccagtcctctgcttctctctttgttggtgctgatgctcagcccagctagaggcccacagcagggagaagtagctgacggaggacttggtttgttcttcctgccttgcttgtctataaggcctgcagacagcaattgttcaggaaagtgcaggatcgcatctggaagtctgtaggtgtccttgcaaaggacttttaactccctgggcaagaattccctttgatagcgattggaaccccaggattaggcaggagagccaagcaccgaagccccctggtagagctctgccacacacacgccacccgtgtccctggcactcacacctcatttgtccttggtacacagcaacagtccctgtgactggcccagcacctgctacgctctcacctttcccttttatgatctgagaaaatccggggactcacaggaaaaaccacatgctgtctctggctgtgggtgttttcctggcacttcccgcgatgggtcccaccttatgggaaccttcctgagcactggcctctggccaagggtgggaagggcatggaactacccacctcactgccctgccacggaccacactcccacctccttcacccagttctgaatcccagaactatccttgctggtcttgggaagagaggaacgctatgaagggccagtgtcaaccctgcgtgatcgg

SEQ ID NO: 89640 - DNA, 1127 bp, Homo sapiens
ggttacaggagaacccttcaacaagaccgtcattcatccattctctcacccaataaccatttttattttattttattttattttatttattttttgagacagagactcactctgtcacccaggctggagtgcaatggtgcaatctcggctcattgcaatctctacctcccaggttcaagtgattctcctgcctcagcctctggagtagctaggatgacaagggtgtgccaccacccctggctaatttttgtatttttattagagatgaggtttcaccatgttgaccaggctggtctcgaacccctgacttcaggtgatcaacctgcctcggcctcccaaagtgctgggattagttacatgggtggcatgagccaccgtgctcggcccaataatcatttattgacatccctgctggccaaccctgctccagggctctcctctcaaataggcagcttgttctttcttgctctgaccaccagacttctggcttgaaggatagtttaggtctataaatggccttgaccttgcagacctctgttctcacctctatgtaaaatggccatcgtgcttgccatggaactgcctcaaagtggccatgagaatccaaggactccttatttttctccagacctaggaatgtgtctaagttctgatgcatgtcatttggggagtattaagatcacctgttatattgccaaagttcaaattcccacctggttactaccaggagggaattgggggagatttttgcagcaaattcagctgccccagagtgagaagaataacccagaaatgccttgccaggttgaaaagtgctgtgaaatgtggttgaaaacacaattactgtctctcaggcagggcagctaatatatgagcatggttggacactgccttttatcaccttgactgctgtttccccagagctgcatccaggtagaaccattcagctccatgctccctttttcgtttcaaagtgttccattttaatgaaacagatatgaggtcagggaacagaagtcacttaagaagtaaatgcatatgcaaaccactgtgtaactcactgcaattgaaaatgcagtaaaaccttgattaagtgtaccccaagtaaccagaactctcaattaact

SEQ ID NO: 89641 - DNA, 1148 bp, Homo sapiens
atagtctagctatgagcaacctgaaggggctctcaggtggaagagaaatcaggcttattcctttgctccagtggacagagttacaatcaatgagtaggtcatgtggaagttcgatctgggcttcatatgataactctctaacaaagagagccaggccaaggaccgcctggactgtctggggagcaaaccagcctccagctgctgggcgcattctggcagctgctgggtcaccaagcattgcggtgagagaagactcttcccaatttgtgccctgacccgaaactgatggtgggtttctgggtgtgtcacctccacctccccaccccatcctttctcatgctctcgtcctcagctcctcttatggaccctagaatgggggctcaagcaacgtttgttgatttgagtcggaataaaaaacaagcccaaattcaataagaaaaggaatgcttggattaggggaatgtcagcagggactttgttcttatgctttaattttttccaaggagtgcaacgaattcatgtaaggtttatgaagtgaacaatggatttcaaaattaaaaagtcagtgatgaaactttaagagactccttctatgtcattttccccccatttcctcaatatttggtaacccaaggtgagctactccccaggactgttctgaacctgtcacagttatccaggggagggaggcagaggagagaagaccagagccctggctgggggtcggcaggagggaggtgtgggaggcatgctctgttttcacctgggatgggagagatgtgatgaggggcccagaggcagctttgccaagtcagtggcctggtactggggttttcgtgtggacgggtgtctgcactcactcattattaaagaccaaccttctcaaaacagaaaccaaaacatctatatatcttatatgaaactaaggcatagccagccagtgagcaaaaaaagggagaaaacataaacacagtttttggcaggcaagttagcaatttcggaccctgaaattattacgtacattctcttccagccagcaattctacttctcattgtttatcctaataaatagttaagtatgtaaaatggtttgttaaataatattaatctcagtatgattatattgtggaaatgactttaaatgtcca

SEQ ID NO: 89642 - DNA, 1018 bp, Homo sapiens
gagatgctacagcccagggtgtcaggcccctccagacagagccccaaggacaagttcgaccagccccatagatccgcatcccctcctgcaaggagtcagagtccaagagggaatatttcaactttcttgtgtgtgttgggagtggggggcggttagagtgcatgcagtacataagcagctcccatctggtctgttcattcactcatctgctcattcattcgtttgctgagcagctacaatggtgctaatagagtggaggctcaggtgtgagcagttcttcttcctcctgggttggactgaatgtacagcaggacaagaatcccggaagcccaaagtagctagttcattcactgggaaggccactccccaccacctgaactccaacccttgcattttgctgcccatttcggatacttcaccagagcctgttgtaacatattaagtcagtaatcacagggattactgtgatcccagccctcaccagcctcagctgctctgggccttctcagaagaattggctgcaaccatctggcaccatgaatttaatggtgcctcttgcttggaggcctcttatacagggagcttgcacgtgggcaggacagcatgatagtctctgccctccacctccctcataccctactgcagcacctgtgtgcctataaaataaagatgaaacaactacattttcataacaaaagagaaaaaaatgaccaacaatcagccaaaggtaggaaaatggtaatatcaattgtcgaccatccattcagttgaatattatacgccattaaaataacagatccagacactgtacagcaccatggactgggttctgaggccctgaagaactgtgctgcccacacctctgtgcctacactgggctgtgctggcattgctgttggtccaagaagatctcagtttccatagcctctgagagttttggtcacagcaacatgaacagcccgatctagatggctccaagctcagctggctcggctgcaggagcctggcacctcctccc

SEQ ID NO: 89643 - DNA, 1171 bp, Homo sapiens
gagatgatgaaaaagccgaacaaagcccgcagtctgtctgcctgactgcaaccctcaggcaagcctgggatggcaggcggtgggaatgggtccctcatgtgaatgtattaggagacactgagtagcaggtacctttcctggaagtcaacagcacatgctggaatagaatctgcaccacagtccttagagccaagcaaaatgcaaccaaccacctttgagaaccatggtgttttgttactaattatcttttgcacatgcttttactactcagttattgtttatcgtatattaagttcattattactacagaggagccagctggaagggggtggggtgaatctgcattgccccctgctgttctgtgaggattactagggtctctgggcacctgcaggggtttggagatggtgggctgaacagttccagcaccatgggattaaggctgagcactcaccctcaggtagctgagacccaggaatcctgataggatgctggctggcatttttggtttggtgtctgtgaagtgctatctgagccagcccagggggctccagttcctcaaggagcaggggtgggtgagaaagcaggaaagcaaggacagcttttgggaatggacaggcagaattttaacactggttgggagaaagccccttgcagttttcccctctctccacctctctgctctgaggacagcagcggtggccagttgggacagccaggatggagtctagggccaggtcaaggcaggagcagcaactgctgagccacaccctcagctttcatcagccgtggcaggagaaacgccacggtcacaggcagaatgcaggggccactgggaagcaggggaggggcagaggtttgctgcatgggagctctgagtcaaaaactactttcaaaattacagctactgtgtgctagatatatcgcataatttatctttttgatcttctcatcagctcagaggacagctatgattatcccactgaacagataaacaacctgggactcagaagttccaagtagtccacagtgactcaattagaaagtgggtgaactgaggtgggaacccagatctaagtggattcttatccagtaagggcttcctgctgtggaagccgtgtaagggatctcactcctgaatggaattctggactagatagtgtccgtagga

SEQ ID NO: 89644 - DNA, 2042 bp, Homo sapiens
atgtgcctccctatgcctttaaaggcaaagggaagaggagagttttgatattcagagtccagcccttttgtggaagacaaagatggggttgattctgacatcccaacatcactgctctcaaagggcatatcttgcccaggcaccagaagccccagctgggaacccaccctgcctggcttcgggtacccattgttccactcaacagctgtgtgctttggggacagtgacttaacatccctgggcctgcatttcctcccttgtgaaatggaagttatagtgctgtccaaaccaccagatgagaagtaaacaagataatacttgcaaagcgcttagcacagtgcctgacacccactaagtgctcaataagggctcatcgtgattattttcaagtgtgtgtcccatcttatgcaagagacagctctggaaaagttgcgaaaccaaatcccgttttcccactaactgacttcatcactgcaccaagactttatctttgcctctgatcatctgtggagggcagtgactctgaacacctcagcaccaggcttcctgcctcctcccagctccatgatctccttctcatgcaatggaaaaataagaaatgtaggtggcatgaataatgattctttatgatacctatttgttaaatgtagatttgtttgttctattcatgtatcaatcatctgttctatctatcatctgtccatcaatcatctatctgagaaatgccacctatgattattttatctttccctaccataggtaaaacaatatataattcatacaacgaacaaattatagttctagtcaacaacctgcctttcacctggattttttttttaacattttagaggtcataaactttcttgaaaatttgatgaatactaatgggctgtctcccagaaaaaggatcatacttacatacttgtacagttttgcatatggtttagctggggatttaaggattctctgaagcccaccagagacactgttaaggaccctgtggaagccagagcccagctctcctatgtaaacaccctgtgtcccagtagtagcacatggctgattaggtgtgcactgaagccctccccaccatattcagactcctaagactggcaggccaactcacccccttgcccactgtcaactggtcccacccatcctcctacagtgtcctccctcctgtgacagggctggctggcctgtgtccctccccttggctgtcactcacctttgtcccactgcttccccacccgcatatctacatctgacctacagtgcgagtatggaatgacatctgactgatcagagcaggcccagggaggatgtggagctcgagcagagagaagagaggcccagttgtcaaggcagagaaaccacgaaaagcatggaaacgtgagctcctagttcagggggtgaagtcacagctggcagggagattggaacagagagagaatgtgtttcaagcttgatttttccctcctgtctgattggagattgaagaactcagcagtggcaaaacgccctggcccatgaacaagaactccctgggttctggtcttagttctggcattgactaggtgtgtagctctgggcaggtcacaggtcgcttcgacaatccagcctccgtttccttatctttagagtgaggagactgaaatgctggcagcgctgtggtgagacggactcttttgaacagtgcaggtgtcagcctaagtggaaaatgcaatttagtgctatatgttaggcaccatgaacatgttcataccccctttcatccttctaagaatctcatctaaggcagtcattcaaaatatgagggcagtatgtctaaggatgctcatcctaatgttagctataatacggaaaaggtcccggtgtcccagagtagaggagcggttaagtatgtcatgccgtgtccactggtgacattttatgcagctattaaaaggaatcactgtggtgaacatgcttcagatgcaatccagcagttgaaaacctcctcctgctcccatcctccagccacaacacacctgaaggagggc

SEQ ID NO: 89645 - DNA, 1750 bp, Homo sapiens
atgccagcgggtgttctaagcactttacagatattagctcaggtaatccactcagcttttacagatgaggaaactgaggcagagagagactaaagcatttgcctcacgtcacacagtgagtgatagcagagccaggatgcagagtctgccttcgagtccctgctgttaagtgctgtctttctgctgggactgccaggttcttgccattttgacaagtaatataaccaactgggtctctgtttcctcctcataaaatggagagaataatattaactgtcgagtggtcactttgagaagtgtgaagggctccgcagacagaaggaccacttcttatctgatcatgttcccagctggggttggtttgtctccgtttcctcatccgcccacagttagcaggctctggcagctcttattgccttgtaggaccagtgagttcccaaggagatttctggacccctttccccatggcaaccttctcatgttcaaccccaagccaaacctattgtctatattattctatgttatttctatgctatttatattgctatgttatttatatgattcttcttgctgttaatgcttttatttattgaaaagctctcctcagagagtacccccaggttataggcaaaagccacatagaggaagctgtctaaggtcacccagagaaccctgcttgaccagagttggtggctctaccctctcccaccctttgaaatggcagcttgcctaccctggaccactggttcactctcagctaaaattctggcctgtattcagaagatgccttattccaccaccaacactaaaggttggggaaagcctctgagtgacaggcaggggcactgcctttcaaactgcagccagagagacccctaatggggtccactctccatccccaatcctggtctctcctctctcttatccaacatcactcgctctcggggaaaaaaaaaaagtgttctaagggggacttaaactttacttaaatttgacattccctgctgttcctttctgagtacctttatttttcccagttgaagcaaggaaagagaaaaaggtataatgatggaaatggacagaatttgagtgcaggaagtgccatgaggcttcctattgtttgggcagtgtttgatgttcttaagaatgtatacagaattaactttgatcaacgatagtagcttcaatctggtggctccatcggccaatggaaagtgagtagtattttatacatggcaaggacacagccaagaaaatgaaatgatcagttttgtgtgtatcccactttacttttcgagtgctttccttcacagacaagctctaactgaatcctcacaaagatcctacaaggcaggatttgcccattagacagactggaaaactgatgcctcaaaagaaaaggggcgcattgtgggttagtgaagacacctaaagaacaaaaaagcggagctccatgggactgttgtatttcaccctcctcttggctgccagcatcttagtactaagtctatcgccatgccgtgtcacgtgggcaggtcttcttggcattcatcttgaacatgacccaaatcctggctccatcttccctcttacttttcctttgccccatttttcttccttattttttatgtatgtttaccttgccctgtaggcgcatttgtaagctggctcaaatccttttgggaacaaggtgggttataaatgcacacgttcctacacaggatgttgttagtcatttcataaggtctct

SEQ ID NO: 89646 - DNA, 1022 bp, Homo sapiens
cctccggccaaggaaggaccggacacaggactacctccggatggccattgtgcagagagcaggcacagacagcttgggtagaagggcagcacgaggttctgaagaccagagaagggcagggctgagcaggctctgctttgtgcttccagctgaggttgaggtcagaggaagaggcctcttcctggggctgggggctgtgagtggggaaacagcctcaagagcttcccccccgccagtaaggacaacacaactgagccaccttctagcttaggaggtgcccaataggtgccagaggcttgttccagtgtggacagcagcttccaggcacacttcagcaaaaccatcaccaaatgtgcccaatatggtccatctacggctcgcccctggctgcctgtggcagtgtagtgcccaggcccctggacgctttgggggtcactccttggcccgtctccctgctggaaactcctttttcttgccccctaacatgctgcttcattggtcctgtccgtatcgctgaggaccaggccaggtgcttctacctgctggggaccaggggactctgagcttccacaggactggccctccctgtgatgacatcactcatgttgggactcccaccccaacggcattcctgggagggaggcagggagaaaccgggggtctgagaagctgagaagtccagcttactggggaaaagagttaactctgcagacacaaagggcaacaagatattgtgtgattcttcttctatgaagcatccatgataggcaaattcttcctacccagtgttcttatttctcccaaaataaacaaataaataaataaatagaagaagcaaattcttagagatgaaaagtagattagtggtaccaaggttcagaggaggggaacgttgggaagttattgcttaacagttacagagttgtttgggttgatgaaaaagtcttggaaatagtggtgatggttgtacaacactgtgaatgtactcaatgccacggaatttcgccttaaaatggttaaaa

SEQ ID NO: 89647 - DNA, 1057 bp, Homo sapiens
ttgaatgctctgttcaatgccagtgtacattttccaaattgagcttattttataatcgtggaggcctggcagatatgtttttctcttgcaagcaagctcccttctttcagttctccttcatgtttacactctctctcaggttacaagaaaatcctctaacttgttcatgacctgttccagcccggagacagatgttggtggcacccccatgaggcaatgaaaaaaaatctcatttccgttcaagaagtagaatcattatcttgattgaaataatatctttcctcaacctgcaaccagataaagcatcaaattggtggagtttccttatcactgcacagagtttgcaggacacagaataatggcctgtcagctgcctctggtggggtgggtgctgtaatacagagcccacagctcctggcctggtttggattatacgatgtctggtgtgatgtaaaataattcaattaatgacaaatatcattatattaaaaagagaaggtagcgtaaaccctaaaacagaataagcaataaaggcagctacaactattatagtggttgtttttagtagacacatctaacatgcataggcaattgtgggggtgactgaaggctacagatgtttatgtcctttaaggatgtaagtactctggaacctgcaaccccactaggcctaagattccagggcttcagtgggagtaagggggtgactgggcttgagaaggtggacgaggtcctagttttgggtagaaaacaggacagccagagggcagcaagctgatatatttggaaagggagctgaaagagctgtgggtagggaggcagggggtctgggttccagtcctgattcaccgtcattgtcatgcagctttgggctcttggggcctcagttgcctctttgttcagaaaggataacatgggggtaccaggagaaggaggcgaggcaatgtttgtgcaaagcccaggatagtggctgtacctttgatccctcctgtcccttgtccactgagtggggaggctctgctacagcccaggcaggtctgccaggtggtaaaatgct

SEQ ID NO: 89648 - DNA, 1437 bp, Homo sapiens
ggaggccattccaggaaggaaggaacaggggtggatgcctatgtggaggatggtgtaggcatgggtctgagggtgggaggggagaagatgctggtgaggttggacagggccaggtgctggagggcttggcatggcttcaggaatggtccagatgcaaagaatcaggatggaataaaggattcttcacctatgtaaataaaatttagtttctgcctgtttgtcggccactccacgatatgaaaatggctgcatgaatttttcacaaacttgaggttgtatttgagatcagtctatacactgagtagattataggaaatctgcattggagatactccctttgtctcagagagagagagggaatgagaaagacagagagagagagagagagagagaaaattctccacacagctgcagccaagggccaccagagccctgtgaggccagtaatggggccacatcttgagctcctggcggacagtcaccaatacagcactcccaattgtccacttgcctttcccccagagccacttctcacgcagggagctctaggtactgtgctcaggatgaggggcagctgggatatatttatttaatgatgattaattaatatttgtcccaagcaagcaggagaaggtagctagttataaatctccataacaacagccagtattcacattggatgagcaatttgcagcactcttgaaggtactgcctcataggtgctttacaaaggctctatccagtattcccattttgcagatgaagaaactgaggctcagaatcattcaatatttgctctagtttgctctgctagtaagtggtagagctgcctaagacgtccacactgactttccgctgcacataactggacattgctcagattatgcaacaggtccttttggctcagcccttgcctcctgcttattcatcctggggaagaagagtcatcattgtgctgcgccacggggtccagttgtcagaactctgtctgttctggatgtccatgttttgctgttgctggctttcgtgggctgtattatgtcagactggtggtcttcggcaaggcaggaaggtggttatggtgctgccttcaaggaggaaggctcacgtgtgcttccaactcctgggacaaccctctgaaaagatgctggagggcttcattttgagccactggtgactgacttaggttgggcttcctagaagcagagcctgagtcagttttcagtgggatgtgatgtatccagggagagctcttaggaaacacttgtcaaggagagagggaagcagggtaaagaagcaagagctgagtgggaatgtggtctcagggcaggtctccctgggtctggtccacatcaactgcactgcagtgatgtctgacttggaggcagggggcagggcttgtgtgtccccttatttgtcagcagctgcccccagagt

SEQ ID NO: 89649 - DNA, 1046 bp, Homo sapiens
ctccgtccagtcggaactccctcaaaggtaaccactatcctgacttgtatcattgtacagcagttttgctgttttgagctttatataaatgcaatcatgccatattcactcattttatatttcacttaacaatatatctgtggcctggtgtggtggcccacacctgtaatcccaacgttttgggaggccgaggtgggaggattgcttgagctccggagttcaagaccagcctgggcaacatagggaaatccagtctctatagaatatattttagatggatagatagatagatagatagatagatagatagatagatagatagatgataggcagtggatagatagatgatagatgattgatagataatctgtgagatttattcatgttgtagactattcagaagtttattcttttttgtagctatatagtattcatgcagtaactatgccacactttttttacccattttattgttgatggatattttgattatttctaggttgagactatctttttaaatgctgctgtgaatattctcattgaggtttttgtgttgtacataaatatcttttctgggcacatacctaacagtgaacttgctggattgtatggtatatgcatgtttagctctaagagatattgcttaacactcttttgaagtaattgtattgatttacactcttgactgtcattgaagagagcccagttgttacacatcctcaccagcgcttgacatctcacttcagccattctggttgcttcagtgctacgtccctgtggtctttttatattgtgtttgcatgatcttatatgtttattcaccatttcgatatcctcttttgagaagtgcctattcaaatattttcctattttttaattggtaagtctatttttttcttatttgttgtctttctttgtatgttttggatgtgatttctctgtcacatatcttctctcattctacagcttgcgtttttactcttttaatggtgtttttgaagaagagaagttttaaattttgacaaatttccatttatcaatctttt

SEQ ID NO: 89650 - DNA, 1033 bp, Homo sapiens
taacacctttatagtctgatctcaccttaaatttccacagttagccctcactattcacacatcccatctactgttcttattagacttgtcttttacttcccacctcaatcttttgctttaggagggtctgccagttgaaatcctcctcctcccacagtaacattctgttcatatttcaagatgcaattaaagtgttatttcttctatgaagtcttcctccagctcaaacgaaatcctgaacttctcttccctaaggctagcgtgggttttaggtggtgcctttgttgagttcttgaactataagtttatccgtttccctagggttcatttgcctgttcaacagagacttatcaaacacttctcatgggctaaaaccctgttccaagtttctgagaataggtatccatttatgaacttaaaaggcttctagaagaggtgacattggccttacaccaaagtgtgggttaacttagattgattctctactaggatttagataaacttggacatagggaatcagagttagatgagaagtatgggaaaatgtagatttggttgtagagatatttagtgaactaacgagtagatatgaaaaaattattcagaatacagaatagagaaacaaaaaattaagaaaataccagagatgcgaagagacacagaaggctgaataggaaggtctaacacatgtctaattcttaaaggtaaaagagtagtgagattgagaaagaggtgatctttaaagagaaaatggctgaggatttttcagaattgattaaaaatttaaattctcaaattaggggagtaaagttgatctcataaagataaatgaaaagaaacacacgtttagaaatttgaaagtgaaatcgtatgatattaatgagaggtattaaatcagccagggaggaaagatggatgtcctacaaaggacaacaaaactggaaaaacagctgacttctcagcagcaactttggcagctagaagacatcttcaaagtgctgaggcggggggtaatgtatcaaatgaggatttt

SEQ ID NO: 89651 - DNA, 1014 bp, Homo sapiens
cctatctgccattttttcaggaaagtgcataacacttatatgcacagtttaacaaatattaatagttataatgcaaacacccaagtaacttaaagccacccactttaagaaaaggaacattatcagaatcgctggaaactcccccttcagagataaccattatccttattttatggtaataatccccttgcttttctcttaccagctgtgttttcattatttttaattttggactttcctagttttgaacctaataaaaatagaatcattttatatatattattttaggtcatatgttttacatacacagaacattgtgtttgtaagaatcatttatttggttgtatgcagttgtagttcatttttattactatattccattgtatgaataagtgaaaatatacactaatttaaaaaagtatttccattactgattggatatttggttatttccattttggggcaaatataaacaatgctgctgtaaatcctcttggtatatttgatggtaaccatgtgcacacatgttgatagagtatatagctgggatgcaattatctatcatagggtatgcctacctttctttttactggataacatgaaactgctttttttttttgcaaagtggtcatatcaaactatgctcccacaaggaagcaaagaatataccaattatattacccattgtctcatcttcttgtcaacacttagtattgtcagagctttcaatttttgccattctgatgtgtatatgtatggttttaattttcatttccctgatagccaaggttgagcatcttttcttatatttattggccttttggatttttgtaccctcccaactgttccttccctttggatgcttctatggttgggagtctcagctccccacatttgtactgtttcctaggttctcagctgttttctttgctcccagcctccattcttctcctcacaatggttcttccttgatggggcccttacttgtaatttgcttatttgctctttgcatca

SEQ ID NO: 89652 - DNA, 1029 bp, Homo sapiens
ctttttctccacttcaatagcagttagcaaaaactgtttttctaatttgacagataaaacagtatttcaacttgctttaatttacattcctttgtttactagtgaagattactatttctccatgtatttgtttatattgtatataattttctgtgaattatctgtttgttatggtcttggtgtttttataaatttaaatgcactctttgtaggtgataactattaatcatttttgttttgtttattcaaatactttgttgtcctttttaatttttatttttattacagaaaagctttatattatgtatggaaattgtcaatctcaatctgtgagtacttcttatttttctgaagaagagatagtaattcttttacctatctcttgtgtgttttatatgcctttcatttaatcatttattcaacatcgagttaccaggtgccttttgtgggccggatattcttctaggttctgagaatctaaaattttcatcttcttggagattacattttagcgagaagagagacaataagcaaaaacataactaataagcatggcagcaataaatcttataaagaaaaaaataaagcatagtcagaggacaaacaatgaccagggaaagatttagtgttcaggacaggccactgacaaagtgacatttgcaatagggaagacagggagggccagtatcaaaaggtatcattcaagcagacctggatgagatgacagagggaacagaaagtgcaaaggccctgagatgggaacatatgtggcatcctgagtgtattagtttgttctctcactgctataaagaactgtctgagactgggtaatttgtagagaagagaggtttaattgactcacagtttgcatggctggggaggcctcaggaaaattacaatcatggtggaaggcacctgtattagtctgtcctcacgctgcaaataaagacatacctgagactgggtaatttataaaggaaagaggtttagtggacacagttccacatggctggggaggtctcagaatca

SEQ ID NO: 89653 - DNA, 1028 bp, Homo sapiens
ttcgagaccagtctggccaacatggcgaaaccccgtctctattaaaaatacaaaaattagctgggcatggtggcaggcacctgtagttccagctacttgggaggctgagccaggagaatgacttgaacccaagaggcagaggttgcagtgagcgaagatcacaccactgcactctagcctggatgacagaacaagactctgtctcaaaaaaaaaaaaaaaaaaaaaaagagagagaaaaaaattacctaggaaagctggtgcttaaatcaaggaataatagctagtcgaggattttggaccagttggctactgagtgttagttgggacctgggtcctttccctagatttctcaagtcatgccttgctggggactctggctccgtaggtgtgtaaccatgagaatatatagacccttgtgtctaggatttatgtctagagatggagacattctcaaatatggtcagagttgggggtgtggctagtcacagggttgtgcagatgactgtgagcagggatttaggggttcctctgtgggcaccttttgttctgggtgtgttgatacgggttggggcagattgtgtagggcttgagaagccaggccaggatgttggggagtttattctgttagtggtggattgccattgaaggcttttgagcaggttagtgccttcagggaagcaatgtttttagaaacaccaatgggaatggagcccaaatccaatgaatgatggatgcagtggccctgacataagaacttgggagtccagggaggggtcgaggagtgccctcagttatgggtgaagtctcgggagtcggtgaaaccctcaggctgcagtgtgctcccactttctccagcctccatggtacctttcctgcccactcctccttctctgacaagctggctccactcagcaccctccaatacatgctccttggctgtgctcctgcctacagcactgaccacaccgtattctaattgtagggtgagttccttggggcaagaaccaaatgtgtcttatttaccatt

SEQ ID NO: 89654 - DNA, 1139 bp, Homo sapiens
actgttgaaatcctcaggccttggatatcaaatcaaaagtcactttcccaacctggggccttgtgctggcaatcctttacctccctgggtagctggagcactttcttcaatgtgaaatcaaagctttgatgaagctggcctgtatgtggtaataaaatgatgcccatgtgcacattcctattactcagtaagtacattcatttggctgcagatttgtgaaagcctttcattgctagtgcatgaaaaaggggtatttcacacatgtttcatattagccctgtgatttagcttctgagtgaataagaatcaatgcaatggccaactgccaccagagatcccatttatattgtattacaggctgctacggccccacctttgactgtgatcttgtcagatctgataaggtaatagtaataataacttagatttccattatgtgggctcttcccctccaaggcattcctgctgcatgtgtgccttctttgttttctatctgtgcttgtccagggtgtatctgagtcagccagggtcctcaaagtgagtttcatcttagaaagaggtctcaggatcacttatcaattaatcagttagtagaccaatcagtcattcaatcccatgttaccatgcacagcacctttcaaactcagtgtggccaaagggagctcccgacatagtccccacagccctgggaactgactctgtcctgtaaacagctccattgtcctcctgtctgctaaccctgcttctacgcaccctctcgcatcacatccacggtggctctgcccgctctgtgtgttaatgcctctggactctgccacttctctctgctcctgagtcgtcatgtggtccagctcaccacccccttccctggaccagcccagacaggtcccccggcgtttcctgccaccatccccagcccaacccagtcttcacgcagcacacaggaattgctctgctaagcatgcttatctgagcatgtcattctcttatttaaaccctctcatagcctcttcttgcttttaggataaaggtaagatattcttctcagggcctacaaggttctgctcacctcatcagcctcctctagcatcctcttcccttttggtttctctgcccttatgaactcatcacctcccata

SEQ ID NO: 89655 - DNA, 1817 bp, Homo sapiens
ggccactgccctatgcccagccccatctgaagaatgagttaaatagcgcctgccttctgggttttttcagagcctcaaatgagatagtgtatgtgaaggtcctttatagagttatcaaatgttattgagactcttagttccctacctgggggtgttttcgggtctgggagctgggtttgaggctgcagatttgatttaaaagatgccccttctcttggcatctcatggcagatggtgctgccataggactcaactaggtgttcccatgaggtgctccccctaggtgctctatcccccggggtgagtgcctctgaattaaccccttgcctcctgttctcctttgggagaggggaaggatctgggtgttggtggcagcagtaggtttccctgacatctttactttccctcagcctgttgtgtgtggggggtctctagccaatcctcctgagtttggaatccacctagattattgtgaaagctcataatccatccttcctgggacttgggagcatgccatggatctaagtaagtcctgtaggtcctccttgcctccctggcttgggtctggtgaggattctgtgatagggaatgggggctccaggcaaatcccatgtcctctgggcctggcgtggaggaagtaggatcaggaggtgcaggtgggtgacatgaaaagtaactgggcttaagctgcactggaatcagggcaaagtctgcaggataaatggaaattctctggtcctgggcattgagacagtgttttcaaggttgggtccacatttgactgtgtgtggttgggttaatgggcctttgatgctcgctgcagtggtatttgggtcactcgtgttgctgcctgcctctctagactggagagcccccgccccctttagcagctggctgctgcttcctgctggctctcctgggccccaagctctcaaggctgtcacgaatcctaaaagagtccttcaaaccagtgtcactgtgacttaacatctatttcaaaagatgatctatggcacatttggaggacaatgcagaggggggtgtcacaaactcaagcacatttggataaggttattgacctggctttttcttagtttgctatgtgacccagtgcagttcttttaagttccccagaccttaatgttctcctctattaaatgggcatgagagtctgtactgcaatgatttaatcctgtttccaggtgtacatgcgctctaaaagtaaaaggtgctgtggatcttacttgctaaagatttgagagaattatggcaacactctttcctcaccgagtctggcagtgtataaattctgtttctttaaaattagtatctttattgcttcctgggagcccagggggaacagcttctgctatatcaccttaagttttgcagcagggagaggaagaaagctacattgcccttgactgacaaccttcatatgagtatttaacaattttaatttttcatgattcttctgataaaaatagtacccgactaaaaacaaatacatttgtattttccatctccttaattagtttctaatttgggggttcttattagcttaaaatcatcttgctgaaatggtccttggatgaaaaaaaaagtgaaaaccacaatcaattctagagagatcttactatttaattatgctgattggagcactagagacccctggtaaaacaaacctctcagaataagcttgatttgtgtaatttggtttttaaaaatttgggatgcatatttatcatgttcgactatgtgttgttgctctccttgagattctgacttgtcttgtaagagatgaggggaggaagcca

SEQ ID NO: 89656 - DNA, 1114 bp, Homo sapiens
cactgtcatggtggcattgtacctgtcatgttgccattactataaaaactttgttatattttatattagagtgttgttatgtattataagattgctgtgttacatattataatagtgttccctgtcattttctttgaaagtcatgttttgatcatcttcatagtttcctctttctagacctgctctgaaagctttccttcaccctagggtgaaaaatgacacagagaaaaaatttctccttctcatgggggatggaggaaggccaggccccagttctgggtggctgtgcgtgtgagttcatgggggtgatggccaccagctagttctcttgtcatctggcccttggcaggattatccttcctgtgccctttgttgggggctggggtcacaggatgtactccgggcagtaagttgtgagtgaagtatgggtttcacttccaggtcagagcatcttgttgccagtacaaggccctccagagctcacaggacagcaggaagcattggagacaggggctactgcatcagcctaaaccttgagtgattccaacaggaaggcccctgtggacctgtgatcaacaccagccaggcataagggaggaggaaaccgggactagtttttaatagctttattgagataaaattcatgcctctcatttattgagataaagttcatccctctaagtgtacagtgcaatgttttttagtatattcacaggcttgtcaccactctctaattttaaaacatttgcatcactccagaaagaagccctatatttattagcataaaccctcagtgttctcagctactgcaatttgggagttgtttgttgttactgcagcatggcccagcctatcctgactggcacagaaatcaattccatgcctgcaagagttgtgctgctgtgttaggccgtttttgcgttgctataaagaaatacctgaggctgggtaattaataaagaaaagagggtttgattgactcacagttctgccaactgtacaagcctggctccagcatctgcttctggtgaggcctcaggaagcttccaatcatggtggaaagcaaagggagagcaggcagtgtcacagggtgagagtgggagcaagagagaca

SEQ ID NO: 89657 - DNA, 1118 bp, Homo sapiens
aataggcctgtttattatctctcttttggatgcttcaggggccctttttattttaatttttttatttcataggtttttggggaacaggtggtatttggttacatgagtaagttctttagtggtgcttactgagattttggtgcacccatcacctgagcagcgtacactgtacccaatgtgcagtcttttattggatataatcttgattctccttttgtttattgtctgtctttccccactagagtgtaagctccctgagaacaggcaccttgtctgttttgcaatctattgtctcctcctgggctatacctgggcatattcatttaccgactatgtactcagacactgctgtgtgctaggcactgttctgctgtgaataagccagttagtgctgttggggtatgtgaagttgagtcagcccaaggccctgccttcttgatctcttcagcctagaggcagaaatgaagcttgttcatacatactctcatgtaggcagggagggaaggtgacattcaagaggtatagcccaggagggccattgttgagagatgttagccctgatttgacaagggtggttggcttaggtagatggagtcttctttcagatgttctgttgggagtctgggagctctggcagctgactcacctccaggactggagttcctctagcttgactggctaccacctctgtctctgtttatttacttctttggtgggcaagagctccaagcatactgccatccttggagagtcaggaatgttgtgtttttccacccgcttcattcattggcagcctcctcagaacagctgtggacagctgtctgccagcatggatgcagggagggtttctctttggggccaggggcacactcagccctgcaggagcagggaattcattggtggttcacaccctactgatttccaaaccccactgaactggtgcctgtaaaaacagattcataaggaaattaaaaaactattagcattcagtttactgcttattttctgattattaaagcaataagactcataatagaaaattgggaaaatatggaaaagaataaaatcaaaaacatcctacaacacccacattttggtatatttccttccagtctttt

SEQ ID NO: 89658 - DNA, 1128 bp, Homo sapiens
ataaatttatttttctttccaagtggctttgtggtgaatgggcttaaataattccctgactatcctgtttaaatttgctccctctcccccagttctttgcctcctctgttttatttttctccatagcctgcattatcctgtgcataaaaacgagtgcataatattgcattaaaaaaggaaacaaaattaatgtcttaaaacgaccatccttttattatttgctcagagttctgcactttgggcaggagttttagggggtagagagtgggctgggaaaaggtcagggcatctctgttccttgtggttcagcccagggccgcttgggaccctccattcttctctgcgtggtgtctgtgtgtggttagcttgggcctcctttcagcatggtgttgttggctttattgaaaggtgactggcttccctcagaacagaaaagcaaaagctgctagacccggagtcacttgcgctacgtttctgagcatccagccacacactgggaagtgtggcgactatctcgtcccctaggagtgtggtgtgaaatgctgggacactcgatcaatgttagctctttcattagacacagccctggactgtcagagacccagctcttgaggtaggtgacttcctgtgtgacctggcccaagactcactccctctctgaatctttaaaatggggagaatagaaatatgggctagccacatgtctacctcaaggggctgcttggagggccaaatgagataaagagtaatagtgatgacaggtgttgggaactgggtatgaccaggttttcagaattttgctccttggagctcccagttccagacacagggagccccgcctctgccaggactcctgggggcagggtccagggtgcaggggaaaggtcccagcttccccttttgaggtggccaagcaggccgccgtcaggtcagcacgtaggccttgagtccagccacttttgttgagtgtttaaaatttaccagggactttacatcttttacatcttttctcatgtaccctcaaaacagttctgtaatgcaggtgatgctttgccccccgacagctgttctatggcaacacggccgagtaacagaaccagaactccatcttcaacccactgggatcca

SEQ ID NO: 89659 - DNA, 1049 bp, Homo sapiens
agaatggctgactgagcagggggccgtgacggggaagtttccactgagcggtgaaggcagaagcctgcctgtggccagctcaaggaacagaaggagatggcctggagactaggagaatagtacaactgttttgaggagtttagctgtaaaggggagagacatgtggtggtatttgggggaaataaggtcaaaataggagcattgacctgtgtgttcaatccaggggcaagtcaggggttgctggagccctggcctatccccagcccccagcggttcatccacaatgacaggagggagtggcaggtgtggggccgcgcatctaaaatggctcctgcagcacagctgtggtttctctccagcggcttgcggccacgaaggtgcagaggcagagttacaaagatgactttaaccagggtggaggtttctccagggaatacagtggaggagagaggggtgagggaggcacaggagtgatgatggtgagtcacctggatgctgagccaggccaggacgggagtgggtacctgaggtggttgtggaggctgacaggtggtagggtcagtggattggaggccacccaaagaattgtaatcctggtagcaaagagactgagctagaaagatggtgggggtgtggcgtgtgtccaggagtggggtgtttgaaatcagaggtggaggaatgcagtcatgggtcaggagagggctgggtgtgagcatgggagtgtgtgggggagagggagaggccaggaggagagcgggtcgtgaaactcagatccatcttcatggatcttgaaatcaccaagaaaggacaaaaggatgtgggaaagggtggctgtgatacaggagaaaagtccttgaggaatgtgggagcaaggtggtggctgggtggcctggcggtctacagctgaccgcatggagggtcttgtctggtggtgcattaacttatttgcataatcctttttttaatatacaaactatgcttattgcacagctaatagtaccatgatctgaagtggaaggaggaggaggattaggatagattggaaaatt

SEQ ID NO: 89660 - DNA, 1922 bp, Homo sapiens
ctgcaggggaacacccactggggtggggctgggggagttacaaagtgttggcttccgcccttggaaggatgggggctggctaagtggggagatggagccgcataatctgtaatccatagtctaagccgagttaatttactaagttctgaattaacttgactaagttccaagttaacttgaccaagttccatgtgaaggcaagggatgaaatccgaattgcatatccttcacctcatctctggtctgagaccaccccccggcaccccctcccccaggacccctttactctgaggtgtgacttggggagcaatttctccatgtgtgtgaagtcggcgcgaccagtgtgagaaagacggtctaacgggcatgttgtccctgtgccctagatggcccctaggtgagcattagatttcctcaggttcccgggcacagggccctcggcgccctgcggaaatgccacctccttatatcacacagtggcctggtgcttttgtgtcatatacaataccccattgaaagacgttgtttgttgaattatccagtgtcctgcccagggctttctatcaggacgtattttggtcattatccttgaattctcccagacaaacattatgtctgctgtctttggtctgacagtaggaactacataacccactgacttctcgttttgcctttctcttaggaaattttgaaaccaaattctgtgtctgttggccgttaatcattagatggctcagacctagcagggccggctcccctgcccccacattgctggccttgtccagagcgtgtgactcaggagccctttgctgtgaaaggggcttagtgcccacacaacagtggacgccacccggtcaagtgggatttctggccttagggatgtgcccaaagcattccccattgagggtccccagaaggctcaggggacggaaagtggctttctggcctcctgagcctgtgtccaagtccagccttcacacgggagatggctaaaggaagggacagttccttcctcgttcttctgcttggccctggatgataacagagagatcctccccactacctctctaaagaatccgagggacaaatgagctttcaaaatgaaaatcatggctccatgaaatgacactcaggtgtccctcactcctggaggagtgaaaatggtggccgataaggaatggcctggcagccccagcaggtggcgctgctgctatttagtaatgggggtcctgggcgggaggccggggccgcggctggggctgccccacactggggttgaagcctctgtagccgggttcccagacctccagatgagaaggagtaactttattgttccctagggctgtgttagctgttgccaagtcttctggaaacttctaggacatgctaactcacaggcgtgaggattagtaaagtgccccgagacacccaggagcagagtcctgaaaaccatgccccacctcgcctccccaggccctgtgcaccggcgactgttgctccatgtcacccgtggtcccacggaggtgaggtctgaccttattcacccaggccaacattacggatcaggcatctctctgtgtcccaggcattgtcttatagccattatggactgagtttaagtgcaggggctggtacctgtcccatagacggggacatggtattctcctaatgtccccttagtgagaattcaacaaggagcgtaatgcaccaacagtaacactagcgaacattcacagagtgctttccgtgttccaggaactgagaaggtccttgctttttctaatcttaccctcacgttgtcccatggagcacgtactgttattgacctcactttacagaccgatgtctttggtcggatgtaaccttctcagtaagggcttgtgaacactccatatgcctcctcatcactcaagaatcgtcac

SEQ ID NO: 89661 - DNA, 1018 bp, Homo sapiens
tttgcaaatggtttggtgattcaaggacaacatggtcccccagactccagcaactgctcctgtcactggtcatgcctcagaggacccctgggtcccgacagccctgggcgggccattggggattagggtttctggaaggctcattccctttgcaccaaagatagaaacctcagcagagtcctcagtgacgctgcgtatttccaggtggtcaaagccaacacctggggtggagatgtgggggcaacccacctggatggggcgaagccctgggctcagtgttccagatctttccttccagcgcactgctttgtgtgtgtggcagatgaaccatccacagcgtgctgggcagaggccgacagggagaggagtttgttccctgcgtgcagaacctctgcagcggcgggcgctgacaccgaagcacactgggtggcagggggaagcctccctgggaataaagcaacaaacacaaacttctgtctgcaaagagaataatccaaagttgatgttacatcgaccataagtaagaacaacaagggagtagcaggcctagctaaacacgccctggaaaggctacatactgtggttgtgtccagaaaacaattttggactccaggaaccccacagaaaatgacggcctgtcccttggacccctgcttgcagtgagaccactgtccctccgagcatcagtggtctcacttcgagcagggggcacaagggacaggccatcatttcctgcccccgagcctcaccctcctcctgtgaaataggagtgctggccttgccctccttctggatccaagccttcaccccccttgcccacttttggggtgctcctgaaggaaagagctctgattattaaagcattagatgtagtcttgtgttctccaaagaccctctttgttccttttggcaccccacccccaaagggttcaggaggaagctctgcctctagcggtctaggccctgctctctctccagagtgaaaacctcaaggagtgttttcattactcctggggac

SEQ ID NO: 89662 - DNA, 1030 bp, Homo sapiens
ggggtttacaagtttttgtattcatgagagagcaggagttgaattaaatgcatgtggtcaatcctgtcgagtcagaagtctaatttgtttggatttaaatagttagggaaacaggaagaaggtcggaagactgagctctgtgtgcttgtcaagaggagcaacgggagcagatggtgtcgtgtgggagtcggggataaagcgatctgtcttcagagttcaggcaggagaactggcttgtggctgagccctggacaggttgtatagagaggataaagggggtgcaggatgtacctgaatgccagtacatagatttttttctttgctgttgttcaaagaactctaggaggggacacacacacacacacacacacacacacacacacacacacacacaccaagcttaccaaccaggagatgggcagagtgagcagagtataagccccagtcgtctgaggggcctgggaaaatctctgcttggattcagaccttacaaagattcagaccctacacaagagccaccagggcaaaagtgctctgggactcaaggataaggctctattgtcctcccctgcttaggattccagccacaccctgcctagctttgtatttgccccttcctggtgggaaagactcttcctcagcaagcctccagagccctgggagcagggctcttgtccgacaccacctctgagacagcactggtacgctgttggagctccatcaatcacagaaccagagaatcgttgctgaaattgccagagcaaatgtgaagccgactgtgtgcaaaggtgagcctgaaagcagcctcttcaaattgcccttaagaacttgtaaggcaccaggtagttgctggcacctctgtctctgcagccgcctgagtcccgctgtcctttgccgttactaagaaatgtggcccccacccccagtggtagcccagtcccagaaggtctcatataaagtacaagctgtccttgccttttgccaattcacatttcaacaatccacgcattctgcagttcctgaaaaccgc

SEQ ID NO: 89663 - DNA, 1047 bp, Homo sapiens
ccaggttggtctcaaactcctgacctcagattttatccttttcaaaaacctgagcttgttaattgtctcactaaatgagacttaagtttttatctttgtaaaacaaaacaaaaaacccttgctcaactcaactgggaatccacttgacttctggaggtctggaaacaaagggattgtgcccaagggccactctgggtgttcatgggccacaaaaaaacaaaaacaaaaacaaaacaaaaaacaaaaaacaaaaaaaaaaaaccacccttactcctatttctggctcaccatacacgaagatcagtttccttcttgcctggatcttgtcctctccacctctctgcctctaattctcccatccatcaaaatctctctcacttccccctctttgtaagaagtgtttcctaaccattctgctgggacattctagaatctttgctttctcagaacatggtaccctgcctcattacttctcaaactttagcgtgcatatgaatagcatgcagatctggtgaacatgcagcttctgattcaggaggactagggtaggcctgaacttctgcatctccagccagctcccaggtgagaccaacgcggctggtcctcagaccacactttgagtagcggaaccctacaacaatggttcccacattttgctgcacaatgggctcctgtggaggggtgggttgaaagagactggtgctagtcttccatccctagacactctgatgtttttagcatggagcttgacccaggcattgggattttaaaatctcctcaggtcattatactgtgcagtgtgggaaccactgccttattgcataaagtgaatatggctaagcctattattatttcatctgtgcttaccttgtctcgaccttgatagactacagccctctctaaggcaggacttggtcaacattttgttttgagcattgatagatgaaccaactgattagatattaggcccttacgtgcttttctgatgatgaatcggtgttaatgagcatatatgtgttgccacagagaaatgtactagatatcaag

SEQ ID NO: 89664 - DNA, 1066 bp, Homo sapiens
aggtactcaacaaatgctgattgatggagtgaacaaatgaatgaatgaataatgaatgtggctttaaacaagctacagaaagggttagccccaattgtggtgggcactcgctctgtaaacaattccagcactgaatgcatacatttacaaggttgctgtaactgggttgtgccagagcacctcacttcttccctctcccttcttccaaattctgtgctgtgcttccaaaatagctgtgctgcttcatgtgaatctgatcagtaccagaagaagataatagatctccctgacaagtgtgtggtcaaaaatttaaaaagcatgaggaacttgcagaaatgacaaaggataaggtcttacagaggtttccaattaggaagaaagattagatggacaaagatgagttcctaaaaagctgcttgcatgcagaaaaatctctgtgtggaactgtattttaagcatactaggaaattgtaagtcctgttccaaatatctttagtaaattagacaatcgactccaacttgttaattttacaagagaatccagatgctttaaggagactggttgtaccattctctctgactatagtgaaatttatcatttcagaaattcaattacttgttccattcccagaaagcagtgctaagcttttgttgtgtggatgcacggcattaaagagtctgcaccacataaaaaggtctttatgggttgtcttaaattgggcagccattggttctggccagcaggctcactaagcaatagtggccctgctgacgtagttggtatctcattcccaccatggctctgtagcagacagtgatctgacctactttcaggggcacagcggtggctcaagaaggaatggcggagaatttgagaacctggactcaggatattgaagctcagtctttaggcgcttcctggccatcctccactgccagggttcctgtggctctgactgagggcagctctcatcccctccctgctctctgtctccagagcctctgcctcctgcagccctcctcacctgaatccattgtccttgggcaggaatagcgtccattccta

SEQ ID NO: 89665 - DNA, 1035 bp, Homo sapiens
aatatcctgagtccaggttctcaaattctccgccattccttcttgagccaccgctgtgcccctgaaagtaggtcagatcactgtctgctacagagccatggtgggaatgagataccaactacgtcagcagggccactattgcttagtgagcctgctggccagaaccaatggctgcccaatttaagacaacccataaagacctttttatgtggtgcagactctttaatgccgtgcatccacacaacaaaagcttagcactgctttctgggaatggaacaagtaattgaatttctgaaatgataaatttcactatagtcagagagaatggtacaaccagtctccttaaagcatctggattctcttgtaaaattaacaagttggagtcgattgtctaatttactaaagatatttggaacaggacttacaatttcctagtatgcttaaaatacagttccacacagagatttttctgcatgcaagcagctttttaggaactcatctttgtccatctaatctttcttcctaattggaaacctctgtaagaccttatcctttgtcatttctgcaagttcctcatgctttttaaatttttgaccacacacttgtcagggagatctattatcttcttctggtactgatcagattcacatgaagcagcacagctattttggaagcacagcacagaatttggaagaagggagagggaagaagtgaggtgctctggcacaacccagttacagcaaccttgtaaatgtatgcattcagtgctggaattgtttacagagcgagtgcccaccacaattggggctaaccctttctgtagcttgtttaaagccacattcattattcattcattcatttgttcactccatcaatcagcatttgttgagtacctgctatgtgacattgctgtgcagagtcattataatgggatctgggggtctattgccagagaaagggaacccacgcacacacttctggatgggcactcgctgccgtcagtgctgggtctcatgactgatgctcttatgagca

SEQ ID NO: 89666 - DNA, 1076 bp, Homo sapiens
agcaggacagtgatgaacctgttcattcatgtgaggccttggaggcttccccccggcacagcggggtacacctcagaatcttagcatggctgcgcaggtggtttaggcaggggctccctccctgctacccacagatgcccctgccctgtgcgaacgtgactactgctagtttgtataatgagctgcagcagagtgtgctcagaagaagcagagcagagcccctcaagcgtgggccgtgcctctctcactctaacctcagagcctctgttcacttcgaagggtgacctcaggcatcccttcctccacagctccttggaccttggatgttcttccattgtgactccactcaatttgcgtgtccctcttccccagggcccatgcccctcttggagacagaggtggagtcttgttttcctgtgtctgtgcacacagcatgctcacagggcaccgtgggcatcctctgagggtttgttgagcatcactcctcttctagagttggttgatgcttcagttctatgatggtctttgaacctcctcaagtacataaaactcttcacaatgttgcccacttctcaacagttgtcatttcccccttagaggccagaacgcaaacattgctttgccttctcttgagcttgctctctagagttcttgaggctctgggtcttatctgtgccatagacacaccacttcatgaggggccaggacacaggccatatgtgtctcatcatgcccaggtggttttttcaggggctgcagaatggaaactctcattcctcatggccctttgtacctctcacatttcttgggcgtctttctgcccctggtctgcagcagcttgaaggcattgccattttcagttcagaagtgtgtccaggacccttaatagatatccattatccagggaatggagcatgtcagtccactccagttccattctcttgtgcgtgtcccgtgtcaatgagcagcatgaacaccatgagcctaagtggcctgtgttcaagtctttcctgggttcatgacctggagaaggcccgtagccttttggtcccatttggtcttcgacacagagagtc

SEQ ID NO: 89667 - DNA, 1090 bp, Homo sapiens
gcaaacttggagtgggagaggtctgctttctttttgccacctcttaattctacgctgtctgccccatcagtagcctcatgtgtccctctgacttctcactctcaatacgaaaatatgcttctagaattgtctttaatatttttaagccccattccttgacactgctgtggcttctgtatcccaggctttgatggtcatctgtgactacaggaggccccacattccttttcacatgtgggctcatgggcaaggactctgggggataccaagtgcctctcgacatccctctctttaagtcacagctgctatctggaacttgctgctccttttagcacctcagaacactctaccagtcatagagtcccacatcctacaaaaatgaccaggtcccccagatcttgcccaccgggaactgatgaggaattaacctagtcggagtcctatatctatacatcagctcattcacatgagttgttaagatagctcttttggaagtgcagtccatccttattactcattgattcatatttgcacattcgcctacttgtaaaacttatttgtaacaccgcactcaatactcatggtgtttttgcagtcagtcattgacacacaaacagtgaaaaatttgagttgcctgacctgcaagatcccagtccaggccaaagtaacactctgcctccttgtttcagctctcatagtataagcaagcacccttctcatggttctgtttactgccatgtttttcacatttttgtgcttttccttggtgaatttgctattttaaatggctcctaaacatagtactgaagtgccgtctactgttcttaagcgcaaggaggctgtgatgtgccttccggagaaaatgtgtgtgttagataagcatcactcaggcatgagttatagtgctgttggccgtgagttcaatgttaataaatcaacaatatgtattaaataaggtttctttaaacagaaacacatacaaaacgaggttatgtattgatccagtggtgaaaatgttgtgaccagaggcttgcaggaaccaaaccccgcatttcccctaggagtaatagttcagtattcactaattcag

SEQ ID NO: 89668 - DNA, 1042 bp, Homo sapiens
ttcaatgccttgtgacttcccactgtggtccctggactagagcactagcatctaccaggagcatgtttgaaacgcagaatctcaagcccatcccaggcctcttgcatcagaatctgcatttaaacaaaatcccacgtgattcatatgcacattccggtttgagaacccctgacctaataaagacaacatgcttggcacattaagaaatgtctgttttgttgtggggtggggggaggggggagggatagcattaggagatatacctaatgttaaatgacgagttaatgggtgcagcacaccaacatggcacatgtatacatatgtaactaacctgcatgttgtgcacatgtaccctaaaacttaaagtatataaaaaaaagaaaaaatgattaaaaaataaaataaaataaaaagtaaaaaaaaaaagaaatgtctgtttaataaatagaattttacttacaaggacactactaataaaagggccacatttcaggtaaaaaggaattggcttggatgtaaaaactgaagaccattttggagctgtgggattggtgacggggtcctctgagaccccaaggtctccagcactgtcatggctcatgagaatggtgcttctgggttccttgagatagcagtgttgagtctggctgggaagggttaaaggaccttaaaccttctcccttctcccaccctgcacttcccactccatgggggctgcaccccagcttggcaagagccctcagacctctgctgcagaatgtttaccacatctgcggttgcccctctccctccatgctgccggctcccatcactgaagccctggcagcaagagaagtcagccagggagaaccaagtgtaaagaccactgctgggagctgtgctaaggaggcacttcacaccctggcccctttgtagcctgcattgctaagccggggcccagaacttgtgtgtggaagtggtagctgaacctgatcctatgggggcatctcggaggctgccaaacccaaccaggtgctggttggggaccgagagccagatgggc

SEQ ID NO: 89669 - DNA, 1042 bp, Homo sapiens
tccagtttcacagagaagtgaagaacgagtgtgcctctttttatgggacctttggaatgacaggaatggaagcctgagccctctccacccagcactgccctgtcactgccccgggacgtccacgtgggctctgggaatgctcctttgctgagacaggcttgggtagtacaagttcaagccctcctctgttgaaatgtgtgtgctctgtttagccaagaggtgtctgcatccgagctatgcagagcaaagtattattagagccggcatcagtgtgtctgtaactgaacccagctctccctagcaaccgttgccaacaacacatctaacagaaggatgcgatacctttttttgaaaaaaaaaagtttgtctcaaccaagtcataaacacagcaggcctgttgtgaaaagacaacacaaaatcagaatctggtgtgtgaccagatttcaaaataaattgctcttctctagcaccttctagaagacagcctgttaaaaagctgaccttgagctaaagagcggagaaactcttcagagtttctggctgggtcatcatcaagcattgtgttttgggcttttcatacatagacgctcagttgagtggtgactctgtgggatctctgggaatgactttagcacagaaggggcactcaagattttctggcttggctttccttatcagtgaatctctcaagtgtgagacaagcctgaagatgtatcttacccatacctcatcctggatgtgtgtgttgcccccacttctacccgtttctcccatcctcctgcccttctccttgtcccatgttttcaggcttgggaagaaaactgggccattcctctaactctcttcctaaggggaaaacctcgttctcttgtgattctctcaaggtctctggaaaatcaagtcattcccctttgtcagaagtttgaagttcctaactcttatcttttacataggaagggaggagggagactgatatcgattcctggagtctaagttttaaactcctagatggccagaatcctggctgagttatcggctgtcc

SEQ ID NO: 89670 - DNA, 1747 bp, Homo sapiens
gatccattcaggccaggagtcaaggctgcagagagctaggtccctgctgttgcgctccagtgtgagcgacagagtgagactctaaaaaacaaaaaagaatccatctcaggaagtcatcaattgggatttcaaaatccaccctgtggaataatcccactgtgtttccaggggtcgctgagtctctgagctttctgggcctctggaggtcaagggtacctgaagaaacccctgcactctccattcgccctagtccctgtgaaaccacacaggctgctggccccagttcccatctcctccttgcatcctctccctcttctcagaccccctccctcatttctgcacacccaccgctgagccgatgtgcactccaggcatgtaaactaattttaatgttggcccaagccaggcacacccagggatagaagcacattgttctgtgcattccaaagcttgagcaaaagccctggccatacccacatcgagctcccctccactagttgctagaaatcagaaaggctgaagcaaagggccagaggcagtgcaagccgctttccccgtgggcaggctgcacggaagcttgcaaaagcccagaaaagggctgtttttctaaaaatggctggcatctgagctcccgccctgccccctgtgggccatctgtccccatgctgaagcccgtgccctgcaagggacatgcagagttggcacacacatttccctgaaggtgggcaccaacaggcctcgtcaggctggcctggcatcacaggaggccagcagtcacaggagcttgacccctgcccaggattctgtggcagccctgggctcccccaacaggaagagccaatgcctgactcctatccatgttctttgcccctgcggccagagccacagtggataggagccgtgtgcctcgttgccaatcttgttgtctgcacttgctttgggatgagtaaatatgacctgcttttctccaatctttatttcttctcaacgcttattgagcacctgctatataccatgcactgtggcaggtcctgtatgtctctgttcatttgccctccactgtggtctttcaatctgtttgtgcaaatcttaagcattgcattcaaggacccaggtgggatacctcaatgtcagtgcttagaccagatcgccctgactgttcagtttgggtggggcgggggaacatgtggcttccaggagtgctaagcctgtggttctctctggagctttgaagtgctcagtgagacagagcagccgatgaccggatcataaacaagcattttgatttttgaatctgaaaataagcgaggaaagaaaatgaccactgatcctcagccagtcctggaaagtgcccagaacagcagcatgccaggtgtccagtcatcatatcatcaggggggcctgggtgctgctgctgtgccaactactgccccaggcccccagggaccagtgagcttcctgcaaaaccaagtgcccagcttcctgcctctttgccactgcgccactgtgccactgcgccactgcgccactactgtgttcttcaaaatcacagagagccccgctcctgagaaagcccaaagtgcctttctgtgcacggcatgggcttttacaagtctcatgggcagtctactgcaggccttgtcagagactctagatgtgcagaggctgagggagccttggacaaaagtcactcctttcccgtgaaaagtggccattgccctgtgttgttaggagcgtgggtggctca

SEQ ID NO: 89671 - DNA, 1005 bp, Homo sapiens
agacccattaagcagagagggcttgggagccagcacgtcaccatgtcatgcccctgcctcccagttttccgtagagcaaaggccatacgaaagaagggggtagcttaggaggtatttggggaaagccagactccagctaaagctggtgaatagctataatcggaataagtgcattcttgagcagctgcgtattggagcgccacatattggacccatacttagcatggaccccattaggcaaccgtcattgcattattctgagtattaaaaaaaaaaatgtggcaaggggagtaatatctctaaagtggggttcgaagcacagtcacctggaatcagccttccctgccatagacccttcctttaatgccttaccacctgtggcataagaaataactcaagcggccaagagccagccacctccccctggctctagttgtggcgccatgcaactggttgactctgggtggatctcaagcgtggcagccctacacttactcttctgttaaatggggtcataatacccatctcctcctcctgcctactgcactgacattatcattgttaaaatccactgaaatgcctgacttttacctgtgttcccttaagactcctcctccaggagaaacttgtgaatttcatagcagcatgtttttccttttccttttgatgattccattcattcaaggttcttaggggaggtcccaggcagggaaagcgccatgagatgcccacgcagagattcttccacaagtccaggggcccccggcacagtaggacttgaggtttgggtgcagcactgtagacagcccaggatccagccacaaggaaagctctccaaggggccctgggactggcctggaggccccacagggttccctgagctcagtactgtgaaaccccagtgaaacaggcactggcctctgcctgacacataaaggggggcagggccagctcagccagagggcagtttaggaacatcagaggaaggggcaagccctgtaagtg

SEQ ID NO: 89672 - DNA, 1120 bp, Homo sapiens
tcagcattcgctttcccctccttggcccagatcccaggccctcagtgcacccacagggccacaggtcaggtgcccgaggctctgggaagctgcaggcggacaggtcctggggctggcatgagatgtggttcagtccaacctcggcttgggttccctcctctgggcctccgggctgagttggcggggccacacagactccttggctcctgtgccttataaacagggctgagtgtgagtgtggagcttagaagaggaatgcccacgcctgtggcccggggcagctgccaccacccacccccactccactggctaccaagccaccagactcagagagcccatggggcaggagtgggaagtggggagcttcgcctgtagacccttctcccctgcccaggcctggcttcccagaacaccccagattacagatgtttttctccttcatctccaattaacatttacctgtcctgggtcctaacctttagtgaatgacagggtgtactgtccctcccttcctatctgggaaaggctgatgtcttagctgggaagagcaactgggatccaggcctgttagacacagggtcccatgtaggccaccacaggtctggaccacctgggaggcctagctggggggctcccaggggccagtccaccaaccacagctggtctacattgcaccagcacggcttatgtatggaatgacttgaaaagtcgtcgactgccctttctgggaaggactggctactactctgagattgcatccttcctaccatattggcattaagttgtcctttcttttatgatatgacggatgaagctttaaaaaaaaaaatgcttagcaaaataaaatgtgggcaaccctcaaattttaccagtccaataaatcttggagctcaggactctggttccagaacagcacggttcacctggatacccagctctcctggcactgaggagcccggggataagaggaactgttgagtgtgtggggtacagcctggggaggcctccgaccctggggctgcatgcctcaccctgacagtaacttgcagcttgaactgccagttcatctttacacctgggatttccaccccaccccacctcctctatcctctcggctgga

SEQ ID NO: 89673 - DNA, 2090 bp, Homo sapiens
gggttctagctctggctgtgtcatcccctggtactccagcagcaggctttctgggtcctggttttctcatcaggatgacaaggggctggaggagctggccttcaaggttccatccagttgaaagatctgtaactccaggacgttgctgaggctttttgaggccctaaaagcagactacccaagctattaagggtccctttgcatctgtgctctgcagagaagaggctttgttggccaggtgggcacagatgctggtgtactggactcctgatgggcaggggcctggagagaagcagcacccagcgcttcctatgcttaaagaaaggcagggtcctggtcaaagggctgtaagagcctgggcaagtccaggactagcctcaccgcctccttctttctgtctcgtcctgagagatgagctggtgactgggtgcagtgggggggcgggtgtcttcattctaggagtcaccaatgcctgtccccactaaccctctctgccaatgtgttttctagattcccaacttcttctggagcctggggatcggtcacactggtgcgtggtggcatactgggaggagaagacgagagtggggaggctctactgtgtccaggagccctctctggatatcttctatgatctacctcaggggaatggcttttgcctcggacagctcaattcggacaacaagagtcagctggtgcagaaggtgcggagcaaaatcggctgcggcatccagctgacgcgggaggtggatggtgtgtgggtgtacaaccgcagcagttaccccatcttcatcaagtccgccacactggacaacccggactccaggacgctgttggtacacaaggtgttccccggtttctccatcaaggctttcgactacgagaaggcgtacagcctgcagcggcccaatgaccacgagtttatgcagcagccgtggacgggctttaccgtgcagatcagctttgtgaagggctggggccagtgctacacccgccagttcatcagcagctgcccgtgctggctagaggtcatcttcaacagccggtagccgcgtgcggaggggacagagcgtgagctgagcaggccacacttcaaactactttgctgctaatattttcctcctgagtgcttgcttttcatgcaaactctttggtcgttttttttttgtttgttggttggttttcttcttctcgtcctcgtttgtgttctgttttgtttcgctctttgagaaatagcttatgaaaagaattgttgggggtttttttggaagaaggggcaggtatgatcggcaggacaccctgataggaagaggggaagcagaaatccaagcaccaccaaacacagtgtatgaaggggggcggtcatcatttcacttgtcaggagtgtgtgtgagtgtgagtgtgcggctgtgtgtgcacgcgtgtgcaggagcggcagatggggagacaacgtgctctttgttttgtgtctcttatggatgtccccagcagagaggtttgcagtcccaagcggtgtctctcctgccccttggacacgctcagtggggcagaggcagtacctgggcaagctggcggctggggtcccagcagctgccaggagcacggctctgtccccagcctgggaaagcccctgcccctcctctccctcatcaaggacacgggcctgtccacaggcttctgagcagcgagcctgctagtggccgaaccagaaccaattattttcatccttgtcttattcccttcctgccagcccctgccattgtagcgtctttcttttttggccatctgctcctggatctccctgagatgggcttcccaagggctgccggggcagccccctcacagtattgctcacccagtgccctctcccctcagcctctcccctgcctgccctggtgacatcaggtttttcccggacttagaaaaccagctcagcactgcctgctcccatcctgtgtgttaagctctgctattaggccagcaagcggggatgtccctgggagggacatgcttagcagtccccttccctccaagaaggatttggtccgtcataacccaaggtaccatcctaggctgacacctaactcttc

SEQ ID NO: 89674 - DNA, 1364 bp, Homo sapiens
gatggatactttgcagaaacaagtgaatgcctgatgagtcaccttctccctgtccctgtcttgttttccatatgttccagtacgtatgtgcacacagaaacacacataacacacactcgtacacactgacatcatggacacagtcttgcacacgcacatgcacaagcactggacttccaagctacatggggggtggtgaccggccagttttctggtgttgatttttagtgggggttgggggttgagggaaaggaatgagacctcagtgtcccctttttgtggagcttttggggcaggcatttgggaaggccagcttggggtgtctgtagggaaccgctgctctgggtgtgtgtgtctgtggctgccccagcaggccgcagtgtgcacatttgtatggccttactgacgggcacctccatccaacactggctgctacttaaaacaacaacaacaacaacaacaactgagtggagccagtgggttcccaggtcctaacacgcctgtaaaagttggagccagttagtgtcctgggctgccccagttacccagcctgctggggcagcaggatgcggccccatcttccgccatggaccccctgcagggtgcaacccatcatcattgactctgaacccagttactccagaaacacaaaggccacaccaaaacacatctcacactcaacccctgctttgtgccccccaggtccccaagaggaggagctggggctgcagggagcgagggcaaggccctgaccgacgtggggcccttcccctctgcttttccccctctgctgtccccatttttgttaacaaatacaagacttccggtctccaccctgctgccacaaaccacagcgttcctgcagtctggctgggctggggagatttatggtcccaagtctgaggcctgcccgctggctcctacttaaggaggagtcagaatgcccgccgccggggctccctttccctccgtgtgaccccccttttaaagtcctccaagtgcctgttgaggaaaattaccttaccagaatcaccccggcccccaggctgcctgtgggaagactgtgtagggaagcggggcggggcctgcaggggagggatgagggcggagcagggcgccctgcaggctccagatgcttctgtggaaggaggggagagagggggcacccctggggatgggggtgccggcagagaaggggagaagggggacgcatctatttgagacacataatcttctgtctgggctggaggaagctttgttaaggtagcccgggttaataccggtctgcatgttgtgatttggcattttgacatgaattcaccctttgtgtacagggctgctgctgacacactgagactgttttc

SEQ ID NO: 89675 - DNA, 1074 bp, Homo sapiens
aacacaggctgaagtcctctcctttctcaacacccacctcccccttccctttaaagggaggattttatgctttaagggaaatggggaaggttgggggggggcaacaccttaaaggaattttaggcagattcagcatttttctggtgttgctccaaaaattccccacactgtaataaaaagatacaactgtgagcaggcatctgattagtgagctttttacaacacagcttttcttttggatgctttaaaatgaacacatactgttttaaaacaagcccctgtacagttttctggggagggggagaagtttgtggaaaataccggaaaaggttataaagctgagggaaattaacaaaggactgtgagttttgccttcagaggttaactatcagcgagaggccaaggctcttccttagtccttgtactgactgaacttcccagcccctcgacacgtggcccgggaagtccctgggagcaaagcgtccacacagacctttgtggggagactcgtgtgggctgtgggcccgattcagggaactgtgtttctgtgaagatgaagctgagcatttcccagaaatgagcccaaatggcggggaattcagggcaaaggggaatctctgtagtggcaatgggggatgtcgtgcggggtccccagaaggtgtgatgtccacacaagggtgtgtgttcgaggggcctttgctgttgccgaatggttttgctggaaagcttgttttttgtgtgtgcttagagatagtcccggcaggaggagactggagctgtcctaacgggaggacagaggctgctggtgggggagctggaggggacagcgagggaggagcaggcaggagtctccctgcggtgggttagggcaccaaatggacttcagggcccttgttcacacacagcagcattcacgacatccatgcattgcagtttttctgggctgggccattaacctcagcagaaaaatgctttttccagggggtgtctggcagcacattgctggcgggctgcacagatgaaacagaaacccacctgacacttccccgtcctgctacagatctcaggctccag

SEQ ID NO: 89676 - DNA, 1924 bp, Homo sapiens
tctgggcttgaattgcagctctgcacttcggccagtgacttgtgcctcacccctactactccctttttttaagataggctggtgatagtatgcagcctcagagggttgtcatgagccacttagagaacacagcctatgcaaagtaaatgcttattaagtgtaggcattggcccagaactgttctaccatggggtgtggggatgtggagacaatcaggaagactggtgggcattttctgagcggctggagaacccaggagcctcagagatgagaccaacgtgtgtgcagcactctccacaagctggccccaatcacttttgcatcaaattggtacagcaaccttatgaggctggccttgggggaaccctgttttagggatgagctgaacttaccgggaggctgcatgcgaggttggtgtgaaatgcatatctggctttgtagctggtcggctcacctctggggttggcacaggggcgggggttctgccatggctagaatgcgctaaggggtggaaacgaagcctgctgggcccgggaaccagagagcagcctggcctttgaaggagaccctgtggcaccccctgcccacccccaagtccagccatctcacttcactggagatgctgcaaagcatgaaaaaaaaaaaatccagtgttctcaggtcagccttccaccagccaggattcatcgtctgatctgtttggggagagagcatggggtggtggagatgggttgggccccagtgttttctgattaactcgcagtttacctgaaacattttggtttgtttcctccatgaggaactcactctaaaccccagcattgtctgtgtttcctgaggagtctgagggagctctggggtcctatttcctcttttggatgaggctgtgagcatggtggattagagacagccccttaaagttagcccagatatctcagcaagttttacgcgtctctatttgggggagggattcgcctattgaaaacaagagaccagcaagggtccttgtgaattatgatggtttggcgtgagaatagatgggatggattggcactggagtccccttttatcttaggcttgtccctgaagagggcttgttgatatcagaacagccaatttcctgacagggttgggagcaggggatgggtgctgttaacctttgagatgtccgttgtggagggagagacaggatgaggcaaccgttggtggcgcctgggtcctgaggagggaggaccctggacctggcgttagcgaggcgtggtgatgtttgcgctcccaggttgccaggtgcaagctgtctgtgtccacatttctgcccttcatttgcccctgattggcacagggagcctgcaggaggcggccgtgcctgcccaggcgcccttcctccccaacttctccgtcctcagccttctgctctgctggaccatggaggagggggctgataggcccgtggccctgttggactttggcagaggaatatcacttcattatccaagtgcctcacagagatgagagccggtggagacccgtcctcactcgcctttgaccccagctcccggtaccctagcaattgggcacatttaaccgtgggtcatcagctgatggagctcatgtctttactggcttttttccccaagcttgcccttgttcctaaatggaatcttgggggaccccctccccacaagtacgttctttgtgtgtctgggcccagtcaggcccagatagcttctcttccacgcgtgcccgtgttctcataaccccatggctgttcttggagctgctctgcctctctgccctctgccttcaggtggagaatggtattgttgaggcactgagcaaggcctttcccccctcctcccatttttcttctttctcatctcctgacgccttcaaattaaaaatttaagaaggggtctgggtgcgg

SEQ ID NO: 89677 - DNA, 1797 bp, Homo sapiens
tcctgtgatgccttccaaggactaggggtcctggtagcctggggctttattaaaacgaggcccacagcaaaagtagcttggtttcttgcacacacagagcccccccaccacctgcaaaaccagggaaaaactgtcctgtccttctaggggttttgtccttttggaaaattggcttaatgatgcagtggtttgtattaagattttcatgatgctttaacgtgtgtgtgtgtgtgtgtgtgtgtgagtgagagagagagagagagagaaagagagaaagagattgagagagagagagagagaatgaatcagcattcagtgccagctgcccagttgggaatccagatagggaatttggggaatctcctacactctcagggtggcaggtgggtaggtgggtgaggtaagagacttgacttggtagtttctcttggacacgacagactttctgttccatgcttgtcccagcccttgtgtcttcctgggggtgccagggtcatgcccagagggaaggcagctgagcagacaatgccatgcagggctgagggcttctgtgcctgctaatatgtgaaccccctttctgaagagagctgctctgagttacttggggggtaacagtgggaacctggttggtgtaccatggaggggaagtatctggaaatttgaactcgagaaatgattcgactgcatgcacactaaacagcagccagagaggccctttactgtcaatattatgaatggagttggctgggtcgggagtccccacccttcctctgaggcctctctcagaggagcctgggcagagtgggcctcctcagacagcagtggctgcaggcagctgggtacacgctgtaatttgcatggctgaatgctggggcacaggaagccgcgtcagcctgactggcgagacagacaagagcttttgatttgtgtggctttcctcccctgccccgtgccaccctcaattacattctccatggcgagataaatgctcttaggagcattcatccccaggttgggggcttcagactcagatgcttggggggttttgggaggtggtgtgggaccagtttggggagccagggagtacattttagttctaggaattgattatttaacataatttgtaaggacacagtcactaattagtgttctagaccagcaggatctgcgaaatatgtaggcttgggagaggtggcaaggagggcggtgatgggaggagaaacttcagggaaccaagcctgggcagacagtggacggatgacagtgataaaagagatcctctcttgggggctcaccgtctcttgagggtgatgaatagtaagacagagtaaaaagtcatttctgactctgaaattaaagaaaaaaaaaagttggtttagagatggacacagcaaaacctgactcaaacctcctttcccttttgattttattttgttttattgttgcaaattaaatgcaaaaatgtaccctgctcctcaaagtggttttcttactctctggaaggtagtaaaaataaatggaaccagtgttgtttaatactgagaatcagagtccagccagagaccatgaaggcagaagggggcccatggggccatcttcccttgtcccctttacattatttatggacaggtcaaactgagaccctgagagggcaagccacttggccaaggtcacagagcagcttgctggcaaaaaagccgtatcaccccccacttcttgctgcaggggagttgcaccccatgcgcagctctaaaagctggtgcagcatttccaaagtgtgttctgaaggacactttg

SEQ ID NO: 89678 - DNA, 4933 bp, Homo sapiens
gggttttgccatgttggtcaggctggtcttgaactcctgacctcaggtgatccgcccgccttggcctcccaaagtgctgggattccaggcatgagccactgcgcccggcctctttgctcctttattattgttgttactgtgtcataattccttgcagaattatgatggccaggctggtctttacttccttcggtccaggccttgaactcggagcagcactctcaaagcagttgtcttcacctggcagaagaaaaaaaaggtgtaaagtgctggttcctggacttgctcgcacactaaaatccctcgggattcagcttcccagataactttcttgcttctttgtagagacatttgagagaaaactattattaactatacatggtccactgttttgctttgctgtcatgaatgggattgtaaaagggacccatgggaccgggtttccttttgggacgatgaaaatgttctggaactgtagagtggtgatggttgcacagttcaccgaatgtattcaatgccattggtggcacattttaagttatgtgtattttaccacaagtttgaccaaaaaatggccagcggtaggttttaaatacatgtagatacttggataatctataaggaacagtgattgtggagagtaaaattggagagacttctgttagttgcctaggacctgatgatggtagacacttgttttggtggcagccctgaggtcacatgggaagtacattgatggaccagggagcaaggctggtagcctgcctgggatctcgtgtgtgtgtgtgtggtgtgtgtgtgtgtgtgtgtgtgtgtgtgtgtgtgtgtgttttgagatggagtctcactctgtcaccctggctggagggcagtggcgtgatctcggctcactacaacctccacctcctgggttcaagccattctcatgcgtcagtatccctagcagctgggattacaggcgtgccacaccatgcctggctaatttttttctagtagaaagggcgtttcaccatgttggccagactggtctcgaactcctaacctcaagtgatcctcccgacttagcctcccaaagtgctgggattataggcgtgtaccaccacgcctggccttctgctgtgtgttacctgagcaagcagacacatctgtgctgatccttcgaccttccttttttcttcgtgggttccagaaatgagagacaggaaagttccctctggtttgattcccggcctgacttttctgctgggggaagtgaatatgcttgttctcactctgcggggtccccctggcctgcccatcccagtgactgcgaaccaggatggtgccagggttggctccaaaagctggtgatccagacccttcctgggcccctggagaccccagtccctgtgatgtccttgcccaagttctagggctgcagtggccgtaggtgactggcccgggcaccctccctttgcgggagcctcgtgaaaggatactgtaagcacagccacagggaggtcaccactggccctaccacctctcgctcggtattgaatggctagccccaagcctggctgcctgcctactgtcacacagaggcttcctctccgggctattttcagcgggaagatattattaactgctgaggcacagttctcaatttagtggttaacacaccaagaaagcaacactcacctgatcccggccactctacctaaacctgttggctcacttgggggactcggctgccccccagcctctctgtttctctctgtgggttcacctgggagatgtgggcttccactcccgtggaaggtgccccgtggattcagtatctgctagagagagaaccaggcttcttacgaagccaactcttaaaaggtgtagaaaatgatcgtatttatactctaagatggggacattttttgataggggtgggcactggctgggaaaagggactttcagcggtgttgaggacagttatttaaaacagggtgataactttcaccttgtaagttaacaggaaatattgggacaagacaggaaattgcatcatctttttttttgagaataactccagagaaaagtggttcgtgaaaggtagtggctgagaaacggctagcctgttttctgttttgtgttttttttttcttcccttccactcccacgagaacatgtaggccattttctttaagaaagaggctgtttgagaactttatgttatttttattatttaaaaaaatattttaccagaagggtcaccttcagttgaaatgttaactgccgccttatttcccattttactaaagaatctttcatgactttttcagcttccttccccaaatggtaaggccaagcagctcttggctggaagctaattttggtttggctggggagtcctcaacactgagccccacccagtgtcattagctcagttttaacttgcaaaaaaaagattgtatttttttttttgatggggggtacgtaagaatttactcacgcctttagcctttttacccacccccggtactgccttcccctaacagaggcacctggcacttagccgccgggaactcagggctgccttcgtgttttcaagccaccgtgtccccctcatcctgcaggagttctgtaactttcctgagactatttctagggtgctagtgaggagtggaggggaaatgggtctcggagctgccctggtacagctgtgtccagtaacggtgctgtgctttggaggaaggagtgatatggttcacctagaagcatctcccagagagggggcttatcacagccctacagtggtgcagataaggtccagttccattttttgtctctgggtttctaaatcccctctttgttgatgtcattgttctaatgacacagggcatgggacagtgccccggcccgtgctgccaaggagccgtctttaggacagagaccagaaagaaagagacctgtgtgtgtggctggcccgctctccactcacgctcacccccaccctcccagctttttccttagcgtgctttgttttgttttcataacacaacaagggccctggggtgtgtaaaagcattgttgaacacttggtgagggcaacttgtccaaacagagcaggacgccaaagcagaatgctgtgggcaggtggtgtgcccacagaggttggtgggccggcgccggccttggaaacacctctcagtggcatatgccgcggcggctgagtgtgacctagcgcagaacagggcttccctcttgtgtcctccgtggggagtccaggagagggacttggtccttctggctgactccgtgcttggaaggtgtgctcccctctcaggtgggttcacatgtgcctccctctgccgggtgtgaagctaggtgggcccgctgctttggaagaagccagtgtgtccctgtggtttgtttatggagcaaatatgtattgacacctattatgtgccaggctgtgtgctgtgcagaggaccagttcctgggctgggttagaattaagaattggcagttggaatggcttgtccgaaggtgatgttgaatccatggggatggagccggcgggaggggggattgactaggagttgcctctacctggaggcaggcaggggcagcttctgtaggacagaggagcctggtccctccatgaagccaggccataggtgggggaggtgcagggtgggccccctgggatgggcctagctcttgagtcatccacttctacttctgctttggttgtgtggtctgttgagaattgagataaagcaaagcttgtggataaacagaggtaggtctcccgggttttggttccagcccgcctccccaccccgcttcttgctgattgtaagatgacagcaggaagaacaggagctgtggttataatccaccctccagaccctggtagtacctggggcacagcacagagtggaagtgaccagcctagcgccaggctcctcagtggaccacggccaaggggtggggaaacatctggaaagacagtatctaatgtcttgacagccagaggagaagtgggatgttttcaaagcccaggagtgactttccctttgtaactccagaggacttgattcgcaacgaagaccatctgggggatgaaggaaattcttgctttttaattttaaatctgagggttaagcccgtttctgaggtgtcagccctgtgtgtgaggccctggcctgtctggggttgggtttggatgaaataatctaagatgcagttaccagggtgtttccttttcacattcatccttctctgtctgttcccccggggccaaccgatggcttccaagctctgtggagttcactaattgaattactcttctcgctcctccgtgaagccccaccaggaagaaaaggcggggagagctgcttttgctggggggtttgatcagagcagaaagggaagatctggtctcaattccaatttcatcttgcaaagtcgggactttctttcagccagaagacaactcagataaccaggccagcgactgtgtgctcatttcagtattgctttcttacgttttgatctgcgactgtcactcaacaggaacaaaaacaataagacgccaagatatgactgtgccgttggcagattagctgtctgcattttctggggtggctcactcggaggttaaatgattgtccctgtcccctgtcccaccttccagtcacctcatgaagctgttaagtgtctccttcccctgcaggctaagtgaggatcatcaagagctgggcctggggaccttgtcagcctcactgcagcctctgagccagccctgccccaccccctcatgaatcagtaaccaagagggaaaattaaaaagttagttatcagtgtgatctgagtgcaccataccgttcttacaaatagatgggccccatctcctgctcagtgggggcacaatcaaaaccctgctgggggggctgtt

SEQ ID NO: 89679 - DNA, 3478 bp, Homo sapiens
ctcactgcaacctccacctcccaggttcaagcaattctcctgcctcagcctcccaagtagctgggattacaggcatccaccactgtgcccagctaattttttgtatttttagtagagatggggtttcgccatgttggccaggctggtcttgaactcctgacctcggatgatccacccaccctttcctccccaagtgctgagattacaggtgtgagccactgcgcctggccgatgggtgggctttttttccccaaagctcttccagtcctagaaagaaactgggggtaaaacaatcattaactccttcccctcacccctccaggtaattgtagacacagatattaataaggagctgccaggaagaagcagtgactctctgaagggcagtgtggcttcagaagactgcagagagaagagggggccttccacatggcaagagcatttgttttgaatttcagctcttgatttactaattccaaaggcttcaaagtttgagctccttcttctttccgttcagagttggtgcagtgtattcataatgggccatggtggggagggtacactgttttgggggttgatgtcaccggcttgggggcgtctggaggggaggtgatgggcacggagaaaacctagggctgtcctctttgtagcgagaatgccttccaaaagggaactttattggcccctgtccagggcagagagttttgtaaatggagaaagcccaaacctcctccttttcaagaagttgatcgttccatggggggtggcctgggtgtgtctgccttgctgtggatgaggccagtgactggatgtggcagggctggatgggggaaggggcatagcagacactgaggttggggggtgggagcctggcagcaaggtggggagcagtgaaaactgaggagtttctccctcctcctccttgaaataacctctctgagcctctttcacaggccctgtgtgctgttttccttcctgtcctgccctggctgagagcgggcttaatgaatggggctcagtttagggtgggaggaaggtcggcagcaggagccagggcttgattctcttggcaagggaagaagggaaagaaaaaacagccgaatgtgaaaatgtggtgcctcggaggtgggggtggggtgtgctcaaaggccggtcctctcctgaaatgcaggggtgactccaaggctggcccttccctttcctgcgcccttgcaaactgcccgggaggaaggggagtgggcgggtaggagcccgggggcggggctgctggctgcaggttggaattccagcattgcagctttgttttgggggggtgtgggggggtgggtagacgacaggcctggtcgttagggacttgcagtgaaacacaccccacccttgcaagtttcctcggtctgggaaaatgggacatttttagaaggcagtgacttgcttccaggagattgtactttcatttttgacagctggctctctgagacagatggattgctgggtgcaagcttgtgtgtgtatgcgtgtgtgtgtgttgtgggggtgggtgtgtgggtgggtgggttttgccgcagacgtacagatagacaatcccgtgcgcaaacacatgagagcgtgcggatgcccacaggcaggctctgggatagggtgggtccctgtcgctggggtgggttgatgtcagggcggcctctccaagaggttgtggacttgtggggtggagtttgtggattgattctgctttgtgatttggcagtctgtgcctgactctctgggatgggtgtcttttgaaaggcatgcaactccagaacaggtccttgctgctgcttggacatggatgtgtcatggctcaggaagatcacctgggagaggtctgatgtagctgggaagcctctaggctcagctccgtcgtggagatggaaaggatttgctcccagagctttccggggatcactgggaatgcagagcatgtgttggaagctatcatctttgcagcctccatctggagtttctgtctgggggctttcattttgcctgtctgctgtcctggtttgagtgggttgagggagcagcatctcccttgtgagttgtaggttattcagctgcagactcatcttctagcctcctcctttatatatgaatgtctggagctggctgggcctcagccatatggacctgcccagttagggtagggattggaagccagcaaccacttgtagttatttaaacttcaaaagaagtgctcccatggatctcaaggagggaggtaggaggcagtggagacagaagtgctcacgtgtcctgggaaactccatctcttggctgtgcgaagtcatgcttgttggagagacccggcaccatgcctccaacccaagggtggccaactctttgcttgagattcatatgtggctactagtccccaagtctgggggatgggagcgtccttgagtcagtatccattcagcatccaaggatgtttctgtctccttctctttgatccttgctggcatctgtcatagtctcagaggagagccttcaaaaatacctatataatctgaaaatgcacccctggctcagtccacagttgacttgggctcaaaccaagtagcttaggaaacattgctccatcctgttttaaggaaagttaatcagctgcacgtgaacaattattcattgtctggcttggaattgtgatcatgaactgggaacctgggcctgggcgcctgttgctctgcttttaaattaagtcacctccccctgcctggctacaaaacagctcatggtttcactgaggtctctaatgccattgtggagtgagggcagggggcacaggttgagctcacaggcatgtgggcctttcatccaaatgctcatgagcgtggactttgggggactcaggtggacaggtgcttgtgaccatgagcaagctccttccttcccatccccttagtaccctgcaggccactgtgagaaatgacggcctagaactcaggggacaccttctgcctctccttaaacacctgccaacaggatgagtcagggctggggcgggctcacctggtgcacacccacaccctggtgaagaccagtcctggaccccgcctcttctgcagtgccccaggtcatgcacttccccctggagaagggcttactgataaaaccccttttgtcctggaaagaatgaggcagtccggcaggggttaaatacagggtgacagcatttaaaatctctggagcaaatttgggctgctctgccggccagacaagatggtctgctgccgcctcacgcatcctgtccccaggctgaactgggccagcaaagggagagggccaggtgaaggccaggctttgggtggtgtcacttttggtgacactgtagcatgctgattgcccctcacttcctacacacacacacacacacacacacacacacacacacacacacatgcctttacttagcaaagcctgactgtagctgcgtagacttgta

SEQ ID NO: 89680 - DNA, 2872 bp, Homo sapiens
ggagtgggtggaggagagggttgagaagcctatctctagaaaatgatgaaggccatcaaaatggtttagaaagtgcagggtatacaccatttaacaagtaactccatttcctgcctgcctctattgttttctgtttgattaagtgtatcctgtaaaactgtatattcctgttaggaattagactttaccctgataaaatgagattacacacacagtcttctttccccctacccaccgcagccacctcacccccacgcctgcctccacttctgcccctcgcccgcttaggagagttcttgaaaagttgtccttccagccttgagaatgtgggagagggagtgaccctgagttagagagagaaacttagcattaagagggcagacagcagaaacccagagatggtttggggctatgtgtaggccactaaaggattcccatgggctacttgcccgtctgctctttttttttggctttcctatttgccagcatggccaagtggttccaactggaaacccacagggacattgtcctggtggcctggggtaggaggcctggtgtctgcacgatccaacctgttgtgtttgctgcggacctgggcagcacctttccttagccgggctctccgctaggacttcagggagtttggcgctgccagtggtgcatgacaagcttacagggtcttgtgtatttgtgtttcatgggactaatgagttgtggttcatggacattaggttttgctttaattgcttggagggcggttgtggagactgtttctcagctggaattgtcattatcctcattaacggtgaggtcactgtgcagagtacctgagggtgacagaagttgaagagaagtctagttaagggcagatgcaatctaaaggtaaaaatcagtgaggaaactccgagtgttgggtgccaaatgttttataggaactgagggcagagagccttagcaggtctggggttgcctgggaaggtttccagagatgaggggtttggactagcctgggagaggtagaacatttcccctccggctcggagccttgctgagaatgttctctgtcttgatctggtggtggttacacagatgtatacatgagtaacattcattgcgtctacttgggattttgtatactttgctctacttaagttagtcctcaattaaaaaaggggaaagaagtcccggcagcccaacatcaatcttgagaatgttttcaagaactgggaaacctgtctttaaaaggatgaaggcagagaggacatgggctccaaggagagagccttctgcccttgatgagggatgacagagcaaccagggttgagaaagtccaacccaaacctcctttgaccttgggaaccacctggtatccgtaatgggggactggtaatgcaagagaaattccagccagtctcattgagcctgactcgagtaatgattaactggctgcccggagcccagacgggtgacaaggtgctgtggtctgtcttacgatgggcagtgaagcctgagcagaccattaataatcagcatcaaggccgcgagtcagccttttggaatgtgtggtttgtctttcatgctgtttagagcgtgcttaaagatggatcttggtgtttttatttgtgtatttatttctttctctccccttttcaaatccacagcagactgtccagatgctgtgccttcctccgctgaaacagggggaacgaattatctggcccctggggggctttcaggtaagatgctttctcttattttcctggcaattccaaccttttttgaaattgctaaagactggaggaatgggggtggccttctgccaccccagctggtctggacttcattctcatttttatatgccttaagttggatgcatcggtggtgacattgtggtgcccttcagctcctcatcctgcagtcctttacgctctggacactggatccgttccgtggacggggagacaagagcgagctggggattgctttggtgtgtgaagtgttgcccggttatttttaagcagctcctggcttggggggcttcagcttggtgactttggtgtcattaactcatgcatttgagctctttttttgcttttgctctttgcgcatgggggatgtaaagggaatggacccacctttagggaacttgttgaagacagatcccaagcatacgatgggatttcagagtagatctgaggcttccctcccaagttctgattcccagcccagcctgctgcaggattttgcagcacatgtctggggctgggagcaccagggtgggagcactgccaacagtaggagctgtaattgttccctagcggggcaggttttcctcagggctcacaggtatgcgtgaaggcctggaatgccagtgctggggggtcacggggctggctgacaggcacggggtagccagagcattgttgttcctgaggatgcgaaaagagggcagtacttagagaaactcactggttatgtacatgggacgcatttcatgttgttctgaagaaatcctatttctacctgtttttccatccccaccatgtcatcactagattttctaagaactggctgaagcaagagggaaaacgaccttaaaaacagaaattccagcagagttttgggcatttggcatttccttgcctgtaggatcacgtggtagcagctcgaatagaagctgtgccctgttgtggtgtatcctcttgtgtgaggggcacccttttttgtggggtacctgctctgactacttggtggtgtgtcttccatggctggctcaggcaaagttcattcccggacggctccctccccggctctcctcttcaggaactgagcttgctgagaacgtctttagggagacccttgtttgttttca

SEQ ID NO: 89681 - DNA, 4585 bp, Homo sapiens
ctcccgagtgcgctaggaatgggcagccccgtgtcccccgcgcgagtgccgagcggaccggcgggggcagaggtgaattgcacgcctggggggcgggccggggcggggagccgaggttgctgggagctgggtctggagtccgaggacggggagggggcatggtcgccccccgccctgtgaactgtgaagtgcgcggctccggccgagccggtggtttccagccgggccagccgagcgcggcggctgcggccgcagacgtggaggagcggagcgccgaggctggcgccaggcggcctcttttgtttatctgacagctaaatatcaaggcaatcaccgcctcgcggccctgcctccaacccccacagctaagacaaacagttgggctaaaagaatgcctctgttatcataagtttctatctctcttctcatggctgggcctttattttctcttgcttttttaatttcagagtctcccccccctccttactccagatacccgatggattttctcaaaccaactggtgagtagatgatttttaaaatatcctgcttatcttaagttagaaatagagcctctagaacgtggctttttgtgtgtaggcaaaggcttggggaggtgctgggcttcacgttggttctaggtttcctctgttggaagtttggtgaatttttctgttgtggctgggttttttgctgtttttgcaaagacgttcccttgatatgctttacattttgttcctttttcatgtatttgtgctgtgtagccggtgggctcagctttaacacgtggaagctttagtccagagagaagtgtcttgggaaccaaataggactggttgatggggataactcggagacttagtgagtgccaggagcatcagtgggaataatggaaagggtgattcgatagatgggaagacggtttaaaaaggtgcaaagaagactttggtctggagtagacactagaacttttcagaagtataggcaacagccagtaaaaggggggggggggtaggttcctcctgctccagtcacctgcaagtcagtcctctcccggggttttctcagtattcgccatagggactatcaaagtttgaagcatagctctgcctgtctgctgctttgtcactggctggcatgaagccatggcagaagcccatttgagactggcaccagccctgttgtggttgtctgcattcaacttctggccggcagcagcacaggggtccatcctctggacatcacagtgctggggacagggtcagcaaaatgaacttgggggtgacaacaaggacaaacccaaattcctggagctccctcttacagtaggagatagatctgtttgctaaaagtacaggttgtatgtaaccttggtttttgtgcctgtatactggtgcctgaaaaaaacattaatacttgggacatttttattttgccaaggttctgggagaaggaaaagtgaagggttgggcaccatttagctcctggaattctgcaagtccttccgcctcctgcgttttggctgttgggcctttccccccactaattaaaagttttgctggggcgttgtcataaattaaatactttaatgaacgtgtaaccgaagcccatactctgcagccagtcctcctgggactctaccagctccctcaagttgggaaggcgttcctgcttgcctggtgccggtctaataagtggcccgcaaagcatgtgatattttgctttcgatttacaaaacaccagataaatggttattaataaggagatacccagctctctgtatttgtaacaaacgttaactggaattaccaagctctgttttcctaaagactgtaacttgactgggttttggcttaaagaatcaagaattcttttatgaagttcattttccaaggggccacctctgacctgttttttttgtccttccatattcttcaaatttggaggttttccttaaaagagagagaacagtgaccttagccccagggataaagaccagcaggggtaaatgttcccagaaacctccaaaaaccatagaaaagaaaggccatgttcccttgggtttcctgcagagacactgggataaatctgttctcaggatttaagcagtcattctgccaggccagggcctcattttcggtgagtggagtgatatatttattcattagcaagtgttgacattaggtagcaaaatgtgtgtaaacagagaagccacaaagacaggaatgtgccatttccaagggggagaaaagttctccagatcagccaataggaagtgattaacctgccaatcggaaactaagacagctggttactcacccaaaacgttttgttgaaaatagaacaaaaaaagaaatgagaaaaggcgctgctgtgtaagaatttagcatcagtaatagacaaagcccccacgaagggaattgtcctgccacattggaggacagccaggtctggagctggagcacaccccccccgcccccctcacaggtctggggctggttttgccagctgctgtggccgggggcattgaggtcagaccacagatgggcgctgacccaggtcttcatccccattttgcgtatgggagaatgtttggcccgggaatctacatggaccatttacattcttcagtttctatgtcccttaggttgaatttttggtcttgggttactagatgaaacaggcacaaagttttacagtggacaactgttaaaatcttaaccagttgcacaactaaaggaatacatcctgtgaagtctccatcttaggaaaaggtggtgggaatggggctggggcctggtaccctgcagcctttggagacacagagggctcaaagctaggaactccattttgctataatttaagccactccactcagcatctgggaggcctggactttagacacctaggtactgtgtggtccaaccaggagagccttctttgaaagagtgttcacatgactgaacctaggggaggccagttgtgacttgtggctgtcagaagtcagaaagacacccccacctccacatcccacaagaagtcagaatttgctgtttaaagctggatctcggggatagctgtgtgggctctgcttcccgtgtttcattgtatctgatggtctgaaaggtttgaggaatggctggccttggggggttgctgggtgagctcttgagggacccaggtggccagtatccatgggcagatccagcctgcaaatccagatcggaagtctggtgtcttgacctgagatctggcactgcgtttctctcttaaccgaggtccctcttaacttttctaggcctcttttaaaatcagcatgatgaaagagattaggtcattcattcatttattcattcattggttcagtcattcattttacaggcatgatgatgtgcctacctagaaatttgaggattccgatgcagtgctgtgttctttttttttccgagacagtctcattctgtgcccaggctggagtgcagtggcccgatctcggctcactgcaagctccacctcctgggttcacaccattgtcctgcctcagcctcccgagcagctgggactacaggtgcccgtcaccatgcccagctaattttttgtatttttagtagagacggggtttcaccgagttagccaggatggtctcgatctcctgacctcgtgtgatctgcccacctctgcttcccaaagtgctgggattacaggcgtgagccactgcacctggcagtgctgtgttcttttataaccagggttcatttgagttctgggttggttgaactacctggggcagagctgggacccttggggtacagtggtgagtaggggctcctctgtctttaacagtacttaggaagctcagaacgcagttgctgagactatcgtgggactcccagctcctttaccttgtactcattctcaatagttcgctccttggctgctccccagggttgggttttcaaagactctgttggagctgctcggagaaaggaatgagtctttttctctcgcagaacctagtgcttaccaagtgcttgataacacttagtgttgcgtgagtcaggagtggcctagagcttctgtctgccagccagcctgggctctggggaacaggcgacacaggcctaaggtgagaccctgacttcagagatctgtctatgcggagcttttctgtgggtgagagatggaggtatggctcctttaaccttgaggccagtctggatggcctggccacctccaggaaagagggtagggactccatagcctgcctggggagtgagagccatgggatagggctggactcttgggaatagcccagctcactgggtggccctttgagctagtcagtgacgcctcagtttacctggctgcctatggaacaggtatactttgcttcttcacaggggtggtagggaggcttaattaacgtttgtaaatccctcttgagatcaaagccactgcagaagggcagagcaccatttcacaaaaatgcttgtggttgcctgtgtggagctggcttacctttgatctgagatgggctgacaccctgaatgtggtctcagctctgctctgagatgcccggcttttc

SEQ ID NO: 89682 - DNA, 1024 bp, Homo sapiens
ccccgccgggctcagccgccgccgcagcatcttctgcccctgcgcccgcgccagcctcgaggaagtccccgccgaggacctgggcccccaggagcgcagggggaaagaccagagactcccctaaaccacccagatgcgcaggattgaagcggtctagccaaagctttctgtggattaaaaaaatacacgatttttttttttttttttggcagaagaaaaggagaggaagaccagcggggctttgcaaggaaacggggggatgtaactcgtggatacatttttccacccatcaaacatcttgttatactttgtaaacattttctttttttaaaccccagttccagccggacgcccccagacctctgaggttcgaggaggtggtggttttcatttggggctttgcatatttggttgttaggttttgcgagagccttcttattttgccagacgtctcatgcggggtgaagtccactcggccccctcccctgagtcttcgtgtgcgcggaattcgaggagatccggttactaaggatatagaggaaaaaaataaatcgcttgcttttttttttttaattgcctgcttctccccacccccaaattaagttgcttagcaagggggaaagaggctttttccttcttccaacagcccagccgaacgcctttcgttttttgcccccgcggaccttccatgtaggaagccgaggctggcgagcccgacattcgggagccactgcgggggggcctctttttggggaggcgccgacgggggcaggctcggccgtccccagggaagcggcggccgggttcctccggggcgcgccggggccggagagccgcgcagggcgcgggccgcgcggggtggggcagccggagcgcaggcccccgatccccggcgggcgcccccgggcccccgcgcgcgccccggcctccgggagactggcgcatgccacggagcgcccctcgggccgccgccgctcctgcccgggcccctgctgctgctgctgtcgcctgcgcctgctgcccc

SEQ ID NO: 89683 - DNA, 1023 bp, Homo sapiens
aaaaaattagccaggcgtggtggcatgctcctgtaatcccagctacttgggaggctgaggcaggagaatcacttgaacccaggaggccgagggtgcagtgagctgagatcaccacactgcactctagcctgggcgacagagtgagactccatctcaaaaaaaaaaagataaatacggctgtcaggatgacacaggcacaggaaggagcctgcccaatctgagaaaatgagagctttgctttttggaacagaaacgtgttcacatgattttcaattcatttagccagcactgattcagagctgattggagtcaggatccaggagagacctctgagggttataaatgtgaggattaatcagcctttgccctcaagaagtccacagtctaggagagccacaaactctcatgaaatgggatcagtgttaccccagcagcaagaatggaggcactggctctaagaacagaaagtcaagggactcattctgtctgggagaggcctcaaaaggtttcccaaaggaagaaatattttagactagattagctgagttgactagccaggcaaaggtgatcagagtcctaattgtcctatcaaaaagaaaaaaaaaaaagaaaggattacaaatatgagccaccacacctggaacaatgcctggtgtgatggctcacgcctgtaatcccagcactttggacagctgaggtgggaggactgcctgagcccaggagttggagaccagcctgggcaacatagtgggaactcgtccctacaaaaaatacaaaaattatggccaagcgtggtggctcacgcctgtaatcccagcactttgggaggctgaggcaggtggatcacctgaggtcaagagttcgagaccagcctgaccaacatggtgaaaccctgtctctactaaatatacaaaaattagctgggcgtggtggctggcacctgtaattccagctactcaggaggctgaggcaggagaatcgcttgaacccgggaggcagaggttgcagtgagcccagactgcg

SEQ ID NO: 89684 - DNA, 1020 bp, Homo sapiens
aaggagcagaagttattcctctctttcctctacagccaagcaaatgcctcctgtttagctgaagcccaccaacatttggtttaaggacttatcattgatgaactaaagttacacagcaataggatatggaggaggaatgatagtgaggctacgtaatccccaaatttatccttcacccccagaattaaaaaaagaatgtaaatgcgtcctctgctattttacgacaggatctccaaacctgtgtagttttcatctgagcaggactgcccaccacaagccctgcacgtgctgtctgtagtcactaacccatcactcccgacctgcgccatctgccaacagttactggtctgccttgcgaccagcaatctcccatttccttgtctattcagaggcttaatatggtcttgaattttttttttcaatctgctatgtagctattggattttaaattgtattagactctggacctgtgccaggtgcttgctagagtttctgatgctatcttatatcatctttaggtggaagggggaaaacgccattcaactttcgtggtaataaaattattgcagttgtgccctccatctgttcactgaacttcctgtgggttttcaccagatcacatgactgacagcagagatggctttcaggcttttggtctgcttgttgcacccaagtctcaaccaccaaaccagacccttgctttgtctctgagctgggcgtccggatgtcccactgtggtaggttgactcactggagctgataaaaacattccagccaaacttgagagtctagcattacctctggctccaaaaatcaaaacaacaggattgctgtaagtagctttggattgagaccaagctacaagcttgagggatgagttttctctctttgttgagctgtgtcacaggacaagtatctcggaaagagaagcgtgaaagccaggggctcctcaccaaagtagcctgagcttgagataaccagtgccctgccctgtgccagccagttctagctgaattcctg

SEQ ID NO: 89685 - DNA, 1051 bp, Homo sapiens
atcgagaccatcctggctaacatggtgaaaccccgtctctactaaaaatacaaaaaaaaaaaaaaaattacccagttgtggtggcatgcgcctgtagtccctgctactagggagtctaaagtgggaggatcgcttgagcctgggaggttgaggctacagtgagccgagatcacaccaatgcactccagcctggccaacagagtgagactctgtctttaaaaataataataaaataaataaagcaggaatcatgaatgaaaaagaataggcttttattaatggagattcaatctttgtttcagcttacaaatacgaatatttttacactcattagccctctgtgaagattctcctctcctcagtggcatgtagcctgagagccaaatcctgtttgatttctgatcacatcacctgtcccttgcttattagctttctctactttggttttggaaaacagagtttcaagtattctctttcttttctactctgacagtgtcaatgaaaatggcctgtcttcagtggcttttaggggctctgtggcaatgctagcagaaagcagggcctgagcccatttggtggctcttgagtctctgagttgtctgaagagtcctgcctccatttcaggaaagtgggagcagagggtgacagctgaagagacaggaacgacttgagaaaccccaaagtttccttcagcctgcacctcccccagccccctcattactcacttcccctagccaggctcacgtggctgctgggctgagtcgcctcagctgccgtggcagtgtcaccacctccatcctcactggccagcagcgggaagccgttgttccattagagtcagccgctggttgcttgttcatcttttggtgtgagccctcccaggatatttcctggaacgctggagggaaacatttcttcacccagcctttccaggcttcagctcatcgtagtctttgccttcccattctcacgaaggcggggagacctttgtccaagaaagggaattcaggttactcacccacagcatgctgctgtgctttcgtttagcatt

SEQ ID NO: 89686 - DNA, 1416 bp, Homo sapiens
aacagccaggaaaacagctaaggatcaaccattgtgttagggtcctggtacagtcacagctcagtgatgcagacccatcaaccaggtggcaaagatgaccattattttgtatcaccattgtatttgttaaagcactagtgattacagttataatgtaaatattaataaaaaggaaagaaggatgcatgggtgagcaggtcaccttttgtcttagttcgctggggctgctataaccaaatactgtggaatgggaggcttataaacaacagaacttacttttcactgtcctggaggctgagaagtctaagatcaaagcaccagcagatttggtgtctgctgagggcccactttgtggttcgtagacagcaccctctagctgtgtccttacatggtggacgggactagctggctggctgtggtcttttctataaggacactaataatccttgcaagagggatttaatcagaagttttatcttgaaacatctttcttcatcagaaagtgtttcgtatgcacttagaggtagaaaccatagaagatgtatttacagtataagtttctctttaaataagcacatcattctgtcttccttaaatctgctttttcattgtacaagttccaaaactcagatgttgtcaccccttttgtgctgagcatacattagttctctctaggggaaatttagagttttcactttttcttatgtataacaaattttgatttaaaaaaaaaggtatgttctacatcctcttgctctaaataaccccaaatataagtgtcttattatagtatgttgattatttaaatttggaatttccttttgaaagatcctttaaaatgttttatgggtgtttccaaggtaactctcaatgttgtttaattttcatgcttacagtgtataacaaattgaattatctatcattggtcccttaagagataagcagtgtgtctttctttattgaaatatgtaaatttgtgtcaggcagtgtggctcacacctgtaacccaagcactttgtggaggtcaagtcaggaggatcacttgaccacaaaaccagcctgggcaacatagtgagaccccatctctataaaaaatttaaaaatttgccaggcatggtggtgcagacctgtggtcctagctactcaggaagctgaggtgggaggatcacttgagcccagaagtttgaggctgcaatgaactatgatcatatcactacactctagcctgagcaacagagcaagaccctgcctctgaggaaaaaaaaaaaaaagaagaaaaagaaaaaaatgtaaatttagcaaaattggagcctgtgttataaaatatgagtgcttgctcttaattccttgttttgaaaatgactagagatctccaaatgcttcatctacagatgttttacttgccttctggggcat

SEQ ID NO: 89687 - DNA, 1031 bp, Homo sapiens
acctaaatttattttagttgcagatttagaagtgtgaaaaggaaaaatatatacgtattttgaacatgctatcccagtgatttattaatagagcttaatacactcttgctggagatttcaaatgcctgctagcctctccacatataagtgcaaaggctaaaacttcccttgcatcagtctagctagttttgtgttatttttagttttcaagtagaatttaatcaaatagatcatagagcggccctcagaaagtgaatgggaaatttcttactgttaacagtttctttagggagtatgaagtcatagaccctggtgtggagagcttcacagaagtggatctattttcagaattatgtttgatgtgaatttttgcacgtttacttcaaaggcattttcattataagtgacaaatgacttctgaggaggatagaataaaaagattagcttaaaataattgaaatctgagaagttaattttgttgaccaacgaataggtttatgaagcatcccattttgaaatcagaaaatttatatttccaaactcgaatctgcctaaaaatgctacttttccaggcatggcagttgttctgattagattttgtataatgtacatgattagactatcagtttcatgtaggattctatataggtttataaattgtaaactctcagtatataataaattaaaaataagaaggctagtccttttgggagtgactggttctactgtctcccttctaaaagtaaagttattttcattgtttttgcatacatgactgtattcagattttttcccaatgtctaaagtgcttcttccctacccaaactcacccctttctcttagggtttagaaattattaccttcagccaggcaccgtggctcacacctgtaattccagcactttggaaggccaagtcaggtggatcacttgaggccaggcgttcaagaccagcctggtcaacatggcagaaccgtgtctctacaaaaaatacaaaaaagttaaccaggcatagtggcaggtgcctgtaatc

SEQ ID NO: 89688 - DNA, 1113 bp, Homo sapiens
atatgtttcaccacctgagacaagagctaatttatggttagagcgtttaaagagtccaggttttttggaaaaaggaactatatacgagttaagcttctgaggaagacttaagagcattctttctccacattccttctcgcacagcccagaactagtcttgtaacagaagaaaagctatgaaagaatcaccctgaaaaaccaggcttctttatgtgcaatgagaagatttttcatctaaatatattatctgttaaaaagtgatcagggctgacagcagcagtctgttctgtggcatccacagcctctctatggtgttcccacggagaattctggtaataacagataccatatttttgcagtaccttcaagggttgttttaaagcagaatgtacaattcacctcttcccaggtgtcatcaggatgtgaacatgcagcactttatactgttattacattttacatgataactctttatataaaacataaaatggctccagaaaaatgattttatatggtacctactctgaaaacctaaacaaaatggtgcttgttattacattggtgttgtgaattacttgaactattacgatagcatgtttcactaaaacatatttcagtagtttacttttggcataatatctgcagcatggagaataagtgtcatctcaaagtagaaaggcatggcatttttcttaatgtgtctttcagactcaaagtttaaaacatcataatatttttcctgtgattgctactatttttatattcatatatctctacacacacatacacatacagagacacacagatacatacagagaaagattattccccaaatgaaaatatttactttgagcaataaaattaagggtgagttggttggttgatccgttttgctttgcttttttgaaatttactttaatgttgttatactgcctgtacagtaacagggtgcccctgctaacacatttctgacattgccctatcaaaatggaggataaacattgccacagccccaatgaaagaaaaaatgtgttatcaagcttttaagtgtatggggtttaaactcttctcatgttacatcagatctttactgtaaactagccagaatatttc

SEQ ID NO: 89689 - DNA, 1459 bp, Homo sapiens
ctatagtatataggagaggagaggagggatatggccctgtatggttgtgacagttgtatagtttacatgaagtagtatatatatatatatattttaatttttgtgggtgcataggtatatttatggggtacatgagatgttttgatacaggcatgcaacgtgaaataagcacatcatggagaatggggtatccatcccctcaagcatttatcctttgagttacagacaatccagttattctctaagttattttaaaatatgcaattcagtttttactgactatggtcaccctaagtaatatattattatctgtaagttgactgagaaaagttaagagtgtatattgtcatctctagggcaaccactgtaaaagtaataaaaaaatgaatagctcaaaagccaacagaaaaattagaattcttaaaaacattcaaataattttttccccaaagcaggaaaggaggaacaaaacaagagaggatttgagtagaaagcaaaatatgatattggcagatgcaaacctaaccatatcaataattacatggaatgttaatggaccaaacactcattaaaaagcaagaattgtcagaatggataaaataagacccaactatatactgtctgcaaaggatatgctttaactataaaaatacaggttgaaagcaaatcagaaaaagaggtaccatgcaaacagtaagcataacatggctttactaatgtcacataatacagatttcaaaacaaaaccaaaggtgaatgaggatacttcataatgatcacagggacaattcaagaggaagacataacaggcacaaatgtgcatgtgccaatagcaaagcttcaatatcatgaaacaaaaagctgacagacaactccactgtgttggagacttaaccctccctcagcaactggtagaacgtctagaccagaaaaattcactgaagacatagaaaatctgaaaaagactatcaactacctcaccttgattgatattcccagaacatttcactggacagtggcagaaattcacattattttcgaatgtatataacacccttaccaagataaatcctattttgagccatagaacagatctcaataagtttaaaaaattagaattgtcaaagttaaattgatgaaatcaataaaagctagaaaaggcaaaactgagagagaaagcagatctgtggcttccttgggcccagggggacagcacagaaaatcatgtgcaaaggcacaggaaggggctttctactctgcatcttaattgtggtgtggtcacacaattgtatacaaacgacgaaatttatgaaattgaacacttaaaattagtaaattttatcttgtgatcatctcaagaagcaaaaaataggggaacagtcagtttggtcattttcatctaacaaatgccagagttcaattttaaattgtaattggagaccagaaaaacattgccaaa

SEQ ID NO: 89690 - DNA, 1031 bp, Homo sapiens
gcttgctgtcccaaggacctctcagcccaggctctctggtggaagactaagggtctcttaccgctaagctttccctgctagttggttttcctgtatttggcccttctccttctaccacccttctccttctgtccccagatttgcttctcaggatgtatgcacccacctgtccctttacattaatttgcatcatcatcatcatcaccgatatcacctataatatacaagcaaagcatctcttacaaatgtggtttgtttcttcctactgcagctcgttattttacccccactttgaccacaacattgctaggacgttggggaaacagaagtgtgtaagacaccacctctgccctcagaaaaatgtatcatctttcaggagagaaaggcacccccttgcgttgcagagctgagtagagcagggcactttacgctgcgtgtaaaatgaatggtgtagaagttaagttctggaagaaggagtggagacactgctgggaagaactagtcagggaacactgaagagaaacctggacttgaccttctctgtcttaaagggatggtaaggtttccataaagctgggatgaaagagaaatccagatggggaaatctgtgtgtgagtacaagagaaggcccaaggcaagttcagcttagtgtccaactggaacaataggactcccctatttctctctgctgtattaatgtggcttgtattatttaatggtacagtaaagtaattagtggttttcaaactctttagactgccacccacagcaaaaaatacattttacatcatgatacaattcacacatttatatacaactgaaatgaaagtttgataaaacagtacttaccatcattaaatgtgatgggctccgatattgcctattctgttttctttttttaaaattgctagtcagacccattaaattgatttaatgatccagtattatttagtaactcagagagttttaaaaataatgtgtcaaggctgggcgcagtggctcacacctgtaatcccagcactttgggagct

SEQ ID NO: 89691 - DNA, 1767 bp, Homo sapiens
tttatatttgagacagtgacatataaacaaaaatgtaactcttttcgtttttcagaattatggctaaatagagaaaataattgatctatggtgggtcccaggcaagttgactctgatttagagcaagatcctattgaggccaaggtcatgggtaaatttcttaagagggccagttaatttggttctggaacatagcaagaagttgtactcctgacctcagcttgccaactcacttcatggttgcaaaaggatagaagatggatgattcagtttaaaaacaaaacaaaaaaaaaaaaacactatcaccagtactagaaaagattacatttactaaaattacatttacccacagatggtgagtcatcctagttggtttaaatgatagcatattattaccacagatgttactagaaataaaaggctgtttatccttacaatcaagccttatctcaattattttaatcatctttttggattgagtgtttataataaaatgagtcacttaaaatctctagagtttaattcacagaataccacggtatctaaagttgattcaaaattcaagctgtgttgagtaatgtttacatgatactacatgacagcacattatagtctttggagtagtttactaatatatactgataaaataattgtcgggtgtgtaataatagtttcatacatgatattgatgtaaaagagttggtttcaaattggaaatgctgtcttaataagccctctatgaaaatgtggaataatatatactaattgatttgttgtttcttaaaatatataaattaaacacttagaaactcagaattctttactactaccttctgggttgttaagaggatcacagcgccccttactcatgaaaaattcaccagctaatgtcagctgaagccgatgagccaaaagttttagaactttcccttgcattgtagaattgaagccaactttgtagaagtagtattcttccaattttgggcaagtaaacagtaagatctggaagcccatggaagagtaattgacttccaaccaaataaaatatttttcaatcaaatattatttgacatagccttctaaaatatttgtgtaatatcctatgtgggaatgcatactatttggataaatctgtctatatagttaaacaacttggctgttcagagtaaatagtattaatatcattctaaacattctcttcttactggtattctgtgaagtctgggaaaggcaataccaggtaattattttttccggagcctcctgcttaaacagagacctaaagaacaggctctgaaatcctgagtcacttatttctcctttaggatttggaaggaaataaataaagttagtatgtcctctgggagccgacttagaagccgcagctcaaagctctcactgtctgtatccacaacagggcatgttcctggctcgcattttgcttactgtggagcaatttgaatgtcatggtgatgggtcagaattcttccagatccgtgcgtgttctcataccactaccacctcagattttattatgttgggctctcaagtcccctcttttcttcagtttagtgaattatctatgtcatttgaggattaagaattttactgtatttagtgtttgaaaactaggtagtgcttttcaaggggaattaaccagaagataacttatcttttagtgtaaataagaaagtgtggaataatatgttattgacattaaccaaacttcatttactcaagacacttgataagtcataggaattaaaa

SEQ ID NO: 89692 - DNA, 1714 bp, Homo sapiens
attgctgtgattagtaatctgtaattacccagattattttcaatgacattttaatgagtacaaaaaacatgttttgtatcattggtttttttaatctaattgattttatctttatctcattcttttaaatttattttatgaacattttataatatgtaaaacatcagtgctgtagtatattgcatgatttataaagaactagaacatatattgcaagcacatcctcatttttttacttgtagatgtgtacaacttgaaaagtttggaaacctctggtctggattctgactgatcatcaaaatcacctggagagcctgatgtataatagaaggtccctgactaggccctgggatcagaatttcacaaggcttctcagctacttctgatgatcagccatgcttgagaactactccttgtctgtatgatctactgctataaacaaaacaaaaatccagtagtgaaatatcagctttcagcatgttagaaagaaaaaaaaaattcagtaagcctaaagcatatgtaacatctatctactttttaattaccatttttttattttttagaatgtgtttttaacagatatgctcctactttttaaatattttttggtcaaagaagataatatgcataggtgttagattgacccatatgaaatttctaacattaaaccatttttttaccaacaaaattggcatttcatatggttaaccaattcttttctcagaaaaactatgctcagtttacaacctgtgaagatatttacacaaaaggaaagcatttattttgtgtattcattgttgcatattttaaaaataggattttaatctattacaatatgttttgctatctgtgttgtgtcttttttcagatatttattcactatattataaaaatcaatttttggacctgctgtgtctaaactctgtgaacaaaatattaatcccagaaactcaaaaagaacttaaaatccgacatggggaagaacaaggcccacaggcacgtagcgaaaagcccacttgtggacaaaataagcagcttgcaaagtagctggtggtgccagcaaactgcttgagaaagaaatggtttatctggaatcacaagcagtgtcaccagccatgagctgcctttgttctcactcattgccacagaattgtgaggcacatgcttgttaatggctgtggcgccagctaagtctctttaccttccagaacaaatgcatttagtggcatttatgtaatatagtgtactttccactagaatggataagacaaaagttattgtactcttaaacaattagcatttaggagagtaattctgaaagaaaatgcataaaaacgtttgtgaaggattgtttgtaacttaatatattttacctataaaatagaagacataaaaggtaatgctcaactttacaaaaacacaataattttttatatttttgcatgtctgactataaacacctaaatgttattctcttgaatttaaaagggatctgcagtcttcttgatttatgaacattgtggttttaaaaataatttgctgaaaaatgatgttttgttttcattttttagtgacaaatatttagggaccgtgtatttccagaatgctactgtgttaatatcttgctgcatactttgggctgtgctataacatgaagcaaaagtaattataggttgctatttgttatccctggtgatcatgataagggaaatgt

SEQ ID NO: 89693 - DNA, 1037 bp, Homo sapiens
tggaggagacgaatctactgttatttttagtgggcagggagttgagagttgattatttttggttaagacatttagcagcactcagtatctcagaagacagaagtggctaaccttggagcacttttaacgtctgcagaaggaattagatagatgtttttcaagtgcctacatttttattacacactggtgcctatctcgcccatctaaaacataaggtgatatgatcaggctgaattaagcagcaagacaaggtagaatataacaccaaacaagagagaacataaaataaattgtctggttacctaagaaatggctgaatatgagtagaggacagatgcaatgaactataaccattgtatagtaaggtacaggcaagaaatcttgttatctctggacattagatcttgtgtatttccagacctgaccatccttatcaagctctaaactagcactttaggctactgacttgacagtcccacaattgttaaacaaggttaaatcataattcttgattttctgcaaaaaccaatgcaatataaaatattttcttctatagtctttcttatcccaatatatgacatcaatatctacccagttgcttaaggaaaaaaaaaagagtaagaaaggagaataatgagagctcgttagaataccggtaggagattgcagatttaaagaatgtaatcaggtgcgtttgagccaaaacttgaagcaggtagagagtgagctatgcagctatctggggacagagcactctaggcacagagaatagtgggtgggacggagttatggggaactggctgggaaggtggagtgaacattctgtgataatgaggggcagatggttacagggtatgcatatttgtcaaaactggttgaactgtaccattaaaatgagtatgtttattttattgtatgaaattgtacctcagtaaatttactactaaaaaataaattccctacagtggacttctgcttaggatatagaaagctaggaagagttctaccctaacaaagagaaaaagaggtaaactaca

SEQ ID NO: 89694 - DNA, 1010 bp, Homo sapiens
gaaattaatattaaaactcttctgtcagcttaatttcattggctttcgttaagctgcttcaactatatacctaacggttgcagctatagcaaaatattttgccatggacactcttgtcactttcctaaacttatatcgacatcatttaggtatcattaacagaatcggggaatttgggtatagttgccatcagtgcaatcaagataaagcagaaacaccatttcacacaaggatgtttattttaagaatcaaactttgacattttaagggaaatctttatgaaccaggactccatgtagcttcactgatatttaggatgtgtgtgagagcatccttagcaacttctcgattatttcatctctggccacatgtccttcttgttaactctgagttttaattaagaagtattggtgttaataagatctctttaaaattgagaagtgtcagtgttaataagattatgaaacaaagttttgcctaaggaacacctatcacgagttaactccgtcttcttttatgggatagattatttttgacaacatggtaaattgtggtttatagtctaagaattcctgttagttttatgctttgatagaagatgataatgcaaaagtaccagttattaaggaaagtaaagagtccatgggggctgaggggtatctcatgggagaatgccatccctgctgtcatctcagctctcaaagaaactatctggaactcaagcagggcctttatccattcctcttaacagttattcctgcaagcagtcttaaggattataacattcagtagaaatcgttctctgtatgaaggcaactttataggctagctgtttacttacttctgaaaagctttttctaaccatgttattcatgaatttgtccaaattcatttctatttcttcccagtagtatttttggaggtaaaatactgagtttaagactcattatgcttgtgggtaaaggtttcacaaaactctttccccttttacatgagaaattggccttggg

SEQ ID NO: 89695 - DNA, 1034 bp, Homo sapiens
tcatgtaaagggaactattagaacaaatatataaaccttcctaaataccaaaaaaaaaggtaaaaactaaaatataaaaagaaaacaagtaaaatagaccacatattgaaagactacttgcataaaagacttgaatacatagacatatatataaggacattaaaaacaaacagataaatcttctacctacagctccatcagtaagaatttgttgaataagctttggtacattcacacaagaaagtattataccatgcagctataaaaatgaatgaaaacatctccatatgaagctctatatgccaccacataggcatcctcgggacaggttgatactcatttgtatctgtttatattttggaaacaaataggggaaggacaaactatagaaaaaattgttaaacagttacctataaagaaagtgaagaaattgggtaaaagtgaaagaggaatgaaactcgacttctttgaatattttttgttctttgatgtaacttaagaactccataaatgttttacatgattatgaaacaaaagtttaaaggagcagtgtctaaaatttaaataaattgaaatcagtgaacctaaatatatatccatttggtggcataactgaacatctaagtgactattcctagtaggctataccttaaagacacaattgaaaaaatagtttttactaatgacatttgtatagaaacctttatattgttacttcaagacgggtgtaatgtgagtttaataaaacacattagtaattgtgaaatattctaattttgttttcccattggggacctatatttgtatattatatatataaattatatatatatatatatatatatatatgaatttttttgagacgggatcttgcactgttgcccaggctggagctcagtgtgtgatcatagttcactgcagccttgaacccctgagctcaagcaatactcccgcctcagcctttcgagtagctgggactataggcacgcatcaccacgctcaactaagttttttattttttgtaaatgcagcag

SEQ ID NO: 89696 - DNA, 1027 bp, Homo sapiens
caggataacattttctggatccctggatcctctcacggaaggccaactgagcatcttgttggactgtgatgcaagttagcaataaaatttttactgcattttttaaatgggaaaaatcttaatagacatttttccaaagaagatataaaaagtggccaattagcacatcaaaatatactcaacatcattggctattaaggaaatgcagatcaaaaccatgagataccacttcacacatctattttgatggccagaataaaaaggcagataataacaagtgttggtgaagatgtggagaaattagaatcctcatgtactgctcatgggaatgttatatggtgcagccattttagttcatcagtaattaaacacagagttgtcacatgatagagaaatttcatttctgggtttacatacaaatgaattgaaaacatatgtctacctgaaaatgcacatgttcatagaaccattatttgcaatagccaaaaatggaaacaactgaagtgtccatcagaagacaaatgaataaataaaatgtggtgtatccataccatgtgagataccatgtgagatactactagcccttctcagtgcatcatacgataaaaaggaattaaatgctgatacattcttaatcatggatgaaccttgaaaacattatgctaagtgaaaggagccagtaacaaggccacttattgtttgatctcatgtatatggaatgtccagaataggcaaatcttatagaggtagatagtagatgccttagggctggagtgtgaagcagaatgaggtgtgactactaatgggcacagagtttattttgggaggtgatgaaatgtttcaaaattaggctgtggtgatatttgcacaactctgtgaatataccaaaaaccattcaatcatactttagattggtgaagtatatggtatatgaattgtatcttgatgaagccattgaaaaaaaagtagtgctttgagcacggggggaaaaagagagctatttgttgggtgtgtgtactagtagata

SEQ ID NO: 89697 - DNA, 1123 bp, Homo sapiens
cagcctctggtaaccatccttcttgttaagtgaaacaagccaggcacaaacaaacaaacatcacacgttcttacttatttatgggagctaaaaattaatacaactgaactcatgaagacagagagtagaataatggtattagttcttgatggaaatgtcccttaaagatttttctggaagatttaaaggctggggtaggtaatttaacacttatataacatgggaacagttatcttagtaggtatgctgtcatatccaagaagtttgaaaagctgaaatttgttactcttaaaacagctcctttcacatgttgtcacttttgacaattgcttttgggggtcaacttttcatgcatttattctagtgatgataacagcaatcagaatattattaaaacttttgttttacattactttaccatggtataagaggtaaaaatgaagaaggcatagtacctacttacaggatagttaaaacagatacacaactaaaatacaattcaacatataaccaattttataaaagctacagaaccaaacttgtgggttgtcagaagagaaagtgagagagaaaaacttttaggaagaaggggaggtactgtggcagtcttcattgaaaggagttgaaatttgagctgggtaatatttttcaaaggagagattcaggcaggaaaacattccaggtgttatgcttcttcaaagagggcatgaaagtgaaaaatggtcttgtgtcattgtcactgagttgtttgtatccagcacagtgtctggtgtataataggtgttcagtaattatttgtcacccctcactcattctatacacaagaattaactcaaaatggaccatagacctaaatgtcagagccaacattatacaacttttagaataaaatatgattaaaccttcatgactttgggttaggcaaagacttcttaggtgatgccaaaaactcaagtgacaaaagaaaaatagataaattagacttcatcaaaatttaaaactttgtgtttcaaaggatgcaattaagaaagcaaaaagacaatctacagaatgggagaggatatttgcaaataatccatctgataagggactagtatctataatatgtgaagagatcaataat

SEQ ID NO: 89698 - DNA, 1070 bp, Homo sapiens
aatatatctagtaactgtttagaaaccctatcggggccagggtggcaatggggagttgggtttaccaaaaacttgaatttgggtcatctgcaaatgttttgttatttataagcaattattatttgatttatgtagtattcctgtgccatttactccacaaaaatgtgttgaatatgtatagttctgaagttctgatgttgccttagtagcattcttctttaatcagagatctataaaattaatatttgaggaaataggtcatatttactggtatttgccaaccatggaggtaattatgccatgataggacaatttgaatttgtaacagtcctgtgaattctgctactgaagtttacagattttagagtcactgattgaatattttcttcttgtataaaattttcactaagtaaaaatgaatttcttaaagcatctgcttctagaaatagtgggaaaattccatttggaatctgtcattgacaatccttttttttttttttcttaacatttatgtgtatgagactttgtaaatcacaacattttccaaatgggtttatgaacttgaattttgctgccttttctcagatttaattgaagagaatggttagcactgattcagtaggagagatgactgtgaatcactcctgatagagacctgaaaggtgattaaacaaacagcagtaaccttaaaaataagcaccgttgtatgttctttcatgatacttcaatgttttgttggtcattcccattgctcaaaacactgttgtataagtgatttacacatttgaaaccattttctcttttacattagtcattaactgggaaaatgaacatgttccttccttttctttcacagaagttttacttaagtacctttgccagtaaccacataaaattctgtgtcctggactaatgctttaaaccacttgttggtaaaagatgaaaaaggaaaatgagaaggtcttaatgcagcagtggattcctagatgtgtactttttttttttttttttgagacagagtctcacgacgtgtactttctacaccaagactgaatgtactgtattagcag

SEQ ID NO: 89699 - DNA, 1075 bp, Homo sapiens
tggggaggatgtttaaatcataagaattctaaaaaattttttaatgacagtttaaaattatgtttcaaacacaggagcatttttcataagattactatagggaaaagaatagtggcaaaaacctgagatgtagactatgactaactcatagtgcaatctactacaagtcacttgagcttgtgtattttctcatcttctgaaaaagtgtgttggacaagattatttctctactgtcatacagagtctatggttctgtattatagctttatttctcaaaaataatgattcaaaatgttttataagatttctgcttctggccatgacagattaactgatactggactaactctcctgctatcactaactgaaaactaaaaaaaaaaaatgacacaactgttttcagatgtaacacaacatgtgaagtaaaggattataatccctaacaaaagggagatgaagatgagccccataatggtgagcttctgtctcgaggaacattgcagactatggtccaggaaggtgggacccaaagagtacacagcagtgttgtgctgagctaaggcagagagaggaatttaacactgctgtggcaactgcattttgcaaggtggaatactagagaggagagaatttccagaaagcaggtccagaaatccaagtgtcttcttgaatgtttgtataaatgttaagctgtaatgtgcagagcaagactccacaaggtgtggcagtaaacaactacccaggagctgtaaattaaacagagattttggggaccataacagactgagggatattggagctccaaccagccagaagataaaaatcaatgaacatgaacatttagttgaatgcttagaaaggccatgctttaggagtcagactattctattctagagtgcaaattactttattctaagaggcaccctaatagagcaaaacaaacaatcttcaaagaatacagttgatttacattaaatataaatgcactaaacactccagttaaatgtcagagattttcagactggataaaaaagcgagacccaaccatgtgcagtttaaaagagacacatttgta

SEQ ID NO: 89700 - DNA, 1022 bp, Homo sapiens
attcctttctgcataacatcaaaaatgaggttattttatctttcagttgaaaaatcattggtatccataaatattatatgatgctagctgtagtgccccaggtatcaagtttatcatgttaaattgtgcaaggttaaaatttacaatcatttatcaattttctttaagttccttaatgtggagtttaccataggctactttctcatttctagaatattgacatttgttgcctgtactgtccatataggttactgataaataattgagaaaggtgttcactttaacattgttttcctatttaaattctttatttaatatgattcccatttatgaaaataacaactaatcactaccagagaacgaggatgggcactgacatctatagttttctggtttcaaaaggaacacagaaattaaacttcattttgaataaaagctgtccatgatttagataataatttatatctcttatcaagaaaaaagtcttccttacaaagatagacttgtatattctagcttaataaatatttactttttgactgaacagattagattctttaatctgggactgtttgtttctatctaactagcattgttatcagactagagttaggtttttccatacaacagatcacttgacaaataattaaatacatctattatacaaaagtaaactggaattaaatactaacatttatagtctaggtcatgtaatttcctctaccaaaagtaaggaaaatattaaccctctccactttagtataaactttaaagaagttcaacagattcatgctttgaataaagtatcttttgctttctttttttgccttaagtggaaatgatggtgctggtagtaagagattattttactgttgctatctctgctgattaagaatgaacaaaatatcaaagcatttacatacagaggaagcagtagatacttcgtgttaaacagaccttgggcaatttactttccctcagctcccttctctgtaaaatagggatagtaatatctaccttat

SEQ ID NO: 89701 - DNA, 1626 bp, Homo sapiens
attgacacataatcatccaaactacatagtttacattagggttcactcttggtgttgtatattctttggtttttgacaaatgtatgtatccaccattatagtagtaatacagtagcttcactgtcctaaaaatcctctatgctttgtatattcatccctctctcccctctaactcctggcaacccctaatctttttgctgtctccatagtttttccttttccagaatgtcatataaatggaatcacacaatatgtagcctttgcagattggtggctttcacttagtaatttaggttcctccatgtcttttcatgacttcatagctcatttttttagccctaaataataatccatcgtctagatgtaccaccgtttatttatttattcatctactaaagaataccttggttgctttcaagtttgggcagttatgaataaagctgccataaacacctgtgtgcagatttttgtgtggatataagttttcaactcttttggataaattctaaagagcacaatttctggattgtatggtaagagtatatttagttttataagaaactgccgaactgcattccaaagtagctttaccattgtgcatttccaccagcagtgaatgagagttcctgttgctccacatcctcgcctgcatttggtgtaatccatgctctggatttgggccattcaaatagtctgtggtggtgtctcattgtttgaatttgcattttcctagtgatgtatgatgttaaacatctcttcatatgcttatttgccatctgtatatcttctctgatgaagtgtctgtttagatcttttgcccattttttattctgattgttcattttcttttttaactttttattctgacagtttttttttttcttgggcaccatctagtgaagatacacagaaagctttgaggacataaaaaatgatttattttttcaaaggaaaactcctctctttctgtttctctccttttacctttgtctttcagttatacctgccgccacttgcggagatatgtttatgtgttggacaaactgtatttcccccactctcactgttctacgcttcagcattgcttctcgaccctcagtgacaatggagaggaactcttgtctttaacttgctctcacattctcagatcctatgcttccaggttattaacctctgctgtccatttactgcatgctgcatgttgtatatgactgacaattgcatgttttaataagacatgtgtcaattaaattattaaagagaacatttatatttgaaatggtactaaataatttttttaaaataatagctggattttgtttccttacaaatgtcttcttaagtaatttatattatgtttcacgggagagaggaaagctttcaaccacagagttgtctatataaacttgccagaactattctataccgcattccatttgggaatcttttgatttatagtagttggagtgctctgatgttttatatgaaatagactctacagttactatgacctttgagttctccttcatgcaagcacacctgagagctagctgtaggatttcacctatgttccgatagaggtgcattcagttgagcaggttgattttataggaaggcagaaattat

SEQ ID NO: 89702 - DNA, 1816 bp, Homo sapiens
ctcacctactgctatgtagcccagttcctaacaggcttcagaatgggggatgggaaccctggttctatgagagcagaatccatgtatctttttgtaccactgaatcccaagcatttcgtgttggtacatttttctgtaagggaatccgtgtcttttgttggcttttaaaatggccacctaaaaaaatttaggaactactataagagtaatgttgtcaaaatcaaataccactgttgagattttgaatctgtgaaggataattgcattcttaatattttgtcttcccttccaaaatcatgctagttagtatttcttcatttattcaagatttcttttatgccaaatagtaaattttggtaattttctttatataggccataaacatgtattattaatttaatttcttggtattttttaatctactaatgggtctactaatgagctttctcaaaggaaggagaggagggaagaagaagggacattggaaaaggatatacagaatatttttatcagtctaggtaaaggttaacttgcctctggtaatctcatttttttaagttctttaagcatatagataattaagaaaataaattggctaggcactgtggctcgtgcctgtaatcccatcactttgggaggctgaagtgggtggattgcctgaggtcaggatttcaagaccagcttgaccaatatggggaaaccccatctctactaaaaatacaaaagttagctgggcatggtggcatgcgcctgtagtcccagctattcaggaggctgagacaggagaattgcttgaacccggtagaattgcttgaacccgggaggcggaggttgcagtgagccgagatcatgccattgcactccagtctaggcaacagggcaaaactccatctccaaaaaaaaaaaaaaaaagttagaaaaagttcctatggaaatgtgttataattttattattaaagtactgaaaaatacattattagaaaacttcaccttggaatcttttttaagcattactcttttgcttgtggtttttgtcatcttttacagacttgaatgttgttctaggacagaatattgttgtactttattttagtgaagcataaccatatcaaataacatttcagaactatacattgcacaatcttggacattttcttgtaagaaggcactaaggaaattttatttttgtgaaagtaattcttaagtaacagtgactgttttttatgggctagctccagaccacatttgcctccttcccatgatcttgtttttctgatgtcccaagctgtaagtatagaggtcagaatgacattttagggctctaggtttgaatctcataatcttaaaatggatattattcagtttatcaaaaagatcagttctattttttttttcagattaaaaataaattaggccggacatggtggcttatttctgtaatctcaacactttggaaggccagggtggatggatcacttgagcccaagaatttaagaccagactgggcaatatagtgagaccctgcctctagtaaaaattttaaaaattagctgagtgtggtggcacacacttgtggttccagctatttgggaggctgaggtaagaggatcacttgcctaggtagtttaggctgcagtgagctatgattgtggcactgtactccagcctgggtgacagaatgagactgtctcaaaaaaaaaaaattagttttaccaaaaatagtgcaaataattttcatttacctttaactcacattcccaaatgttaaaattttaccacatttgctttactattgtgtttgtctcttttttttgaa

SEQ ID NO: 89703 - DNA, 1456 bp, Homo sapiens
cattcagattatgttttaatcaatggtatttttaatgttactaatgaaaagaattgttggtcaccagtgacctccatattgccaaatccagtggacattttctgtctcgtttgtcctttcagttgtatttgacactggtaaccactccttcatcaagataacctcttcttggtttcctcatcttctttatggtttttttggccactcttcaaaattctgtaaaagtttatctagatttgaagtgatcttgtgatactttaaatgttggcatttctcaaagtcaccctgtcttagttcgggttgctataacaaaatagcatatactgggtagcttataaacaacagacatttacttcccacagatctggaatctgggaagtcctagatcaaggcgccgactgatttggtgtctagtgaggacctgcttactgacccaaagagggcagttttttctcttgtcttcccatggtggagagtggaagcaagctctctcggactcttgtaaggacactaatcccatacatgaaggctgtaccctcatgacctcacctaatcctaatgccttcccgaagaccccacctcctaataccatcaccttgggggctaggatttcaacatatacatttgtgggggacacaaacattcagactgtagcaaccccttctcttttctctctctactcttttcctaggtgattgtagccactcccatccttacaccgatgactcacaaacatacatttagctagccctatcctctggcttcagacctgcatgtccaatcagatgactaatgtcatcttttgggtttatcagagacatctcaaactcagcatgtcgaaaatggaaatcttgccctttcccagagtcttttgatcctcttcctctgttgccgcctcattgaatgacaccaccatttatgcatgccagaaacctgagagtcaattttgacactccctgtcacctgccatattcaattcattaccaagtcttgtcagcaaccacccctcaaatccattcattctcctttatcatcgccttagtgcctactctcctgcagtaactctttaacaggtctgatgtcaactcttgcttcatcagtctccaaccagccaatcatttcaaaatgcagatctcatcctgtgactcctctgctatatactcttcagatacttcccattgttcctagaatgaaggcataattccttggtgattttacctacctctgttcttccccaaggtcagctccttacacattgtcctttacttttgcataggagacatgtttccttccagtctcagtcctatgtctgcctttttcctttgcttgtaattattttcctgcttatctttagtcatcttgcagatcttggctgaatcgttacttttatgaggaaactttcccttacctatctattcaggcaaaatctcatctatttcaagtttcatctgtagta

SEQ ID NO: 89704 - DNA, 1035 bp, Homo sapiens
tagatccactccactttatttgacaaaggaaacatgctgatcctaataaccaaaaggaatgtggcaactcgttcatgtatttcagtatctttcacataggacagtgtaactgtgacctgcattttcacttgggaaagagtcctgggaaagacctaagagaacttaagctgttcagcagtggctgcatacctttggaggcaccatcagagagatggatggaaaattgggtaaagggaggtctacccccaaatccaagattctgtgattctgataccttttactttaaagcaatcattttcaggttctgtgttttgttctcgtactctagatctcgtgctttctttgctggtgtcaacatgagcagccaccagctgctctgggatacccactctactcctcccagagcagctcccctctgctttgatctgtttacacgttgccatttcacatcagctttcattggaagaaagggttccattgctttaaatatatgcatacataagcgcatacatatatgaataaataagttgaaaattagaaaaccctttttaaaggatggagtaatgaggttgatcttaaggttctttgaacttctcaaaaggcagtgtagtagtctaagctaatatatctatctaaaagatgaatattgtgcattagaaaaatagtattcttttagtgacattcatgaagtcattttttaaataaataatggacccatttgattatttaagctctatgtgcattttaaagtatattcatcgtgtagaaatactcttttttgccttttacttatttctacatataggttattgagtttttctgcatggttctgtatctcttttgttctctgccctctgcagaattttatctgatagtagatagaatgtggattcttaaggagaaaatctgttttattaattataaggcgtatgtctcagactaccaaaccaagtatactgagtgttttgaattaaatatttagtgcttcattgactatttcctctgacttccattaagaccttgagaaataactct

SEQ ID NO: 89705 - DNA, 1020 bp, Homo sapiens
cttcactgacatgctatttcttacctatcagattagaaaaatccattttccaggttatgtggaaacagaccgtctcaaaattttctggttgaagtgtaaattggtacaactcctatgaagaatgtggtaatatccatccaaatttcaaataacatcaccctttgacccagcaatcctacgtgcatttgtgcaaaatgacaatgtactagtttattttgggagtattttttataatagcaaaagattaggaacaactcaaatatccaccaacagagacctacttaaatatggtacattgatctagtagtgtgcagctgtaaaaaaaaaaaaagagtaaggtactgatggaaggctctttcagatatattacgtgaaaaatacaagatatgaaataatacatgtagtatgtgattagtgcaggggaaaataatatttgtttgcatttatctttgtttacatgcagaaactctggaaggacacacaagaaactgataaaagtggttatggggtgggaggagagctagccttttcactgtgtatgtttttcctctcatctcttaccatgtaagcaccaaaggggcagtgatctttatttttttcactaatggtatccttataacaatacatggcacataaatatttttagaataaatgattcaaaaataactcaaagaacaaaagtaacataagctgattacaaaaaatagagacaaacttgaagccaactgttaatataatgtctgcttccaagtaatccttaaattgatgtcttgttgtataacactctagatgattttctacttgcgtatatgcaatttaaaaaaaaagttttataggcattttccataatataatctatgttgaaagatatatggcctcaaaatatcattgaatttatccagtgaatattgctaatgccatatattacgacatttaagttgtttatataaatgcatgtctagacacatacaaacagctctggaaagaaaatattcactcatgcatcagagacagtgtatg

SEQ ID NO: 89706 - DNA, 2483 bp, Homo sapiens
ttctgtttaataggtgaggaaactgagactcagactgaaacttagccaaggtcatgtagctaatagtgtggagctgaaattgaaatccaagtttgaccctagcgtagaaatgttctttttggcagacctgacattgataaagctgaaaaggataggcagacatcatctaccttatacctgcactcagattctcagttgtgagtgagtagaatgtccactatataaagtttctgtgcagtcttggatcacttctgtgcattgattctcgaagtgtgttctgtgggccacagagagtccatggagtctaagccttttataataagacatcatttgccatttccactgtgctgacatttgcatcaagggtacaatagcaaagttggggtaaaactgctgagaccttagcataaatcaagtggtgcctaactgtactagtactcactatattttccacaaccacacacacatttgtggtaaaataaaaaccatcttcactgaaaaatgtccttggcgaaatagtaaaaatgattagttgttataaatcttgacccttgagtacatctttttgatattttctgttgtaaaactagaagctcacataatgcacttctactccatactgggttccaatgattgtcttgaggaaaagcaggtgtgtgatagagttgtgagctgaactagccacttttctgatggaatagcatttttacacgaaagaacatgagacagtcttggcagagaggaaactgccagtgttggttgccaataaaaaaaattttcaagtcaaaattaaaatttcgaaaaacttatatttggcatcatgagtttgacaacttcctaataatttagacttttgttataacatcaatgatgttagtaaatatggattttaaaaactattatttgatgaaatgtgtcaacatttggaagatctgcataattcagtgaaccaatatctctcaaatgactaaaggggctttttcattaactgtattaatgttaacatgtaatgtgtttattattaaatttaaatgaattagtaaatatttaatattttctcagttttaatatctgtcagtataactgacatatgaaaaaattctttggggttctcattaatatttttaagagttgaaaggggccctgagaaaagtataagaaccagcactctaatgccctttcaggatgagataggtagagtggatgtgagcatgtctgtattacagagttcagtgtatatacttttaaatatctactatttctgaattataccttccttccatcagtataatcaatatttaactatatttgtattattcatgcttccatttaataaatatttattgagaacatagttatcagaggttgaaagagaaggggtatacagaatatataaatcatgtttattctctgtaagagctcatggtctctattctaaaaagtcataaaaaaacaatgttactgtactaaattgccttttaagtttattgcttatcttgcctgggtgtggttatgaaataaatttgttgctgttgtctatttctgtgtaacaaactaccccaaaacttagtggcttaaaacaacaatttgtaatgacctccacagggctttgggttgattgcttagctaactgattctctacttgtggtctcttgtttgccatcgtagagcagctgggctgggtgtccagtgtgctcccatctcaaggctggcagttgatgctagctgggagatctgttgaggtgttgcctggaacacctcagttcttcttcttgtgaccttgctatgaagcttggcctcctcaccgcaacgcaggcaggttcccaagaggggacatcccaagagtggcagaaactataaggtttcttatggcctagctcagctatccctgaatgttacattttattggtcaaaagcaggtcacgagaccagcccagattcaagaggaaagaaccacagaagggcataagtgctgggagatgtggttcatttgtggccatctttggatgctagctgccacaagactgctaggagactgttgaattaagttttataaattattgcttattgtagctgggaaaatgaatactttcattcttaagatcaatatccaggcttctgttcaaaatagaaaatttaagctgaatccattcaaatgctattctttgcatttttttcctttaatttacatttgacattaacattctctccctgactttttcccatagtttcttctgatgagcaggaaatgtccactatctagtacaggtgtcttcacttatagtcaaaatggaagaggagcaagtgcacagagttcctgtaagatgcatgttcatgtggctgcacttgctggccactgagttgttgatattgaccaaatcttgtctttagtctgagaaaatgtagggctgtgttatcttgtggcagtgtggcaggctggatgttcactctgacaataacagctcaagttctatacaagagag

SEQ ID NO: 89707 - DNA, 1065 bp, Homo sapiens
tttttaaaagatagaattagcttgctcttgcccaatgcccaggcaataaaaaggttccagtttcttcattcctttggtctttgctgatccttgtttgatcttggcatagcagtaaccaggaaaggaaggaggaatgtttgtcttgaaaatctggcttcctgtatttcctacagccagtggtactttgaaggcagctaagtttttcagggaaatctggcttggtttgcttttttagtttagtcctttcttaaggagttacattgagaacatttagacagctcctctctgaaaatttataagtttccagtagaaaatggttacctattcaaaaaattgctagtattgtacaacagggtgtcttggcagacttgatgggacacaagaaaacttcataattggtttaatttcagtttagactgctggcacattcaaaatgtcagctttaaagaaacatgtcatatgtttatcagattgtttatttcttataagtaaagacctttgtggacaaaattgccacacagcaaattaaactttaaaataacttccatagagctttattgaatgtcaccatcatgttacagaggtaacttggtgtggttcaactttgtcctcttagccatgaattattaagcctccattcctgtttatttttatgaaggttgtaagatttttacctactttcaagctaacaagtttacctgctacagttttgtagattctggtaggacacccaagactcctgggtcaaggacaaaggacagtttgttattgtcctttttttatattttttatcataaattattactcgcagcagtagtaggagccagaatattcatttcttgtgtggttcccatacccacagggcaacatgacaagggccaggtgacacctgtaagtgcagtgggttgcaatacaggagcggaacccagagcttgggaatccccagtcttttatgatagccttcaagcacacctgcccaacctttgctttgaagggagacatctttaatgtatttgatagtaaactactctctgctctagagagagacaccatctctgtcttcca

SEQ ID NO: 89708 - DNA, 1032 bp, Homo sapiens
aatcacaaggtcgcttttgccatgtaaggtaacattcataagtccaggggattaggacatggacatttttgagggagccattattctgtctgccagaaacccttgtctcttccccacccattgccaaagacatgactttttttttttttttttttttgagatggagtctcgctctgtcacccaggatggagtgccgtggtgcgatctcagctcactgcaagctccacctcctgggttcacgtcattctcctgcctcagcctcccgagtagctgggactacaggtgcccgccaccacacccggctaatttttttttgtatttttagtagagatggggtttcaccctgtaaagacatgactttgaaggataggaaagctaactaaccagtcataagtgaatatcattgcagggctttttagcatatgggggtacttttttgacttcctgtaggatgttcagtgttgtccaagtaggtctcaaatagaaccccagtgaagtcatattgtttcctttaattcttacttttggggcaatgcagggtttctcttcttcttttttttttttttttgagacagagtctcactctgtcacccaggctggagtgcagtggtgtgatcttggctcgctgcaacctccacctcctgggttcaagtgattctcctgcctcagcctcctgggtaactggaattacaggcacacgccaccacgcctggctaatttttgtatttttagtagagacagggtttcaccatgttggtcaggttggtctcaaactcctaacctcatgatccgcccaccttgcctcccaaagtgctgggattacaggcatgagccactgcgcccaggcttttcttgtttttttaaagacagggtttcactctgtcaaccaggctggagtgcagtggagcaaccacagctcactgaaagctcaaactcctgggctcaagggatcctcctgcctcagtctgggcatgtggttttgaccattcagttttgtttagcagtcattggtggtgataacaactccgtatc

SEQ ID NO: 89709 - DNA, 1024 bp, Homo sapiens
caaagtcatcgtttatcaaaaattgtggacatggagtaattcttttgtctgtaaagcaatcattttttacttaaacttttcttccccattacagatactaaaaaatattacttggtattcagaacgagttttaactgaaatctccttggggagtctcctgatcctggtggtaataagaaccattcaatacaacatgactaggacacgagtaagtattccagctgctattctatcttttttgcatacagtacaattaagacgatagtttaaagcaatcccaatttttaggatgctaaaattctcgtgacatatggtagaaaataccggtcactgtatagtcactgtattacatgatcctaatgtaacataaggtcttaatatttaatggcttgtatgattggagatattttacatgaaatagaaaacaagcaatgcaaaacatttagataaaagctattgtatgtctttatttggccagtaacactgatttgccttttttaatagcagcaaataacaaagtacaagaggatatgagcacaagaaaatatgaattaaaatgaaaaagaaaggtagaagagagaatattttaaagagtaaaagaaaaatttctgctggattctcttcacagtacctgggagcaaatttcagttctggttaatagaaatgtattattaaagagaagcagtgtacagaattcatagctaagagaaatggcatttttttttttttgagctacgattgtgccactgcccttcagcctaggctgcacaggagtgcagtggcacaatcatagctcactgtaacctccaacccctgggcttaagtgatcctcttgcctcagtctcctgagcagctaggaccacaggcatgtgccactacacctgactaatttttttttttttttaaatagccaaagtctcgctatgttgcccaggctggtcttgaattggttttgaactcttgtcctgaagtgatcctcccactttggcctcccaaagtgttgggattacaggcgtgagcccct

SEQ ID NO: 89710 - DNA, 1176 bp, Homo sapiens
ttcacttttttacaaaatttaggttacctaatcataaaaatctctatttctctattttgttgtaaatacagtcaatctttgtccagtttttatagcaaggattttctggccttgtgaaatgtatagacatgattcttgttctacactttggaactgctcattaccatattgtattatattacacagaatactttacagaaatacattcatctcattggtggcagcacatcctaacagggtgttttcctccccagcaggactctggactgtcttcacactaggtggtgtgggcagcaaagcggctgcctctccagagctttcttcccctctggccaaccagagtctcctgcttctgctggtgttggccaatctgacagatgcctcagatgcgccaaacccctacagacaagccattatgtccttcaagaacacacaaggtttgtggtattttttctctaatattctttgtaatggggagagtattgcttgttctatattgtttattgtcttatagttttggagatgagtgtccattgtatgttttcatattggtcaaacatgagaaaaactttagcttttcctgtcaatattatcaggaaggtcaagcatcctttatatctgatcctttatatctgtttaaatccatatttctttcatggacaaccaaccagcatgtgtttaatttgggtcagtctgtactacctgttagggataggaattaacctggaaaacccaaatgctaggttgttttaaattttcagttaaagtctgtgttctagagttttatagaactaaaaattaggtctcaaaaacaaaaaaaaaagattagaacacaaatcagaaaacctttttctgtagagggtagtggctttgtggagtcacatggtctctcctgcagtctgttagccttgccgtttttccatcaaagcagccataggtactatgtaaacaagttagatggctgtgctccagtaaatctttacttccagacaaggggcaggctgcccatgagctgtgtaacttggtattaataactcctaaagtagaaggtgagcatatggcttcatgttgaaccagtattatctcttctcaaaaggttacattctaaaagcaagattcctgtagtatagtcaagtgctgctcaacagcagggctgtgttccattaggcaattttg

SEQ ID NO: 89711 - DNA, 1049 bp, Homo sapiens
gtatgtcaaaatatatattattgttgattgtttctgataaaatctcatacataattcaggcttcaatcttgatttttatatggagaaagaatttcatacaaatatgtatatatttatgtatttatatatttatatatatatttatatatatatatatttatatatatagctttttttttttttctcgagacggagtctcactctatcaccaggctggagtgcagtggcacgatctcggctcactgcaagctccatctcccgggtttatgccattctcctgcttcagcctcccgagtagctgggactacaggtgcctgccaccacgcccagctaattttttgtattttcagtagagacggggtttcaccgtgttagccaggatggtgttgatctcctgacctcatgacctgccctcctcagcctcccaaagtgctgggattacaggcgtgagccaccgtgtccggaccatatgaatatttttatataaaatgtaaaaaatcatctgtaaaaatgcaaaatttaaataattctcattgttttcctatttaatgtaatacaaaagattgtgctagatcctaggagtacaaaggaatcaaaccatggtgaaggagggaaggccctctctcagggaacccacagtttagcaggaaagatgggtatgcatgtcagggttgtttagtagtggagggtggacagggtgttgcaaggttaaagtctgtatatcgtaaaggaactgttttaggaacagggcttgttttgtttgaagaaggagtctctggtggtggtatacactatcagatgcttaaagacttgtctgttttcctaaagggtaatatttccaaaactttagccacatccatgccactgccacgattttgtcttatatgagtacaacttgaattccagtttacttagttcactttagaatgacttactttttcaaaattgtaagcttattatttactttattcttgtactatgtgggaaagtccttgatcttctgagattgatgtgctagttatatatgtctaatatacataactattaaa

SEQ ID NO: 89712 - DNA, 1925 bp, Homo sapiens
ctgtcaggcttgttggaccttcttattctattcttcatgtatcttggtctcctagaatttccatttctcttccatctgcattttgggtaatttccttggatttatctttcagtccactaatcttcttttcagctgtatctgatctactatgaaatactttcagtgacattttctaatgtgtgagttataatgtgtgtgcaatgaagtacacatcttaattgtacaacttgttgcagatctaagtaagtgattaagtaaggtgaggacttagaatggactgttggtaaatgaatggagctggtacaatggagcttggtggttactttgtcatgaatcatttatttggaatggtgtttaggaagctaattaggatgggtttaagggagaaaggaagtcagagtataggcagaaaaataaggcaacaaatggaagggtgcatggattctagggaggttttttatttttgtttttgatcggaaatttttacatatttgtacactgtgataggaataattcagcttatttccacaaatatttattaaatgcctacatttcattgagcttacattttattcaaaacagagagattgatattcctaaatataggaggaagtatatttcatctgaaggcagaatgtacatgttgatacaggtgaatgtgtagattttaaggtggaaagacaaggtagttctcttctgatagattctgtctttcagttacaaagaggtaagagtcagctaagcatgaagattagggattgttgttagaagtttaaagagaacaataggtttccccagggactaggtcaatgtagtaggattgctgggcagagctgggggtgcacttgagatttgtggtgatgaacttaaagtaagagcaagtggaatggttatattgttcttcagctatatgtaactgccctgggacatggagtaggtggagagttggatttaatcaagattagggttttgccaggcaaatatggaggaaaagagaagtgagggaattgggaaggcatcagcaagaaagtgatttcagtactgaacttcagaatcctagttgggtgaggagggaagtgaggacatggagatggcgatggacaatgagaaaagtagtagagataacagagcgggtcaaaaactatttgagtcaggactagaggaagtgacctgaatgctgggaagtggtagtcagggagtggaatgcatgaattcagaattgtagtggcagtgcagtcaccagtggagagaatgtctaggcaggatgagactaaggggctgggtagctgaggtagaatagaggaagtgcaagcagatcaaggacttagaggctgtgttgttgggtgccttgtctgcagggacgtagaaatttacaaaatgagcacgggagtagtgtggagggaaagacagtgagctaggtgctcagattatcagaaaatgagcaggagtgatggtgatgtctgcagatgactcgagcaagaaacgttgatggatggagtagtctgatgggctatttcaaggtagctgggatgtttgaggagaaatgacttggaagcagtaatgaagagtcatctccatggtacgtggcttgtggagagagaactaagaggtcaccatttgaaaagccttctgagaaagagctgtcctcaggggacacccaggtttctgttagatcaagggtattcaaggaggctgaggttgacaatatagaaggttttttcctaatgaaaatgtgtgctccagaaggctcagtggaagggctgggatgaagagagctgtgggcaatgaacagggatataaagcataatatgataatgttggtgttttaggggaaggtaggtaatgagttctgattctagccgttgacaatttgttgggttaaggctgttggcctcctggccagggaagtgggtgtcctacttgaa

SEQ ID NO: 89713 - DNA, 1205 bp, Homo sapiens
agagattcaggtagatgatgaaagaaatatgttgaaaatttgataccatgaggtgaaataagttgtaacatttattttattttattttttttcatttgattctgtccttaccactttggacttttcttttaatatatttttctccaatgtctaaaaaaggggtgaagcaaggaagtgttgactttgaaatttcttctgtgttttaagttataagacaaagctgtaatgtcattataattatttcatattttgaagagtcaaatctaattaaatgtgttctgccaaacttcactttccaccacaagtactgaggttttacacaataacttctgatatatggtttttccatttgaatgagccatccaaaaaaattttttttttcctttgcttgcaatggtgggtgtccaagccaaattataaggccaaaggagtgtttatttctttaggcaaatgctatgatagagaaattcatacagtagaacttgaagattaaaactcatattcctaatttctgtttttgagaaagctgttgaattcattgtgatgggtatggtatgcagtaattataatgtattttacttgattgttatttttctcttcagttttggctttttctagggtgactcattgagagagaaaaactacagtaagagaaaaagtatgtggcaatcagaaacaggcatagttgtgaaaataacagatttctaattaaaacacttctaactttcaaaaaagaaactgcttaataaacaataattatattctcatttcatctctatttggaataatttgagagattttacgtgctcacagaaagaatgacttttttcccccccttttcaggattgaactcattttgtgacttataaaatatagttaatttctgtttactgtttctgtgcagtggttccttgcagggatacattgatgatttggaatagtgtttatgatgcaaaagaactatatttagttgtagagtagtaataaaaattattttatttttaattgctctttgacaaaagtatggtttcagattttagacttcttaaaaggtgttttaaaaatgatattcattggaaataatctaatgtcaaaatacagctttgttatctttttttcttgtaatttgctgacaaccacttttaaaccagttcccaggattggctttgggaatcattaagcccaccttctactctcattttctt

SEQ ID NO: 89714 - DNA, 1026 bp, Homo sapiens
tggagtgcagtgacatgatgtaagctcactgcaacctccgcctcccaggctcaagcgattgtcgtgcctcagctgcctgagtagctgggattataggcacctgccaccattcctaattttttatgtttttacttgagacatgatttcaccatgttggccaggctggtcttgaactcctgacctcaagtgatctgcccgccttggagctggaattacaggcatcagccatcatgcccatccgttaaagatgttttataaagcaaatgactgaagacccttacttccataatttgttatgttatgggacaggatgttagatggtaaagtattgtcttagcttgggctaatgtaacaaaataccgtaggctgggtgtcttgaacaacagaaatgtatttctcacagttctggaggctgggaagtcagagatccaggtgccaggagattcacttcttggtgtagaaccctattcctgacttgcagatgtccaccttcttgctgtgtcctcacagggcagagaaaggaagctctggtcttttcttttgagggcactaagcccatcatgggggctccactctcacgatctcatctaagcctaatcaccttccaaagctccaccttctaatcccttcacattgagacctgtggcttcaagataggaattttgagggtgacacaaaaattcagtccataccaggtattaagtagcttgtgctggaatgctcctcactgaaattctcaatttggaaggctactgatctcttctgcatgttggcatctaaggtacctttcagctctagtcattatcttaaaccacagctctgcttagtggtgttggtgaggactgtggccaaagtggatcactcactacccattctaaccctgctaacttgtttttttgttatgttttgtttttgttttttaaaaaacaaaaaacaaaacaaaacaggccaaaatgtgtaaggagcccctcagaaaacaattctgtgattgaaacacgttattctcttttctaattttgagggcca

SEQ ID NO: 89715 - DNA, 1442 bp, Homo sapiens
ctctaccagaccttgtttctccccactgcagaaaaaaagtatttaagtaatttgatcaatatcttatgatgtgataagaggaaaagcaaggattaagcctcaaaattgctctcaaagcccatggtcttcactgttgtgtgcagtgctcaatttctgtgagttgtgccaatagcccttttgtattaacagatagtgttaatggcagaattatttctgtattgttattcagaattagatgactcccataaatatgagtttgatttttttttcctttttgtatagtcttccatacaccagcaaacttgtgaagaccttattatataactttatcagacaagaaaagccacctcctccaggggcccatgttttccctcagcagtcggatgggggaggactgctttatggacttgcatcaggagtagcaagtaagttttatcagattttttcaattctttggtgcacataaattttatctatttaggcataagaaattctgtttgcttggctgccaccattaatagttacattgaatttgtgcagctggttcaatgtgaaaacaaagtaattaaaatattaatctttctgttttgtgcggtgatttatgtaaaatgtatgcaaataatgaatggattacctacaaaacatcgtttttcaggaagaatgtttacacataaatatgcgtattgcatgaattgtagctgtatagtaaaaataaaattaagcatttgaaaacttataacactacttgtattataagaggaaatctattttaggttattttagggtatattttggttaggatttcatgtgactaattaggtgcagttttcctattacactaagtgctttcttcagtgacaactgaatattttgcagaattttgtaataagctgtgaaatggcacaaacttgagttttgtttgattgggtgcagatttcttaagtgaagaaagctcttccctaccttacaataagtcctcatttctgcttcacttcacagtattcagactacagacactagaagtaagagagtagttctggtggagggcctgggtcatgtgaagttatataaatgaaacttcctagagcgacactttggtacttgtgaggtcggcctgggagttccttactcctcccaaacctgcagcatgtcctctccttaatcacgcaggacagagtcaaatggaacacatttccacagctgcattatggctgtggcgtgctctacactccagctggacatcagtttgatatgaaaaggtagcactgtgataacttactagtgttgggagcttctttggattcagagacctcttcaaaaagcagtagacttggtctgttaattgacagaaatcagtgaaccagactttcttagatttgccttcctttgatttcttttaatattatgaattgagtcacacttgtgatcacttctgcctttgg

SEQ ID NO: 89716 - DNA, 2197 bp, Homo sapiens
gattacaggcgtgagccactgagcctggccttttaaacatatttctatcagtaataactccttaagatatctggtagaatttaaatttttctagttctagaatcaagtcatcattaatttgtttaatgagctttcatttaagtaggtgttaagtatttttctttgtttttcataattatttcatttttataaaaatattttagtattcttttggtgctattgctctttttactgcgttgttgaggtttctacttccttggtcttaacatgttccccattataatcctgtttaaacttttgcagtaactggaaatttctggatgcctttattcctctgtgtgctttctgttcagctgaatctttttctttttatttgatctaagacttgtttcccaaaggggtttatgatcttgagaggacagagtaacccttcataatcaaaatatgcttaataaaacaggaataacttgtttactgttaatattttgctgaacatgcaaagttgaccttgagaaaggtaggcactagagacacaagatctagggtgtattattgttctgattgtaaagtgatcatcaacatgaaaaggcattgttttcttccctacactgtaccttctcttcagctttacaatctgagtatttgtctctgtattatcactaaacagaaatgaacatagatgtctagagtgaatcttcaaaacagaacactgctagtaactatttccattatacataaatagacttgtcatttaataggagatggaaactggaaaatagggaaataaagggataactaacccaaatacaccagctaatgacagggaaggagtttaatatttttgcttgacttaatttttgtattaaacgtattaacatttttcagtaacctgaaaatactgaatatttagatttgagtttttaaatgtatagttcatttagaaaagaatagtgtcttaatcttccaaagtgactgttactctgtttttcttccattttagagatattacatatgaaatatcagtagaagctatatcaacaatggttgttttcctttcctgccaactcttccacaaagaagttttgcgacagagcatcagccacaagtatttgatgcgaggtccatggtatgtttctactttaagtatgtctagttttttcattgtataaatctatatttctagtcttgtccttttacctgagtatcgtcccatatctccaaccaggtatttcctctagttgttctattgtctctttaaacccagtgcatagggaaccgcattctactttcctgtgccatctacccatcctccctgttcttcctgtcccgtagcttcattaccttctccagtggttgcttcgtagaattgaaactttgaaatcatctttttcttccatctccttcattctgtctatgtttaagcagtcaagtcatatttgttattcagattatttttgtatcttcctcttctcagcagtccctttgaaacacctgtgatctatgcccccttactctctttggacttctccagcagcctcttcgctgactattcctacttctttgagcctgcaaatatttgctgtgtgctatccatgtgccaggcatgttagactgtggggctatgctcttgagcagaagcttacgatctcctagagggtgtggatgcaaatgaccaacacatatgcacatacctgaccttttattaacataatcttcacaaaactttaaaaatgtaaaacaaatccaaataaagtacctttgaggaaagttctcagatagtggggagctttgtcttcttcatattctttttgctaccctgattattcctgtggcatgtatgttctttgaacatatttgaaaatcactgagggaaaggatctgggctttggagtcagaggtttgcattggaaccctctctgacagagacactcagaatgacactcagaatgaccgtggtttgaagtagtgctggcatcgtgggactgtgtgcatctttgctgaaacaagattgtgaacttcatcccttatagtgccagagtattcaagttgctttttaaaaatagacatagagggtgttagtgttcttattttctaagtaaggtttttatagtatcattatggtgccacatatttaaaccgtaatatgttctttacttatttttggggttcatcttggaaaccatatttaaaaagctca

SEQ ID NO: 89717 - DNA, 1017 bp, Homo sapiens
ggagtctcactctgttacccggctggagtgcaatggcgcgatcatggctcactgcaatctccacctcccgggttcgagtgattctcctgcctcagcctcccgagtagctgggattacaggtgtgcaccaccatgcccagctaatttttgtatttttagtagagacggggtttcaccatgttggccaggatggcctctatgtcttgacctcaggtaatccactcgccttggcctcccaaagtgctgggattacaggcgtgagccaccgcactcggcccatttttttttttttataaatcataaaaaaagtaatggatattttaatttgtgtgatccatccctttagtttatatatgatgaagttgataggtaatgtggtcgataacggtactgagtggcagttctgagactaaaatccacatttcttgaatcccaaatgccaagcactgtttcttctagtgttaagacttttataaatgaggagtattaccatgtctttgatttgttaatttttaaaactggccattatactaacatacttttgttgataatatctgtactatagcatattattttttagtctttccccatatttgactcctagaatctccatgttggcatgcattgatatttctaaattttggtctcaatcctttgaacttgtcagttgtttttattaaacttatgttccatttacagtaccatcaggtttcttatccaatagtaagtaaaaggaggatgtttttttcctctgtattcgttgactgctcttagccaacactaacacccatttcatgaagtcttttgtctttatccaagtgttccactgtgccctagcagtgcagtgcagggtcatggcgcctgtctctttttcttcacatgaaattaataacttgctccagcagtggtttgttctaggacatttccagagcagatggtggaaagttcttgggataatatggcagccaaagcagtattttggctttttaaggttgactttgttttggtgattgtgtaa

SEQ ID NO: 89718 - DNA, 1012 bp, Homo sapiens
cagtgaaactatattaagaatatggtaggcacagaattaatctctgtattaagagatcttatagatctttggaaacaagattttaagagagaagcagtttgaatctacttcatattgtggtagacacagtgagttgagttctccttatcttcctgacttcctgattgtatttccagcctcttttgaagccaggttttcgtttccagccttctttgaagctaggcatagtcagtgagatgtaggggaaggtcctccaatgaaacctctgggtaaagctctctaaaaggaactgattgagtcagctaggaggcacatctttttgatcttaacagccctttctcctgctgtctggaatgtggatagtcttttgagttgcatagccttcttggcaccatgaaccaagagacttacagaaaattctgttttgatgtcattgagctgctgaaccaaagccaacaactaccagtaccaccttttttcatcctggacttctcatgtgacagaaatagacccttatttgttaacactgctgtaactgggcttctgtcactgcagctcaatgcaattcctttgtgattcgaaatgttcatctcatttgttgcttttaaaaatttaaagtagagacagggcctcactatgttggccaggttggtctcgaactcccagcttcaagtgatcctcccacctcagcctcctaaagtgcctggattacaggtgtgagccaccgtgcctggcctcatttgttacttttaaagcagtgattctccacctttaaaaaaaagtattggccaggtgcagtgtctcacgcctgtaatcccagcactttgggagcctgaggcaggtgtattgtttggatgcaggagttggagaccagcctgggcaatatagtgagaccctgtctctacttaaaaaaaaaaaaaaaaaattaggccggatgcagtggcttatgcctgtaatctcagcattttggaaggccaaggtgggcagttcatgaggtcaggagttcacgacc

SEQ ID NO: 89719 - DNA, 1049 bp, Homo sapiens
atttttctgatatatattaatcagcttaaagtaattgaaaagatctaagccaggagagtgaaaggatggagtttagttagctctgtctgattgcaatctggagtttggattgcagaggagtaaaattggaactacaatactaactagttatgaaggttaaaggagtccaggagtcagttttctttctttctttcttttttttttttgagacacagtcttgttttgtcacccaggctggagtgctgtggcgcgacctcagttcactgcaacctcttcctcccgggttcaagcaattctcctgtctctgcctcctgagtagctgggaccacaggcgtgcgccaccatgctggactaatttttgtatttttattagaggtggggtttcaccatgttggccaggctggtctcgaactcctgacctcaggtgatctgcctgccttggcctcacaaaatgctgggattataggtgtgagccaccacacccagcccaggagtgagttttaatttagtaaacttgtttagctgcactgtggtgatgagataatgaacaaaaaagcatgacaatggtggaactctggggaacatgccaatagttgaaacgtattttgaggaagcagacactgggaagaaatagaaaaagaagttggttaaaaataaagtattataagaactgagaaaagaaagaatttcatgaaggagtaggtgtcagtaatgtccaagaccagaagtcacatgagatactgactgactttgggaatttggaggtcacttacctgtagtagtttgggataggggaacatttccattggaatggtaatttgcatcctgccgttgccacttatttattctgtgacttgggaaagcccttttacctttgactcattgtctgtaaagaggaggttggcctctttaatggggttcagtctatgatccgtggagtgccagaggttcataaaaggtaccttcaggccctcccatcaagaaatcaagggtaaggccagatatttgttggggagggagggataaaagtcctctacccctgcttcaaa

SEQ ID NO: 89720 - DNA, 2009 bp, Homo sapiens
ctttgttgatatgttttcttaatttttcattcaaatgatttgtaatctgaagagtgttttagatttaataaacttttatagtttattatattctatatactggagacatagataatcaatttttgagtttttaaaaatctcctttctagagaaagatttagtgtgtaagttgaatgtgtctattaactattttttcctttatgattttggattctgagataagatggctacttgtactgtttctatcattttcattttgcaaatcagtttttgatgttcagaattaagaccaagagcagcagtttctctcattgcttagttctctaattaggtatgaaattaacagtaaagttggtcactgagcaattttaatatgacatttggttttataaatgttatgataagctcactttgattttagttcttaaatttaactttttaaaaccttttcttctcttgcagttgaaaacaatcctcgaacaggaaatcttggtgcactaattaaggtcttcctttctagaaccaaagaactaaaactttcagcagaatgtcagaagtaagctggctaattaaaccatgtttgctttatatttaacaatgtgaattttagttttcatttattgatggaaatggactgtggtcttttgaaaatctctgtgaaggaattattctcattattaagaaaaaaaggtagagaggttttaggttagtgtctaagtcactggggtgagattatagattcgggaatctgatttcagctttttagacaatctttagattatattctttaagaaggtgaataatgatgtaattatcgttaagaaggtaattcccctcccccccattatcactgctgctgctatctagtttaaatgatgacttagtctgagttttatttcattctacatctgttgcagttatttccgttatattctttacatcaatggaaggttaactttttatgcactgaagcatttttcaaaaccatgtttggatgtcagtctctgaaaagattaaaatattttgcattgtcttgcttataaacaaattacattgaatccaataaagtttttcttgggagttcatggtcattaatacaaataaaaagtattttaccgtgctgctggcaatgcctcgtcgaaaattttggttacatatttgcatatattctttttatgttaccacaattttttaaattttttggtagctttcttctcttttaatcgcatgtacgtggtatacctattaagaacaaagaacagtcattcctacagtcatcagtaaagatttttattaagtagattcactatgtaaagtacatggaatgaactatgaagtaaaacataatatcactggtacaatgaaataaatcatgagccattaaaagatatggacattatcctaatattaccaataggatggacaaaacggttgtcaaatcaggaagaaatcatgaactagaaataaactatggtgcttatgtttaaatattgattcttgtatgattttggtctttctagccacatcttcatttggcagacacacaatgctttgtttattatttgctgtttgctgaaagtgttcatctgtcagatgtcagaggaggaattacaacttcattttacttatgaagaaaaatctcctggcaattacagtaagtattgtttttaaagatgttctggatatatcatgtgtaacatttaaggataaaatttcaggaataaaagtatgattttgaaaattccagttatccttataattttcattttaaaatgaacttatactgtcattttttctttttctgtgttaatttaaatgagtcaagactcaagcgttttttgtttttgtttttcgttttaaataagaaagctggtggggttgaagctttcatttattttgactttcatgcatgtggatgaagaagaaagtaatataaaaaataaaactcacacaaatatgtatttctttcagaaaacagaggtgtcagttttaaatatcattgccaagtc

SEQ ID NO: 89721 - DNA, 1050 bp, Homo sapiens
tgctctgtcgccaggctggagtgcagtggcgcgatcttggcccactgcaacttctgcctcctgggttcatgtgattctcttgcctcagcctcttgagtagctgggactacgggtgcgtgccaccacgcccagctaagttttgtatttttagtagagacggggtttcaccgtgttggccaggatggtctcaatctcttgacctcatgatctgcccgcctcagcctcccaaagtgttgggattacaggcgtgagtcaccatgcctggcctagccccatatttcttgtaactttgtatctgatgtctaatatatttataaatacagaaatgtgtgattttctttagtaagtttatagtttttttataggtagacaaagcatgatgacttttgaacaagtttaaagtttttatttttattttttataggttgtcttttggaaatgcaggtttaaggacaaattatctgcttaagctagaagatgggatcgaatagcagcagaatcggcgatcttcctaaaaatgagtacttgaaaaagttatcaggcacggaatctatctctgagaatgacccgttctggaatcagcttctctcattttctttccctgcaccaactagcaggtaagagattgcctggagattgaaaatttgaatagagggccatatcaacttgtgtggtatgctgattaaaaaaaaatttagaaatgttctgtctatctatctagtctatctgtcatacatagatcagtagaaaatccaaaagatttgaaagtagaaaataagcttttctttttacccaactcagtagccacctcccttctctagaggttatcactggtagcagtttattttgaatcgttctagagataatataggttacttaagcatatatcccatatagtttcacaaaattgtttaaatacaaatggtagcatactacacgtactgttctgtcccttgcctttttttccacagttaagtaaaatatatcttgtatatgtagcacatttgcaacttccttattctttttaatggctgtggagtatctgtagaa

SEQ ID NO: 89722 - DNA, 1036 bp, Homo sapiens
attacttattttgcttttattgaaaaagttcaattttgaataaaatctgaaagaaataatttattgggtagctgggagaggtggctcatacctctaattccagtgctttgggaagcctaggcaagagggtctcttgaggccaggagattgagattagcctcagcaacatagcaagacgcccatctctataaaaaatttaaaaaagttagcagggtgtgatggcatgtatctgtaatcccacctactcagaaggctaaggcggaaggattgcttgaattcaggagtttgaagctacagtgaattatgttcatgccactgcactctagtgtgggtgacagagtgagaccctatctctaaaataagtaaataaatttattttggaaaactagtctaagtgaaagaacattctgtaataggacaccgagtaactagaatatgagatcctaatatctcatcatgtttaatatggacgatgaagtaacaatatgtaaaaacaatcctagtggttgtgaaagaaagtacctattagtctgatttgttggcacctctctgggacatgtagattcttttttgtttgtttgtttttgttttttttgagatggagtgttgttcttgttgcccaggctggagtgcaatggcacgatctcggttcactgcaacctccacctccagggttcaagcgattttcctgcgtcaatctcctgagtagctgggattacagacgcctgacacttcacctggctaattttttgtatttttagtagagatggggtttcactatgttggccaggctggtctctaactcctgacctcaggtgatccacccacctcagcctcccaaagtggtgggattacaggcatgagccactgtgcccggccttgtggttttaattgagcattttatgagattagatttctcttttcttagcatttcaattatactttttttttttttttttttactgttttagtgtttaccctagagtttgtaatctacatttacaagcaatccaagattgcttttaaataatacaat

SEQ ID NO: 89723 - DNA, 1010 bp, Homo sapiens
cctttgacccagcaattctatttctctggatttatcatatctgtctactcatacatgtgtgaaatattttatatgcttatgtaagtgatagtataagatataagtaatgtatatatcttattggagaatgacatttattttttattacttggagaatgatttgtaatagcaaaagatgtagactacctaaagtccatcaatatggtatttgagaaattataaaatggaatgttacacaattgtaaaaaggaatgaagtgcttcatatatggatatataatgacttcctatatattgatgagtgggaatagcagagtagagaggaatatgtcatatgctatggtttgtttaaaaaggggttgaacatatgtttgtatatacacagaatgtctgtggaatgatgcccaagaaactgtgaatgttttctctgagttgagaaggtggttagaagatgggatgggaaggagattttcactgtctatcctttgaagcttttgtattttgtaccatgaatattactgatacaaaaagaacataaaataaacagaaacatctgacaaattttgttagtagactctttgatagtattgtttctcgttgttgcttcacctggtgggaggaggaggttgattccaaaatcaaattttgttcttttgaaaattcagcattcatgtacttaaactcctagagtaaaattgcttgcttttaagttaccacacaaaaaaagtaagatactggtctatttaactgagaacaaattgttatgattttcatttcttttgatctggtgtcatttttttcctgttaattttaatgaagcacagagaaggaaaattgagtacatggtagagccaggaggacccatatttaaattgctgtcagcaaaccaacactctttgaactaacccactttcatccatacagttagaggtacttattcagtacactaatattagacctacaatcctaactgctaattagcatgagtcccctgataaatagcacactgta

SEQ ID NO: 89724 - DNA, 1050 bp, Homo sapiens
ggagagaggggtgtgtagagcaagggtgatgtgctgaaggatgaaaacctggagggtggaggccgtggagaggaatgtagcgtccaccagaggaactcaggtgcttaggctgatgagttgagggctcaagagaagaacgaggtggaagggaagagaatctataggaatgggtgaatggttgttgcagaggatgaaatttatgaatatatggatttctggagtgattatcctgctttgaagttttattttagataatcctctcagcaacttggagatagaccggacaagtatgaatattcccattctgtaaatgaagaactagtcttttagaggttaggtgtctgccttaagctcataaactgagtacatagggcaaaatgagttggaataattgatgaaactatcagtcgcaagtggattaaatggcagagaactgagttggggcaatgttaataggaaggagattcagctattaagaagtctgtgttgttacgacatataggtcaaggagtttttatgtttttgcaccttttaaccatagaaaagttcacacagtgaaataataaagggtactcccatgtacccattacccagcttcagcagttaactcatgccaatttaatttcatctatgtccctatgcattcctatccccactcacaattattttaaagcaaatcatagacattcaatttcatctgtaaatatttcaatatatatctgtagaagattgaattgcttttttttgttggtggtggtgggaggcagagtctcgctctgtcattcaggctggagtacagtggcgtgatcccggctcacggcaacgtctgcctcctgggttcaagcaattctcctgcctcagcctcctgagtagctgggattacaggcacgtgctaccatgcctggctaattttttgtatttttagtagagacgggggtctcatcatgttgctcaggctggtcacgaactcctgagttcaggcatttcacccacctcagcctctgaaagtgctgggattacaggggtgagccactgcacctggcctgctct

SEQ ID NO: 89725 - DNA, 1577 bp, Homo sapiens
aaaaaaaaagagagagacagaatgtctcttaatatctttttgttgtaataatttctttctttttttttttttgtttttgtttttgtgatgaagtctcgctttgtcaccaggctagagtgcagtggcataatcttggctcaccacaacttccgtctcccaggttcaaacgattctcctgcctcagcctcctgagtagctgggattataggcacatgctaccatacccagctaatttttgtatttttagtagggacggggtttcaccatgtcagccaggatggtctcgatcttctgacctcgtgatctgcctgcctcagcctcccaaagtgctgggattacaggcataagccaccgcacccggcttgttatgataatttctaaaatgttttttcattttagggtgcagacatgaatggattaccaacaaaaggaccaacagaaatctgtgataaaaagaaagactaaagaaattttcctaaaggaccccatcatttaaaaaatggacctgataatatgaagcatcttccttgtaattgtctctgacctttttatctgagaccggaattcaggataggagtctagatatttacctgatactaatcaggaaatatatgatatccgtatttaaaatgtagttagttatatttaatgacctcattcctaagttcctttttcgttaatgtagctttcatttctgttattgctgtttgaataatatgattaaatagaaggtttgtgccagtagacattatgttactaaatcagcactttaaaatctttggttctctaattcatatgaatttgctgtttgctctaatttctttgggctcttctaatttgagtggagtacaattttgttgtgaaacagtccagtgaaactgtgcagggaaatgaaggtagaattttgggaggtaataatgatgtgaaacataaagatttaataattactgtccaacacagtggagcagcttgtccacaaatatagtaattactatttattgctctaaggaagattaaaaaaagatagggaaaagggggaaacttctttgaaaaatgaaacatctgttacattaatgtctaattataaaattttaatccttactgcatttcttctgttcctacaaatgtattaaacattcagtttaactggtagttcattttcttttaaagtctattgaaatattcaaaagggaaatttttcaccacgtcagaaggcagaatttggatgttgtgatggcatctgtgtagtggtgggacaacaattactattgttgcgtaacaagacactccaaaatttagtggttttcagcagcagtgactcgactgggcagttctttgctgttctgggctcactcatatggctggctgggcctgggtctggacctgggccgctatgtgatttttatcttgggctttgaaaattcagtgtagggacctataaatattcaaagatgatgagatgcatccttatatattttttgtattcactctgaagctgggaaagattaaaaggaactcctgcccttgggtccctaatgaagtctgggtcctaactcaggctctattaagttctgtgg

SEQ ID NO: 89726 - DNA, 1062 bp, Homo sapiens
ctttcgtgtgtgtgtgtgtgtgtgtgtgtgtgtgtgtgtatatatatatatatatatattttttttttttctttttttgagacaaagtgtctctgtgtcatccaggctggagagcagtggcatgaacacggctcactgcagcctcaacctcctgggctctagtgatcctcttgtcccagccacttatgtagctgggaccacaggagtatgccaccatgcccagctaattttttgatcttgtagagacaaggtctcactttgttgtgcaagttggtttcaaactcctgggctcaagctatcctcttgcctcccaaagtgctgggattacaggcgtgagccaccacatctatcccctttcagatatcttaatcttggtaaattctttcagttactaatctgtgatgaactaatttttttcttcacatatatcaacagttgaggagctcaagcttgggaaaatggtgtgcattccttgtatcgtcattccagttctgctctggatctacaaaaaattcctggagccatatatataccctctggtttcccccttcgttagtcgtatatggcctaagaaagcaatacaagaatccaatgatacaaacaaaggcaaagtaaactttaaggtaagaacattcacatgccttgaataagagcagtgaaagggggtggtacttgggtgaaacactagattttggaaggacaagttttagaaccagaagcttcaatagtttgtgtaacatttggcttaaattaaagttttaaagtaggcctctgattaatgcatttgtcctttggccaaaatgataaccatattttctgactggtaagtgcaatggtaaatagctaatggatgaggagagattatgctgatacaaaccagtttcactgattgatgactttgataagagatttaattagaaggatcatagagatttaaaaaaaaaacaatttttttaaaaatgagtggacaactctgttgtctttagaattggtgcttttttagattcagctttgtactcagctgcactaatttagccatccggcccgtttctggaagcaaaa

SEQ ID NO: 89727 - DNA, 3184 bp, Homo sapiens
tggggactaccgggctcctccactggtgggggcgccggcccgccgtggggtgcgggccgcctggggtccgtgcggactccggaggtccggtgtctagtggtgagtggtggccgcaacgaggaaaaagttttgggggaaagaaaagtcgggtggaggcgtaacacgttactacaagagtgttgcgtacaggagggctcttaaagtgggtcatagcccgaaggtgttgagagagacggcactcactacctgcagccctgacagcaaaggggtttctgtagagcgggagggaggaggtgtagagggttacggttgagttgtgccctgcggatgcgtcgagtcattttacgcctggaagatccagcattggattgaaacaggctgtattttcttccaaagggttgactggattggtgaggcccgtgtggctacttctgtggaagcagtgctgtagttactggaagataaaagggaaagcaagcccttggtgggggaaagtatggctgcgatgatggcatttcttaggacacctttggattaataatgaaaacaactactctctgagcagctgttcgaatcatctgatatttatactgaatgagttactgtaagtacgtattgacagaattacactgtactttcctctaggtgatctgtgaaaatggttcgctattcacttgacccggagaaccccacgaaatgtaagtggacaggaggtagatacccatttcctacttggggcttggcataagataccaaaaattaaccaaaacgttttattttctagcatgcaaatcaagaggttccaatcttcgtgttcactttaaggtatgcgattcatagttgtgatccaacagttcctcatgttccactcaaaaaaggtagctgcagtgatgactttcttaggacacctttggatttaccgtgaaaattaataaattctgagcagccaccttatatttaggcattgatgatcagggtgtaaggatgtagcgtttgtgaaattgagaagtagtaccagaaaaccatttgaaaacctagtgtgcagatcaagatggggcattttaattgtaattacatgatgatggaatttaaacgttttatagtgaataaatggagttttggagttttctctagcttcaacgaagtttacctggcttttagtcacaagtttttttaattgccttgcccccaaagaatagaaataactcgacattttgaaaagctgaaaattgaaaatttaacgtttactttaaaaattaaagctttgatctagttaaccaacactttattcttcatacttagaacactcgtgaaactgctcaggccatcaagggtatgcatatacgaaaagccacgaagtatctgaaagatgtcactttacagaaacagtgtgtaccattccgacgttacaatggtggagttggcaggtgtgcgcaggtgagaattcttagttgccatttgaaaagacagattttaatggaaaagtgatgggataggataagaatggctaagatctgtgctgatgaacctatttctggttgctgtaatgacaggacaccttggattgatggtgaaataaaccatatcctaagaaaccgtgatatcagataaattcatcttggctgtaatgttaatttaaatcaaggaaaatgactcatcatctccattttctttcaggccaagcaatggggctggacacaaggtcggtggcccaaaaagagtgctgaatttttgctgcacatgcttaaaaacgcagagagtaatgctgaacttaaggtacccaaaccactaacatcctgtgcaacttgggtggttgtttaattaatgttggctgttcagatttatgtccttgattttcttgttttcagtaattaactcttaggattttttaaatttctacctgcagtttccacagaatgaaactatttccttttattttttttgagtccctttatggcaaaattctgtgaagatccagaagcgtgctctgtggtctctttaagcctaacacttagtatttctagttttctgctgtctttttacactggaggtactttaccaggggcttttacccctttttgtgacatacacctttggtagtatgattaattatcaaaatgattgccttagcagtgattaatgtggtttgtggcctaccttcataatggagagtcatgttgcatttcagaaagaaattgtttaaaatttcaaaaagtttaaacaatgacaaacttgtgttgacaaaacacaaatttctccattttgtatattacccattagccttttgcatttgaaggtctgggccagaactggaattagtttaggtctgtatggctccaaaccttctaagccatgctgagaaattttatcatcaagacttcgaattgggttcttccttacccctcagctctccacccgtctaaggatctttgggaaggccactcatagacaaaatgtatagcacactgagtttggtggcaatttagacatgtaaaggtgaaggcagacaactggttaaaaaaatgctatttgcagaataaaaggattgccttttaaaaatgatttcattgaggcaggactctggagcaagcctgggaattcatatttagcaatgatagtttgtggtgttttactaattaaggatgttcctggtttcattctccttcctttcttccccagggtttagatgtagattctctggtcattgagcatatccaagtgaacaaagcacctaagatgcgccgccggacctacagagctcatggtcggattaacccatacatgagctctccctgccacattgagatgatccttacggaaaaggaacagattgttcctaaaccagaagaggaggttgcccagaagaaaaaggtaaataagtagttgctcggttttgtttgtgatagtagaaagatttgtggttgctgtgatgactatcttaggacacctttggaataactatgaaagaaaactattctgagcaaccctttcacctgtcttattttggcttttgtaagtttgtttcttgactaataataaatggtaagttttctgtaatcccagcactttgggaggctgaggtgggtggatcacaaggtcaggagatcgagaccatcctggctaacacagtgaaaccccgtctctactaaaaatgcaaaaaaaaattagctgggcgtggtggcgg

SEQ ID NO: 89728 - DNA, 1040 bp, Homo sapiens
tcatatgagtaatgagttctgcaagttgaccgtccactctagacggtagctctgcctcttgtttatcctgaaactaccatctcaagtctcctgataggctccctggttctaatgtgctgtggtctggtgaacacggtcgttaaccatgtcctcctttcaggactcttgttggtcacatctcctcccagccttggtgtttcgaggccaggttttctcagcctaggcaatattgacatttggggccaggtaaggttttggtgtggggtgtgtgtgtgttgggattgacttgtgcactgtagaatgtttagctgtattcctggcctggccctgctagatgctagcaactctctccatcagaatgggggcaataaaaaggtctccaggaatttccagatgtcccctggggggcaaagccacttgtagtggtgaaccactgttccagcggcccttccttcctggcacatttcatcccttaactttctccaggtccttcctgtgtgtctgtggggcaaagagctgttctggttgggataaatctggttcccataatcacttgggcttggtaatagtagctaatactgacaggcactcagtctcttaagatctcacgtggactttgaattaaggtataaattcaggttccattttataaatgataatgaaacacagggaagtttttcaatatttggcccacagaatacctacttttaggatcatccggggaataaatatctatttctatgtgccataattcatatctacccactaggagttcaggcacttgggaatctgcattttatactttgcaagttctcttttggaatggttttacattaatgcagttttcaaatcaaaagatggtgaaagtctctcttactgctctgctacctgtccgtttcccttacccactctctcccccaacgcacacgcatacaggtaactagttgcttgtgtgtccttccagatttttttgtagctgtatggtggaatttaaatttaacaagctcccaatttcaaatatgagaaccagtgctctcaac

SEQ ID NO: 89729 - DNA, 1012 bp, Homo sapiens
ttacacttttcaaaagatttgtgtatgcattgcctaattagagtagggggagaagggcaactattattatccctattttacaaaactgaggcttagtgaggttcagccacatgcctagacttatatactagttagtggtgcagccagggagaggactcagatttcctggaggcaaagtctatctctgaaactccatgaagacttttgcagccagttcccaccaatatgccccagacgtgagacaaacaaggacttttttttttatatagagccatccataaaatcctaagcccttttattaatgtataaccaggagaacatctgtgccaacggttggactttttatggctgagattcgggaggaagtgtgacaccaagcaggagaggaagaatgattttctttgtacttaggttttctaaggacattgttttaatctgtatcgtgccaaagttgtatcactgttaaacttctgaagacataaccagttgagtcttatttcaagatatgttctcaagccaattgtgtgcttctcttgtttctgtgattgctttctagccaaagcgaagcttgtacaggttgagtatcccttatccaaaatgcttggaaccagaagtgtttcaaattttagattattttcagattttggaatgtttgcatatacataatgagatattttgggaataggacccgagcctaaacacaaaattcattgatgtgtcagttacaccttatccacatagcctgagggtaattttatacgatattttaaatagttgtgtacatgaagcatggtttgtggtaacttatgtgaggggttttcccattttttgtcttgttggtgctcaaaaagttttggattttggagcatttcggattttggatttttggattagggttgctcaacccatattattggctgtacatcctggtcacttctgacttctgtttttactaatggaagctttgcaaattgaattctcagtgagttgtatatttatacacctggcttga

SEQ ID NO: 89730 - DNA, 1110 bp, Homo sapiens
cctttccaaatgatgtacatctaaataaatagtaccttcattagatgccttgtgttgatacttttccccacctggttaacatgctttatttatatttgaatattcaaactgcctgatttctcttactcaagtataaattcctgggaatttcttactactttataaaactgttacattttagactattaacatgcctgttgaatattaaagtgaaaaaatatatgtaaaataattgacataatagaaaagcaatatttagtgccaaatctacaagtttcttgcccttctcgccagatagagccccctcccttaaatgtatctttggcttttatacgatagttgtagcttgatttgggatgcacctatcataatttttgacactggaacttaaatttattgagtgatttctttttaaatgttagtattagaactaaagtgtcttaagcataattaaaagaagaggtggagaaacatttaaagatggttatatacattccacacttttggaatatttatttgaaaattttaggtgattaagcatgtgatgcctggcattgggaaataactaatagaacaaaggaaatctatttaacttgatagcgaaggggtaggcacaggtgtgatttcctctatgataatctctcacacaggaaaccatgatttcagacaaatggtttatctttaaatctcttccacttttagcagatcacagttcagagcctcaaagaggctgtttaatttattatatttgtgtcagcaaataggtaccactaaatttctcactttagacctcacatttaaaactattaaactatatcaactttgggaagttgttcataatcatttggaaatgtatacattctcaaggacataactcagaccatagttttcctaggttcaaaagcctagtttcactacctattctaggtctcttagtacctccttgaagatggctctgtatatagagtagaaagataatggtggatctaagcacatatgaggcaccatcttgagagaccacaaagtatagtaggaaagagcacaagactgaattttatcccaactctgcaaaagttacctttcttagaatgagtttccttatctataaaa

SEQ ID NO: 89731 - DNA, 1008 bp, Homo sapiens
attattattattattattattattattattttaactaccagggccgggtggtggcaccaggccatctggctatttatcttacttctgtttctttttaactttttgcttttttcttttcctcctgttttataaactaggcaaggggggcggggtgcgcaggagaagtggtggtcttcttccttaacagcatgcagtgcagttcttggtacctgcatgtaggtaaagatcaaactgtcaaactggtagtccttaagactctgcttccatgggtatgacttgttctaggtattattgcctaacagaaatttccattatctaattttaaattgtgtaaggtttcacagtgagattattcgaagcatttagaggtatttactaacctgtgatggcttacaaatctcttcttgttgcaataggtgtgtttgtagttgctgctaagcgaacgccctttggagcttacggaggccttctgaaagacttcactgctactgacttgtctgaatttgctgccaaggctgccttgtctgctggcaaagtctcacctgaaacagttgacagtgtgattatgggcaatgtcctgcaggttagtagagtaaaggaaggtgttcactcctattgcttctttgatcagtttctaaaaataattcctttaacatatcataatggtaaacaagttaataatagttatagactttttttttttttttttgagatggagtctcgctctgccgccaggctggagtatggtggtgcgatcttggctcgctgcaacttccgcctcccgggttcaagcaattctcctgcctcagcctcccgagtagctgggattacaggcgtgtgccaccaagcccagctaatttttgtgtttttaatagagacagggttttaccacattggccaggatggtctcgatctcttgacctcgtgattctcctgtctcggccccccaaagtgctgggatgacaggcgtgagccaccactcccagccaatagttacagactttatac

SEQ ID NO: 89732 - DNA, 1251 bp, Homo sapiens
gagcccaggggacggggctcggatagaccacaacgcgccttgagagcggactctttcctcacatcctcatttttagattttctccgtttccaaaccgagagaatttggtttgacacctctcacccatcatatcctagccccgacaggcgatgactcttcccctttgtctccgccaacaccctaaacactgggcaggagccaagggctgaggaacttggcgcgcgggcggccgcggccgccagctgggggcgggaccgaacgtcctgtgggcggggcgcggcggcggcggcgggattggctggggcgggcgggtgcgcagtccgctgggcagaggcttgggccgccgagctggacccggaccggttttgggtactgtactgggggcagggcagagaggtgggcggcagttggggtgcggtgattgtagtaggctagggcgctttcgggtccccattgcagcccccggatgagcccgcagtattttccttatatgatcaggtcccattgcgggcggcgccgcttgcccggagcctgagaggattatgaaaacgtggcgagcgaaatggggccaggggacctggagcaggggcgtgaggagagtaggcagcgggtgaggctggacgggagggaggtctagggaggcctctgccgcgggcactgtgagtcctggccgatgatgacgagaccactgcgcaatctgagttctgggaaccaggtgatggagtatgttctgagaacagactgaggccgggcaagcaggaggcggccgcggcaggggagaggcggagagcccctcgataccagggctcggagggccgggctgcctagcgagggcttcttttgagtgcgtaggggtggtgggtggcatggacggtttctctgagtcgtcagcgaatgccccccctagaatcctgcttttcaaacactttggtgacactcttgcaatgttggggtgtttttaaatccaaatttgtattatgaaaacttacaaacttacagaaaagtgggaagacttgtacagtggacacatatcgacccaattgttaacattttgctatattgctatccacctgttcttccatcaaaccatcttatctttttaatgcagaccttagtactctacacccatgaacacatcagcacacattattcatttacagttctttttaaggcaaaatatccacgcaatcaaatgtacaaatcttagacaagcttcacaaatgctcatgtataggccgggcgccgtggctc

SEQ ID NO: 89733 - DNA, 1043 bp, Homo sapiens
ctgtacttacgtggttcagaaagatcattcatgtaggccgggcatggtggctcacacctttaatcccagcactttggaaggccgaggcgggcggatcacgaggtcaagagatcgagaccatcctggccaacatggtgaaaccctgtctgtactaaaaatacaaaaattagctgggcatggtagtgcacgcctgcagtcccagctactggggacactgaggcaggagaatcgcttgaacctgggaggcagagcttgcagtgagttgagattgcgccactgcactccagcctggtaacagagcgagactgtttcaaaaaaaaaaaaaaaaaagaaaaaaaagaaagagtgttaatgtatataacccctagtaaaagtaataaaactagataatgtctgagccctatatgctggacacttttctacatgcttacacggattctctcattcagtcctctcctcagcccttgttctcaggaggaagggaagtctcagcaagtgtagagctcaggattcaacacagaccttgagggggtgagggtgtcccaggacaccacagagcctgtgggagacacagacaggagtgatgggtgctttgggagagggtcacgggaggggcagggctcaaccttgagagaggggcctctcaggataagtatagaagagaaaggggtgggggtatttcaagtaaaaatagcacagtaagcaaaggtatagaggcaggagtagtgagcattgtgcctatgagacagcaacgtgaccagttggatggttttgcaaggtattgtctgagaggggtgagtgggatctgatcagggagtcctcagacactagactagggatttcagacacaatggcaggagaggggagccatgcacttaagtgggggttaaaggaagagggcacagggtaggtgagaaggagcagagcctagcatctgaggctgtagcatttagcctctcttctgttgagattggaattgctcaaggttagtgaatggggcctgtatgttccttttccctccctccttttcccccaacccctgc

SEQ ID NO: 89734 - DNA, 1230 bp, Homo sapiens
acaacgacagaaggacacaagtctctactacctcaactttacataattaaactgaaacccagagaggtttagtaacttggataaggtcacacagctaagaagtagctgcaccaagatttgagcacttgacgtgtaaccattatgctctgctcctccaaccatgcccaaatgttcttaaatttccagaggatcctaaaaggactgccgtggccactgtttcaaagcggagagcaagtgagggtttgggggataatgcttgtgttttgttcttgattttattcttaaagtggggaggaagtattggcacacttgggaagagggaagaaaacaggaaatgtggtatattttgctaagcccactgtggaagcaggagcccctttcaataaagaattctgcaaattattgtttgggaaaaaatagtgccaatgggggaaaactgcaggtacagaaatgataaatgttctctcttcacaaaaagttcaggtccagatctgattgtggatggtgattggtttggtattcagcctgctgaataattagagtgattcatagttcatgcagagtgtgtgtttgggagtccagcattgctacaaataatagaggggaggtggtttcccctgctgttttgaaacttgtgaaatgtcacattatcacctcctgtcatggtgacaaatgagctttttcactgatctcagtactgtatccagctaaatgctttcaaactgcctgttgcccccataggtttttgagctacaaatgcttttaatgcaccattcagcctaccttgctatcaaagaataataatacttatgatgataatttagctccagggagtacaaagcactgggccaagtgccatgccaatattgaaatgcttgtggccaatgtcagaaaggtggcttgattgaaagtgtctgtaggaagtggcaggagtgagggagtgggctcagtacctattatttttccttggactctaactttggatgtgatttgatgaggccatttttgatagggatttggctgcctgtttcatagtcctattggtgtgctcaaagactcatggtacaaatgtgcttggatggagtgggatgtttcttcctggtagccaaagtctggcaacaaaaggccagtgagttggtgggttagagcctgcagtgtgagttttatcaaatagttttcaaattaggactccctttcaggactaagtttctatgcattctattctatgat

SEQ ID NO: 89735 - DNA, 1033 bp, Homo sapiens
ttttttatttttacccaaatggattacactttgttcacatcctctttaagagtctgattcacagagaagaacatctaaagagatcgcaaaatacaggttgagtcttagcactgggttaattcagatgtaataacccttgatgaaagtatagaacttaaacacgttcatcccagacagcaaggactagcttgtttggaggcctttgtgctttttcgctaaagatatctaggtgcagggtggacacagggtcaagagcacagcccttgccctgctccccagcctttcctacctgccatttatgttctggtgcaggtttcctcactggggttgccaggcaagcccagtctcctgactgcactgaattgaagctgctggcactccagcgggcagtcaggtcatcttgagggaaggctcctggtttgcttgcctgtagccacaatgtcccatgtaggaagagggctttccaaagttcttccttccagttggataagactctgccattcacgggctgtgtgaccttgggcaggtgacttcgccaccctgggttttgatttccccatctctaaagtgaggggcttgggctaacagccccaagattgtgtctggcataaatatttcttgacccctggcccatcaacctgctaggggttagactgagtgaaggcagaacctgcaagtgtgctgcaaaatactacagactataatttgccctcaataaatcataattaaactgagctactgtcttaagtcatctttcctaccttctagggaagtgacatagtaatttgtatattgggaagggctgctcctttaatttacaaaacaaagttaaaacaaatacttcgaaatgtatccgtttttggtaaatggtttcttccatcagtgtcacaggcaccagtgaagaccaatggtgtaaacaagtttgcaggcttaatgagaacaacttttgagtttctaaaacacctcattaatggaaaaccatccattttttctgatatactttggtatccctcaaatgacattttttttcctt

SEQ ID NO: 89736 - DNA, 1043 bp, Homo sapiens
atccacccactgcatgagagtcttgcttgaatactgggcttggccaattccatgtataacaaaactcacagtggtaggaccttgtggtatcaggaatacactgggaatccgattctctagttctggatatcagtgtactttcttatctgggccatcgtataagagaaaaaacagtctggccaatctctttgcactcactaatgtgctagcacagttcggcctttttttttttttttttttgtctttttttgtcagggtctcactctatcacctaggctggagtgcaatggcgtgatcatggctcacggcagcctcgaccttctgggctcaagtgatccttccccttcagcctcccaagtagttgggactacagttgtgtgccaccatgcctggctaatttttaaagtttttgtagagatggggtcttgccttgttgtgcaggcttgtctcaaactcatggagttctgccctaatgaacatgaggcctccaggggtggttagaatgagggtctttgctgattccacagactctgaacagccattctggtttaatcctcttaagaattcatatatgtcttttagtaaataggcacaaggaagaagatccattgctgcagatttttctgaattgagttttggatttggctgttatatgaggagcctcttctggctttctctctgtattctttcctctggttttaagggtgaaatacatggggtggggattgacactcactaaacaataaccatttatggttgcctgtctgggatcatccacaactccatttcaacatcttgacaaaacccctcctctatgcagccatgtgacttgggctgaaacaacactgcagaacccaccagaactctggacttcttgtcacatgagatagaaatgcccttctgttcaagccaggttgaagcctcccttatatccagagcatagtaactgatcatctatcatttaattattgccttgtatgatccactgtttccccagcagaatcagcccactcataatcgtctgaatgtaccttgagttttcc

SEQ ID NO: 89737 - DNA, 1077 bp, Homo sapiens
gtttcctgtcctgacaactggagccagtgtttctagatttacttggtgtttcattcctgttctcagctcacactgggacccttaattcctgctgtgtatgctgccaagggtgccactgtgatcctcctctgctttattttcacagatctatattcataaaatgccaactgtattggagaacagtcatctaattagctggctctaggctccagataattatgacatggattagctactttccatgatataacccccagcatcatcttctgtctccttaccaccccaggcttgccttatcttgttcagctaaatctaggtacctatatgtgtaccctgagccctgaatcttttcattaaactgtcttcaaatgttgattttctttcctcaggagacttcattacaaacacctaaccctagtattctggtaatcctgatggtgatattctaaatgtaaaagatcagattgactctctgtctcttaagagttttgtttctgtgaatcagcaccccagtatctcacaacttacctaaggatgacttgataaaactgttcctgaaaatacaaagctcaagactatggattttatggtggctccaggaggtgcagaaattgcatcaagcccacccagcaacattgtttcattcattcactcattcattcattcatttctattgaggacctcactgtagtaggcattatgttcaatgctaggaatacagaaaggaaaaagatataggctatgtgatttcattaagtgtatctatatatattcaaatggtacatgcatttctaacttttttagtggacatttctgtaaaaacagtacatttatagaaattcaaagtagcccaaaaggtcaggaacacactctttgcattaaaacttctgggcaccatagaaataggaataaagttctaccaccagctttttttcttttccctcctctcttcctccctcacttcatttcttccttcttagtcaaagatctttcattatcacaactcgttatatatccatatacatatacacatatatatacacacacacatatacatgtatatacacacatgtatat

SEQ ID NO: 89738 - DNA, 1447 bp, Homo sapiens
ggagctcgcccagggtgagggcggggctcgacgacctaggacgttcgagtgcggccgggtgtcgccaagggtcggtttaccccatcgcctcagaaattccgacgaggccctttgggctgcacaaccttgggaatccccaacgggcggccccgaatctgcgccgattttcccaagccgtacttcgggcccaaggcgttttcattgccgccttcccggaggatgtgtggtgggggtggttccgcccggaccgacgggcgggcccggagcccgttggactcgaagatcaaagaaccgcccctctggacactccaggaaaccgagacgaccacctaatttgtttgttttctgtttcaggccacgtaaactcttagtaaatgcaaatgcgtattttactgaactgcaattgaaagaaccgttatagaaaagaacacaaaatgacagaattattaaaagagaagaaaaacattatttcgtggctgaaaagctgaaccagcaattcaggaaatggaattcgtatttagaaacataccacatacaaaatccgaagtgggtggtttacaaatgattaaggaatgctaatttacagtaaattgcgtccttaagagggcatacacattagttgtacttattatatgtcagtttgacgtaggtactgatttgttgcatgtgctcacaagtgttctatgctcacccccactttagaatgggagtatcacagtgtcattcttaattggcttttaggtattaccaccttgctcttgactggaaatgcaactgtggttaccacctgtgctgcaggtccgtcctggttccctgatttgtgtttcctgttctgcctggatcctgattctcagaaaccagttactggacttctgatccacatcctgaccctggtccactgtgaccctcagactcttaattatgctccaccaggtcgtgccactgccccactagtccatttgatctgcccccatcctaggatatcctgagtctaagccctggtttctgccaatggcaaataggaagattttattaacaggttttaaaaaattattattattactggttatttggtttgacaaggcacttaggctccctgagctttgccttagctggaaaataaggatagtattacttgctattctatcaaccctgtaagatatttgcggccacgcgcggtagcgcaccctgtaattccaacactttgggaggccggcgggaggggcagtggggaggatcgcttgaacccaggagcaggagttccagcctgagcaacatagcgggaccccctgtctcttcaaaatttgtttttaaattagcagggcgtggtggcgcaggctttgtagtcccagatactctggaggctgaggcccaggaggacgaggctgcagggagccatgatcacgccactgcactccaccctgggcgacagagcgagaccttgtct

SEQ ID NO: 89739 - DNA, 1039 bp, Homo sapiens
gttctaggaggctgaattcctgcttcgagtcctgcccaagagccagtcttggctcagccctacctcactctctcccaattcttcattcataaagtgccaaaaagattagacctgtaatttgttagccagctttacagggccaggactgagtgagtgcctccttaaactttgtatcctgtgtgcctcccttgccttaccctagtcccagccctgcagctttaagtaattcagacatggattagccatttcccagttctgtctcatacagtccagcctctgccaccttccccaccccttcctttattccatcctaactagttcagccctagtcaagactggatagactgatactgctttgtttcccccaggaaccaaccacccaaccccagtattctggtaattttgacaatgatctatatgaaatttatttgattgacatttagactcatgagttaagcttctgctgaccatttatgttagggtacaatcagaggagcagaaccactaagataaagattatgtatatatgtattttaagggatttattatagggatctgaccgcatgccattgtgggagctggttaaacagtctctgtaaggctgttgtctttgcatctaatgctggagcttgaagtctgcagggcaggcactcgggaagggaagatggatgtaaagtgtgggagaccgaggacacagtggagcccacgagcacgagctggaacccacgaggatggcctggaacccatgtcagtctctcaccacctccagcttcgatgatgtgggtgtcctgcagaagaagctggtgcccttcctcacagagttaaatatgcatctggcccaggaattagagaagctgaaaggatgatcctggggaaggtggagcagctgcaggcctggctgcaggcctgactactgcccacaccaacgaggtgatctagcagatacatggcaacgtgtgaactgcaacaacgcctggtgccccagcaccaaccttccaagtgtaaaaacaatgtgctgctgcttcacttccgccctccg

SEQ ID NO: 89740 - DNA, 1403 bp, Homo sapiens
ttgtaggcagagagatggactttctgtgttgaaatgtgatggaagtaggatttgtcagcacagtgaggggttggctgatagagactttcctcaggtgaactctgcccttctaatggttgcctgtttcctacttctcccaggcagtagacccaggcctgccttctgtgaagcaagagccacctgacccagaggaggacaaggaggagaacaaggatgattctgcctccaaattggccccagaggaagaggcaggaggggctggcacacccgtggtcagtgctggggatgccccaccctgccctgaccctgctgtagccccaacaaccacattgacctatggtgttaattcttctctagatcacggagattttcagcctgggtggaacccgcttccgagatacagcagtctggttgccaaggtgtgccccacacagtgaggggtggggaaggagtgggtgttggccagatgtgggccctgagttttgaaagtatagccggcagtttggcatggtgtggtgggaggtaaaggcccatacccactatgctggtcacaattaatgaggggcgtgtgtgtaggaccctagagatttctcctgagatccagcccaatagcattccaggttaggactctcctttgggggtaggggaaagacttggtactctatcatgagatttgaaagaaaaagatagggagtctggtccctattttcctaaggaatttctataggggtcagctttaatatataaattcttattcagagaataatcatttgggtcttgaaggcctttagagtctccaggagacctctgggtgggctgttgcctgacattgagcaatgtgtaccagagaaatggtgctgggcttgcctgggcagtggtatgggcaggagatctgggttccgagctggctttgtgagctgggttcacacgtagttgtgtgatctctggttgccctgcacttcctggagcggcctctgtggaagggcttgggctggatctcttgagcctttcctgagcctattgaggttattaacttcagatgccttgcagaactgtccctgtagtcctggcatagaacaaagggtagatgcctgtaaggactagggtggttgggaggacagaggagtgctggctcctgcagaatattgacagaccctgcatagagccccagacactggcgatgtaaactattggcctaagcacttggattcctttgctcctacaaaccagcccaccaggctagaaaccctttcatctatacttggccaattacagaagtattgattgagttcctgttgggtgcacagcattgaggacaatgagccctgcaaagcttacccttcaggagacacaggatacctaccttcagggagcttataatctgactatgtacaagctgtcta

SEQ ID NO: 89741 - DNA, 1046 bp, Homo sapiens
ggttttcaatgtcaatgagattggcttgttaaacaagaatattggcaaaaaaccttacataacacatacggcctccaagtcccctggtttgagtcattcaaagaccatgcaaataatcatttgtaaaaaaaaatatgtattaagtaatgtgtgtttaaacagaaacacacacaaaacaaaagttcagatgctctcaggaacctaaccctgtatttcttctaggagcaatggttttgtattcaatgttcatgatagctttgtagaacgtaactaccataactaatgagagtcaacatagatgtttataagcatttacatgtgtttaagaaacattattaagtttctatattctttctgattttttaaatctaagttgctatctttccaggtaaatatcaaattacaaattactttttgtttatatttagttataatttattcacatatttatgtacttgtataaaactttcaaaacttaaaagtgcagttgtcaagaactataaagaacctgagatttcattcttaggacaagataatagtgaatttgtcagaattttgtagatgctggtaggaggggtaagactcctgggttacagatcaaagacagtttattacaacagttgcaggatccagaatacagtagtctcccccttatctgcaatttcattttccacagctttagttacctacagtcaaccaccatccaaaaatattaaatggaaaattttagaaataaacaattcattagttttgaattgtgtgccgttttgagtagcgtgatgaaatctcacaccatcccgctcagtcctgctcaagaggtgaatcatctctttgtccatatccgtatccatatccatgttctagacacaacctgcctgttagtcacacagtaaccatctcagttatcagatagaaaaaacacagtacatattacattagggtttggtactatccacggtttcaggcatccactggggaacttgggatgtatcccctgcacgagagggggaattactgtattactatttttgtgccagtttctgaat

SEQ ID NO: 89742 - DNA, 1060 bp, Homo sapiens
aatggagtggttaaaacactgaaggagggaaattaggaactcctgggtcaaggaaggggggaatgagagactactgaagtcaagtagtgagggcaagagaaatggggccctttggggctgaggatggggactatgggggtcttggggtgataaaatagagggatagaggcccttaggtcagtgacagggaggaatgagggggaaggatgaaaagtttctggattggcagtgaggagaaatgatgggttgtcagtctgaggatagagaggagtaggggattaggacactgagaataagaaacagggatccttgggttgaggaatgatgatatcctaggcccagaataggaaagaatggggtgagaatatgaggggtttcttttccatatatgggctggttgcctgtggcaggtcctagggcttgggcaagcactaatggataccagtgatttgtgtggcctggggcacagtgttgtcccttcctagagcctcagtttccctcatcccttccaccccctttcaggctactgctgcttcctgtggcctccatggctgaggactggctggactgcccggccctgggccctggctggaagcgccgcgaagtctttcgcaagtcaggggccacctgtggacgctcagacacctattaccagaggtactgggtgggtagtgggcagagtcaggagtggggtagagcctgattctggtaaaatcaaatggtgtggttaaatttatggatgaagtttaaattatgcacatacagttaatccttattagcggattttatgtttgaatttcacctacttaataaaatttatttgtaacttaaaagtcactactcacagtgcatttgtgattattcaagaatacgtacagagcagtgaaaaactgtcactcaatgcatgtatttctagctgaggctgaaggagcccttttcagctttaatactgtaaacaggtgtccttttcgtggtctgtttagtgtcacatttttctaatttttgtactttttggtgattttgctttttaaaatggtccccaagcatagtgctgaggtgc

SEQ ID NO: 89743 - DNA, 1580 bp, Homo sapiens
tccagatgaatggggcatgacctggtatgctgggctggcagaacacccccaccaaccctgggtagacagagtggggccaggtgttttcaggtggtcatgcatgttggtacagatcaggcagggctgagcattcctggcaatgaggggtagcggggaggtgtgtctggggaggtaaggccaggccaggtgggtagggctagggcaaggccgccctccatccacctggggctgacctgggccttcctcctgccggcacaggaatcgtacaagtacttcccttcctcggtgagtccagccccccagggtggggtggggcatgcgggcagggcggtcagggccagtcctgagattctgccctgcagctctcaccagtgacgccctcagagtccctgccaaggccccgccggccactgcccacccaacagcagccacagccatcacagaagttagggcgcatccgtgaagatgagggggcagtggcgtcatcaacagtcaaggagcctcctgaggctacagccacacctgagccactctcagatgaggacctacctctggatcctgacctgtatcaggacttctgtgcaggggcctttgatgaccatggcctggtgagcagacaggagcatccactggtggaagggtggaggttacagaagcagagagtatccctaatgaggagacagagggtatggaaggctgatatgggacatgagtaggtggtggggttgtcacgagcggggcaggtgggtcagtgcatgccctgcttgcagccctggatgagcgacacagaagagtccccattcctggaccccgcgctgcggaagagggcagtgaaagtgaagcatgtgaagcgtcgggagaagaagtctgagaagaaggtgatggagagggtaaagtggatgtggaaaggcagagggtggggttgagggagaggcagaggtcagaggctgaatggggcaagagccagaaagggctagaatggagcaagggtctggggtctggggctgactttgactccaccctgacctgacttgtcttgctcaacagaaggaggagcgatacaagcggcatcggcagaagcagaagcacaaggataaatggaaacacccagagagggctgatgccaaggaccctgcgtcactgccccagtgcctggggcccggctgtgtgcgccccgcccagcccagctccaagtattgctcagatgactgtggcatgaagctggcagccaagtgagtcattcctgagaggttcaagggagtcaggaagtgcatggtagggcctgaccacagccttctgtatgtctaccagtcaatcagctatccaccagtcaccaaacagccactacccactcacccatccacctacccacccacctgcccgtgtgtccatccagccaccattccgccagtcacctatttacttctccttttgccatttgcgtctattttgccattctcacttactgatcacctcactcattctgttgcttgctaccttccctgcagccgcatctacgagatcctcccccagcgcatccagcagtggcagcagagcccttgcattgctgaagagcacgg

SEQ ID NO: 89744 - DNA, 1024 bp, Homo sapiens
gaaatctgcaggcagagtggggatccctgctgaccacggtggagttgtaatggggggatgagccgccacggtgggggctgcttaaggatccgtaatgggggtgtcctgcaggagggagatggttcagacccagagcctccagatgccggggaggacagcaagtccgagaatggggagaatgcgcccatctactgcatctgccgcaaaccggacatcaactgcttcatgatgtgagcgcgggagagatgggcggggctgacactggcagggtggggtgaggccgatgggccgcgcccctcacatctccatcgcctgccccatcctctgcagcgggtgtgacaactgcaatgagtggttccatggggactgcatccggatcactgagaagatggccaaggccatccgggagtggtactgtcgggagtgcagaggtgagggccatggatggacagggaaggcaggtggggcttcaagggaggaggaggagccacaagggggggttatggggattagtgatacacgtctgtggtgagctggaatggggctccattgtgagtaatagaagatcccacgggaagaggcagctctgccctggacaggggtgcagagtaggtgggtgggtcagtaagggagcgaagaggaagaaagaggttttgggaccattcaagccatccagtgctcactcactttggccctactctctgccccacagagaaagaccccaagctagagattcgctatcggcacaagaagtcacgggagcgggatggcaatgagcgggacagcagtgagccccgggatgagggtggagggcgcaagaggcctgtccctgatccagacctgcagcgccgggcagggtcagggacaggggttggggccatgcttgctcggggctctgcttcgccccacaaatcctctccgcagcccttggtggccacacccagccaggtgagtggctgcataaagtgaatggatgtgtaaagtggttccgtttcagccctgcctgggtccatgatttctgttc

SEQ ID NO: 89745 - DNA, 1037 bp, Homo sapiens
ccggaaagagtggtggcaggtgaagtcggagacgacagaggaactggtttcctccgccccgcaaggcacacagcctgccgacgccccattaatacatgtggaaggggaaagagactgaatggaggaatgaatacaacttgatccaggtcgtgcttcggaagcggtcactttacctgtgaacctctctgcctgacaaacgggcaatgtacggaatcaaccaccaagatggcggcgcccgtgaagaatccgcaattaggtcgccgtcatatgtcgcctaggaacgtacggaattcgacccacgtacggaatcggattccaagatgacggcatctatgaggaagtcacgcagtaggtgcagccatgttgcctgtacgtcgaggccgtacaagcagccgccgtacggactctactgacaaggtggcggcgccctcgggaaagccacattagagcgcggccatgttcccggcgaacatatggattcggccaccatacggatacgataagcaagatggcggcgcctgaggggtcttgggggctctaggccggccacctactggtttgcagcggagacgacgcatggggcctgcgcaataggagtacgctgcctgggaggcgtgactagaagcggaagtagttgtgggcgcctttgcaaccgcctgggacgccgccgagtggtctgtgcaggttcgcgggtcgctggcgggggtcgtgagggagtgcgccgggagcggagatatggtaagtagcgggtccagggaggggttcggcggtggaggtcggtcggttggcaacagtggggtctgtcggccgactcaggggtctgtggtgagccataaccggagtctgtggactgaacggcgggagtctatgggcagaatgatgaaccatctgggagttctatggtgagccacggtggggggctccttaatagaagtttagtggggactccgtgtggcagttccgtgggaaaccatgatcgggggttcttagggcagagggataagcgggttgtaaggagtcacattgagtggtctgta

SEQ ID NO: 89746 - DNA, 1013 bp, Homo sapiens
aattgcaatgtgattatagtgattgttccctgaaaaaaatccagtagagaaaaatattaccaccatccaaaaacagctctagaaaccaattttttattgctggattcattgctttttcacttcattctgcattttcggtactccagtcaatgtggtttttttttttttttttttttgagacgagcctttctctgtcgcccaggctggagtgcagtggcgcgatctcagctcactgcagcctcctcctcccaggttcaagcagttctcccccctcagcctcctgagtagctgggactataggcgcgtgccaccacgcccggctaaatttttgtatttttagtagagatggggtttcacagtgttagtggggatggtctcgatctcctgacctcatgatccacccgccttagcctcccaaggtgctgggattacaggcatgagccaccgcgtccagccacagtcactgtgattatggttcactgttttccctgctctttagaatatcttaaaacacacatggggaggacagagacttatttgtgagcacttttaaattttaggaactctgtgaatctcttgaagaagattacaaagacatagaacatcttaaagaaaacgttccttcccatttgcctcaagtaacagtaacccagagctggtaagtgtatttataattattcttgctatctggatttataaacccatgaaaacaagttcttcaaagccttttgttctttcatatacttgcagttttgtcagcgatgatctagttttttgtcacctatactaaaaacagtatttccatgttcaccagttttcttatcttggtgtctctgaggaaaatctaacacttctttcccagtttgccaagggcaagtctctctagcctctcttttttcactcatttctttccctgagagcagtttgtcaactgacgtttgttccttgacattttaggcaggttaattttttgttatgagaataggacattgagtagtgttcttgatctctgc

SEQ ID NO: 89747 - DNA, 1049 bp, Homo sapiens
gcagattgaatccaggggtgacccatgatcattgctggcaactaaaatgactccgcaatacacagggactgacatgagcaaccatcaggataaattagaataaatagaagtctaagataactgatgtttccagattcagagttagggacgtcaggaagacaagctgttaaggggttagaacaatgagatcacatggacacaggaaggggaatatcacactctggggactgtggtggggtcgggggaggggggagggatagcattgggagatatacctaatgctagatgacacgttagtgggtgcagcgcaccagcatggcacatgtatacatatgtaactaacctgcacaatgtgcacatgtaccctaaaacttagagtataataaaaaaaaaaaaattaaaaaaaaaaaaaaaaaaaggaaaaaaaaaaaaaagagaagctattaagccgtaaagctgttaacttactgactttgaggagctggtgggacaactgatgaagatatcatgttacacgtaaataaatgtagctatattactgaagatttgggaacttaatttttcaacatttccttcaccgtttaatgttcatgaacaatagacatagggatagaaaaaaatgttggcaataagattataacaggatgagttacgtatttaatattattttcagttgggaaaactgtcagtatgctgcttatttctgaaaattgcctgtatgtatgtacatctgtattctgtagtgttaagggatcagatcttgatcctgaagaaccaatcaaagttgaagaacctgaacccgtaaagaagcctcccaaagagcaaagaagtattaaggaaatgccatttataacttgtgatgagttcaatggtgttccttcgtaagtatttaagataaataatgttcaaccccttaataaacataaatgatcgtttaaataataaagcttaattatattaattgtaatatgctatgttcaaatattgatcttttaaaaaagtttcacattatactatgaaaatgcagtaaattttttgaagatttttgt

SEQ ID NO: 89748 - DNA, 1023 bp, Homo sapiens
gataatagctagtcctgttgatatagctacttactgtatggcagagagtgtgccaagagcttcaatccttacaacacccgtatcacttactgttattactcccaatttgtagactaggcaaagagagcttaacttacttgtccaaggtcatccagttaaatgataacactgttacgggttttattcttataaccactatgtcacattgcctcttgaaaagtgaattgttcaagcgataccaacagatagctagtgacctaataaatatcatgcatgcaacttctgttgatagaataattattattttagcaagaatactagttcttggttttattggatactaacagtaaaaacgactaataccattcatattcacaacttaatgtattaaagactcttttgcaagttggccttataaaaattagcactaatatctttatttttaggtcgttattttatagtggaagctgacataaaggagttcacaactttgaaagctgacaagaagtttcacgtgttactgaatattttacgacactgccggaggctatcagaggtccgagggggaggacttactcgttatgttataacctgagtcccttgtgaacttttgaacataccaacagggtatagagtatagaggctatttctataattttcttatatataatttttttaacttttaatcttttttgtttccttttttttttttttgagacaggatcttgctttgtcacccaggggcttgctttgtcacgcaggctagagtgcagtggcgcaaacatggctcactgcagcctcaacctcccaggctcaagtgatcctcccacctcagccccctgaatggctgggactacaagcgtgcgccaccatgcctggctaatttttgtattttttggagagatggggtttcaccatgttgcctaggctggtcttgagctcctgagctcaaacaatccaccctcctcagcctcccaaagtgctgggattacaggcttgagccaccacacctgacctattctt

SEQ ID NO: 89749 - DNA, 1950 bp, Homo sapiens
gtgttgagtgaacaatgctgcagaccctaataagattgggtacagatcggcatgcgcctgtagtcccagctactcaggagaattgcttgaacctaggaggtggaggttgcagtgagccgagatcgtgccactgcactccagtctgggcaacagagcgagactccatctcagaaaaaaagaaaaaaagactgggtacagatgtgatattggaagaaaaagatcaagctgatgaggttaggatacccaggccctttggacttaaagatcactagtgtctaaattccatcgatggcatttcagtctataggtaaacttcctggaagctggatttggagacagtttatcatctgattattgggctttcgtataggtccttagggagcagcttacctgaaatgcatttagtgtacaccagtctgtaaacttcaacctgtaatgaaagtgtaataaatgtacattgagttgatgtgataatgtgatataataagaaatatatatttgatcttcctatctagttccttgttcagagctcctaaaacccttgtaatttccaaagtgatggagtacatcttttgttctagtatttggtctttgaccccagttcctgacacaaagctcctaaattcctttaaatttcccagtgataggagaattttttgttctaatgaggtcactcttgatgggcacctggataactcaggatgggggctgctcacaaagaccacatcatgattggaagtttcaaactttcagtctcccacctccagagaggggagaggggctggagatttgtgtcaataatccatcaggcctatgtcaacaagacataatccgttaactatggagttcagggagcttcagggttggcaaacattttgatgtgccaggaaggtgacgcactccagctttatgaagtcagcaagtcctgtgctcaggatgcttctggaccttgccccaggtaccccttcatgtggctgttgttcatctgtatcctttgtagtagccttaaaataaactgttaaacacaagtaaagcatttccctgagttctgtattgccgtatcaaattatcaaacctgaggagggggttgtgggaacccccatgtgtagccatgttggacagaagtatgggcaacctggggacctgctagttgtgactggtgtttgaagttggggatggttttatgggactgagcccttaaatctgtggggtctgcatcaactctaggtatttagtgtcagaattcaattaaatataggatactctgttggtgtctagagaattggaaaattggttgggatggggaaaaaaactccacacatttggtgtcagaaatattatgtgaatgtagtatagaagaaaacaggcttttcccttgttggtgaaaaacatgataaaataatgtgtgggtaggttgataatagtcaagaaaaatgggtaatgggattgtaagaacttagccatgtttctctcaggcacctggggagactggtctgtctatgtctgtgccatctgcttggcaggcttgtccctgtagcagagaaaaaatgtgtctcaccaagcctgtggcctggttaacaccatcactgtgatgaacacacagacgctgcatatttactgttatccttttgttttccttaatttaaatacaggcatgtttaatttttcatgcctcaacttaagtgaaaataatggcattattctttattttaagtattgtttgatttttgatatggtttggctgtgcccctacccaaatctcaccttgaattgtaataatccctatgtgtcaagggcagggccaggtggagataattgaatcacgggggtggttttccccatgctgttctcatggtgtaattaatgagtctcacgcgatctgatagttttataaatgggacttcccctgcacaagctctcttgcctgctgccatgtaagacatgacttgg

SEQ ID NO: 89750 - DNA, 1051 bp, Homo sapiens
tccgggagggagggggcgccgagaaggcgggaagcggggatctgcctgagcccggtcgccgccccgccagccccgcgcggctgcagccgccgggggcccggtgggagggtgggtggggagaaggagccggcggggaccggtgggctctggaaccggggagacccgcgcgcgcgggaaggggcactgggccgagggtcgagggggcgcggagcccaagtgcaccggtccccagccggcctgggattccgagcgggccgcctgggctgtgaatctgtgctcattggcatgaccggaataaaactaacaaaagagaaccaacactttgggatccagaggaaagggacagaagaagccactggaccctaacactggtaataactggtgcttctgtggtgccttcagcgagcccagagctgtgggcaccgatgagggtcgtcactgaacgcggtgcgtcccgttggaatggttgaggcgctgcttttctaggcatagaaaagtctgataacctaaatattgcataatgaggtcactggtggctttagctgcccatgagccttctcctctcccaactcccaaagccttccgagtgagacctgcgttttggcactttcatagggtctgctgtgtactgcagttattcccgcttcgtcccccacctctacccccagaccctaatacaattccagacgcttaataattgttgcaagaattcgctgtcgaattttagcgtgggcaaaacataaaaatgaaggattgtgggatcatattggaaaatgcactaagggtttgcacagtgatggtggtatgaagggtaatgagtgttggctgccattagtacatagttgcgctgcgactcctatgtgtgcaggtagtaggtttaggatgatatgctaagttagagactgcagttatcaggaccttcattaacctcagagaatagttagggataaggaaggagtgtgtaacaagcgagtgtgtgtatatctgtggtaagacattccaatgtgtcttccccaaagagaacattttaacattttgcttccttgatttt

SEQ ID NO: 89751 - DNA, 1048 bp, Homo sapiens
atacagcgtcctctcccctcgccacccgacagaggcgcctacactggcggtaggtagcccctgggagagggggagtggggggaccccgccgctttcgccgctgggcgacccagagccccagcctgccggagagggcagcggctcgggtttgacatcccagctgggtcccgggccggctccctgagcctcctcccgggttgctctctatcaggaaagcaatcggaagtcaggccggcttttgcttttgttctgccagctactctacggaatcgtaggtgaagccggggtgggcggatgccccgggagggggctgtggcgggagttccaggtgcgtccccgaaatgaccattggaggcggcggctgtttcccgcccctgggtggggaatggattccgatcgctaatcgataccctggagccagcagtgggtcagcagcgtcccgacagagcgcagcggccgcgtactgtcacgcgcctctccagcactctcgaaagcactacctcgagacgtgcatttccattcatggatctgtgcctgggggttgattaatgtcacccctgcctgggttgaggagtgtccacaactgctcagtagccatttactgggaggttactgtgtgcaaggcagctatcttaaataaccttaatgtaaaatatacttattgagcacctactatgtgaaaagcaggtatactgcagacttttcaattgaatggatatgtattgagcacctaccccgtgcgaaggtgaagcgtcatgacgttctcaatgtaacagatatttattgagtacctactatgttcaagatagctatgctatgaccttattgtaatatgtatttactgagcacctactaaatactaaaggcttttttgctgaagggttgcccagtgtacttttggggtacggatagaaacaagggagagaaaatataatatcttctgaacctcgagtcttcaactcctttagtgacctgcgttttaacctttccaaaccgcttgtgtggtgtatgaagggctagtcttctacacttgagggtacacttctat

SEQ ID NO: 89752 - DNA, 1536 bp, Homo sapiens
acagacaaaaagacacctcccttttaatgctactgtcataccgtgcttaaacagctattgtgggaatactcagtgctttaaactaaataacaaagcaaccttggatcatctgatccagaagttctagacaactgacctaactcctagaattctgcttttgagcagtgagggattaattgtaatttttcttcatgtcagaaattaattgcatgtatttttcaattactaaaaaaaagcaaacaaatagaaattagtgatttgtattaatccagaacctaatctgctttaactcaattactccagatgcgtgaatctcctgttgggttggttgcaagttgactcaaattcgttgtttcacttttgctgcaggttaaaagtctgcctcttacaaaccctggctatatcaccctcttgtttctaactaaacaagattttctcaaataaacttcattctgcattttggccaataaaaaaaaaaaaaaaaaagacacctcctaaacaaggaaggaaccaataggggaagggagagggaagcatgaagacagggccagctgaaccttccagcccctcactccaaactgataccagtgatgttggggtgagagagtctaagtcccatcattgcccatggctggggccctaggactggaattaaatagttttcctgctaagagatttgatgaatctgttactctgataatcttaggatcttgagatgcactggaatatccagattggcgagaaaatcatatccattagcaaatatttgagtatttacaatgcaatataggcatttatcagggaaatgtagtctaagacgtagtctttgtcttaaagaactctggttcatgagataaacatgtaaaatgacaacttgggcagcatatatgaaaagccaggagcaaattcctcctggaatttgacataaaaaatattctcaccacatggaactgtggtttttctcttatcagacattgagaactctctacgtgccttgtatgtttatctttttgccttggcctctagaaattcctggtaatggctttatcccagcttcttggtacaatgatttttttctccctaaattatttctgagacctctcttttaaattctttataaaaaactatattacaggatttttgttgtgaacttgaaagcctctctgaaatcttttctgtaagtaagcccgttatgaaagatacatagaaaatatggtaagtattagatgaatgtgctcataagaaaagggggaaaaactatccggaatttacagagaaaacaaacgggctttgcaagatgaaataggattcagatgggcaaagacaactaacaaagactttcctcccaaattgagggaaatagcgttggcaaaggtgtcaaggaaaacaaaccgaatttagagtactttaggtatttgatagatcttcctctggaatagtttccattcactcaacacacgagtgctgctggaacattttactgtgtcaaggactaggctaggtgtcaggtggggggcatcacccagaaccaattga

SEQ ID NO: 89753 - DNA, 1081 bp, Homo sapiens
tgcttatgtaatttgatggaccctctttaaggaaacgacaaaacgataaggggagcacattgctaggacccctcccaggccttggaagggtcctgtgaggacaagtgatgggctctgaatttaagtttcattagcttcttgggaaagcagtctttgggaaagcagtctttgggaaaggttttgaggaatgactggacagctgtgtttgcaagaataggaagctagtcctacctgtgactgataggagctaagagaatgttctcaaagtattgacttaaattgagagcacagatcaaaatggaattgttaaacctagggtgacctatacttctgttaacatctgccctcaaaagtaagaacttctgtatcgtcagcagccccaggtccacatgagcagcatcataggtgaaatgaggggcagggatcgttccggtttagcaggaggctctgtgttccactagtgggtagtagtaacttactgcaccttgtaaacgaggttggtcagtgctgaagttactgcctcgggaaatgaatgaaactctttttcaggtcactctaatggtatttgaagagtttataacaggagtacgttgattcaaacttttcttttggaatacctgagcctgggatgagatgtccttgcattaaaacaggccaggcaggaaacacttgccccctcattttggggagcaagtaatttaagtacagttgtgtgctacataatgacatttcagtcaatgaagggctgcatgtgggactgtgaaactgtaagattataatactgtatttttcctgtaccttttccatgtttagacatatttaggtgtacagatactgaccactgtgatacagttgcctacagtgttcagtacagtaagcatgctgtacagagttgtagtctaggagcaataggccataccatatagcctaggtatgtaggctattccatctaggtttgtgtaagtatgctctatgatgttcccataaccaggaaattgactaatgatgcatttcttagatggatccccatcattaagtgatgtatgactgtatgactttaagaacttaaaataataaggct

SEQ ID NO: 89754 - DNA, 3639 bp, Homo sapiens
agagttcaaaagagaattttaattaacttcttaaggttttctggggtatcagcaatagtgggtcaattttggggcttcagattttctagatcacccagatgacatgaagccagactagtttactttttgttctgtcttacttctagggtctatcagagggtgtccaagggagacaatacagtcgtgggttcttagtttccatttctggttgggccagtaaagccccttcctcatccttgttttccgcttatcactaaagatagaaactaaaaaccatggcttcaggctgctaaaagcctaaaacaaaacagaacaacaataacaacaaaataaggtgggttagacaagcttggagctctttggggtcctactctaaatgtaaagcggtttaccaggcctcagggaggccctggcctcttgattccatgaggccgtcaatacgctgctcagcttcctagcttcctattttggattgacaggcccagcccctccaactgggtaaaagcagcccctagtactgaggcctacatgtctagatctctttcttttctcacatcttaaacctgaaattcctccctatcttgttagctttttggtgcttttaggaaggtttgttgtttgtttgttgttaacctcatccagctttctttgttgtgttcactgggaaagttggctcaaattacccagttcactgctggcaggaggtgggacccagtcagatcatcttagagactgacaggagagaaacacaagtgaccagctgctctttgcctgactgtgactagagaactttatctgctcccaacacaacaccctggttgcagctggaaagcagaagttgggatggatatatttcaactaactggacatagccacatgtagatatatttccctgcatagatgaaactaattcctcaggctgttcctaataaggcaggtgatgtggctgagaaggcagtcacaggagtgctacctggagccccatctcgaacctgcttcttctcacctacactgtcctgcaaaagatgggaatgtaggaccaagggaagtgttgaggcaggaagatgttttctctttcagcagcttttaagaagtaaaaactgtaggctgtattttagctgggtaagtttccttccattcaaactggaccccaaaatgttcatgtttaaggcagaacttctcttccatggcccagacaattccttgcagaggctgaaccatcagatccaggctcaggagtcaagacagcctttccagatgactctgcttgatgctaaggtttggagctttatgatagtttttggcttttagaatgcttttctgcatgctcaaccacgtgttcttggaatcagcagccacatctattttccccttactttcctccaactcttcccccaactttcaagaagccagagaagtttacaaaaagcaaagtgtatttcctgagtttgaaaaggctggacaaagggagcctgagtggtgggaacttctcatcctccaccttaccagagcctccattggtttttggggtgtgggagtggggtggtggcggcttttatttttatttttgagtacctttttccctggaaattttagagctgagctatcctctcagaaaatcactgtctgcccagggaaccatagcctcctccctcacccttcaggtgtgtaatcattgggtaaagagaagggaggtgtgggtgtgcccctctagaaagggccctgtcttagggggaggtatcccactgactttctggagaccaccgtataccatggagccttttatgtattccacaataatttaccctgcggatttttaatttcacagtacttcacacataggaaggactatagaaaaattagtccaccatattgctagaaatagaaatcctccaattcgatttcagtaactgtccataaaagaacaaatctgtaaccccactcccaggtaattctagattgtgaccgagcctttggaagaaatgaaaaatgaattaattaattttgaagaggcaaattttctgttctcctagaagatgtgcccttccatgattatttttggaggcagaatggccagaaagccctaccagccataagaatttatgaaccatgacatttgaaaactttcagcctgagatgaagtaaattaattcctccagcatgattcactttaggtacaagcccaaatttcttttatcagtaacttgggctcttaaggtgatttttctaaagagatatagttatttgagacccatcagggccattttctgtatttcttttgtcaaattttccatttatgtggatttgagttttttccagttatttcgagaccatcttgtctgctaataagagataatatgctgccttttcaataacatatgtgaaagccacagggagttcagacaaagttagctgagcaaattcctgtacttatcagagaccatgacatcaccttcagtatgcggtgggctttttaccaagtgtccagcacctttaaagaactcagaatggtaaagtattatagctcattcaatagaaaaaaggaacagagaagttcagaaatctgaaatgattttatttgtaagaggagaataaggaagatgattactgtaaatcacataggaagaggaggtgagaaatatgtaacaatggtgtaactatggtggattgcttttagctttccagatcagaggtgagaaaatgaaaaatttcttatgaattattatgaagtttcaatacttgcagtgtaggactcgaagagggctttaacgacccagccatctgctgtgtaataaagccagtgaaatatgctccatcaaaatgacacagagaagaacgttagggtacacagagtaggagcgagagttttttacactatgaatgagaatatatctagtaagtagttctgggtatgttgtggcctgaataactgtccatttttttatactttactattttcttgagctgaatggagactaaggacaaaagaaagaagactcaggtcattatgaagtttgttgggtctctgcatgattccaaagtgataatgctctcagttgaagtacttagttaaaagctcaaagtcttgtttccatatgtctatacctgctgtcatttttcaaaagttattcagtgaatttgttaatactgaaacccctcctttcttatcagcagtctttcttctgagattctcataagattctcaatcttatgaaatgcatttctgaactagaggcagtaaaaaaaagtccgttgtcttttctttccagtttattcagaagcaaatctccagaatcaaaaatctatccaccatttacctgctgaattttctcccttcgttaaccaacaaacaacagtgttttgctctacaatttgagttcaggatttggcttctatattaagtaaccttctagttttctcttccacctctgctattgataagaaataataatcacattattatttaattatcaccaccaaaagcaacgtcagatttcagtaatctaaaactatattgccttaaacttagattatttgaaataagatctttcctctccagtaatggatacctagaaaagcaggtgtatagctgtctatacaggggacacactcaggagcatgtacagttatgattatggg

SEQ ID NO: 89755 - DNA, 1037 bp, Homo sapiens
tgtatgcatctcccatacccagccctgtacacagaaaaattgtcttccatgaaattggtacctgatgccaaaagggttggggaccactgctctagactaatttctcattagaaattctggtttttgttaatcatcagaccaaaatctataggaacatatggtcaatataggtcacatatatcctccatggttttgtgtaacttatattctgcagcattttttcaagtcctcttataccaatgtcttctttgagcctcctagtggtgctgtctggtattttgagccagtattatatgatttccattttacagaggggaaaactgaagctacgggaagatgtgtggcttgtcttagatgatatagttactacctgcttccctagtattccaggactagaagccacttctgattccacatcggcgttcttttatccctggtaaaaagaattttgctctttattctagacattctttttttaaatactccaagctgcctcctctctggttttgtgccattgcatctatttcattctgtcttgaatcatagttagatgattgttttcctcattaatttcagcaatataggctgtctctctttttgtagccttactgtgtctagtacattatggcacatatattcattccttagtcttttcttttatggaattggatttaaggtattttctcccaaataattatacatttctaggaaaacaaaaggaataaatgaagccctttctacaagactaatgtcattgttcacaagagaattagaatcacatgttgtttgagttggaagaaaatcatcgagagtatttattctcttgttttacaaatgaggaacctgaagatcaaataacttctgaagatcccacagggaattagaggtgacatggtatacagagcccagttctcctcacttctagccgagccctccttttgctgcaacagttattacagagattgaccatcaagttttagatgaatggtcaatgctggcaaaaatcaggtcatgctaaattaaaactacaaatgtga

SEQ ID NO: 89756 - DNA, 1081 bp, Homo sapiens
caggattttaaatactgtgtgtgcttttggagtggcaccaggcagcaactattatgcttccccctacatgaatattgtttttcaaggaaaatgaagtttaaatgaatgtcaagggcaactttgaagcagatgagttacaaaaatgcaaccacttgagaggtatgtgtggaagtggagtgggacagtcccacctccttagtctagatgagtttggggaggaattgttctctgcctgttctgttttcttttttggtactagctgggagtcacgcttttaccttgagagcagattaaaagccctgagtcatagcccagccacctgctggcagctacatttccccacctcccaggcctattccccttcaatttgggggcttacccagggaagtctcccaggtaccctcaggatggtgccagtgctgggcattatggagtcagtagggctgtccaaaataggtgagacccactccatgcccatcacagttgcacaccaggtgtgcatgaagaaaatggagaagagggtgacagtgggctaattgttggctagggacaagtgcaaagggtgttagaaggggagtgagttctcatccattcctggcccatcttaaaagaaagcaacagtgatggattttacttgtggtactactcacttcaatttggtgatgaaaatttgatttgtggtttcctctcacagggctcttcatcacacagtaattgatacatctccaagaagctcttgaggaaatctattccaacaggtcccatcagcacccagggagcctagcagggatctcagcaggctccacctcccctgtcatcccccttcctccttcagtctgtggggtttcatcagaagcctgagtaggctggaggaggaggaggcaggggtcacaccaaagggattgaagaccagtgttggcaaacggtctgttctcagtagtaggggcatcaagcaataggtcacctttgttgaggtggctttgctgctcaaaaccaacacagtagatgtgggaatgggctgcaggattgggagccagcggctgcctcaggtgagaagggtgagaagggcaggtaagagcag

SEQ ID NO: 89757 - DNA, 2064 bp, Homo sapiens
agataaattagaatttatcaaaaccaaatatgtctcttcatgaagagctgttattaagaaaattaataggcaatccataggctagcaggaaatatttgtaatacataaaaatcaggccttaaaatgaaatatttgaagaactcctactaatcaataataaaagatgaaccactcagtgaaaaacatggcaaaagacttgaaaagacatttgatctacaattggccagtcaaggatttaacatcatttgtcataagggaaatataaatgaaaaccacaatgggatactattcacagccactagaatagctaaaatcagaaagactggcaacgccggatgttggcaaggatatggaatgactggaacacttctagagtactggtgggagtataaagtgatacaattatcttagagaactgtttggcaattcttataaggttaaacatacataccctatgacccaaccaatttactcttagttacacaagagaaatgcaaacgtgtccataaaatgactcatatgagaatgtttatagcagcttattcataataatcccaagttgaaatcaacccaaagttccgtgaaagcagaatggataaacaaactgtggtatgattttgaaaaatggaataatactcagcaatacaaaggattaaaaacccaagatatgcaaaataatctccaaaacataatagtgaatgaaaaatccaggaaaaaaacataccttccaaatgattctatttacaagaagttcaagaacaaacgaaactaatacagagtggtagaaatcagaaccgtcattgcctttggcgagggtgggtgggaattgactggaagagggcatgaggaagctttctggggtaacagacacattctatatcttgattgtggtgatggtcatatgggtagacacagtcttcaagactcattaaattgaacacttaagatctgggaaaattctacctacatgttaagagataaatggtaacatgtgaaatagaagatattatgacttattatgaacagtgactacagtagttttttattctcatgatttgaactttctgcttctattaatgtagactgaaattacgttagctgtgtttttcttttttggcagcttcatcacacgctttccatttattgtatttgtggctaatggtaactgccaagtttctcttctttttagacgtgaattactgccaagcagggctcctttatgaaatacctgcttcgtttgtctcagtgggtgtctatatgcaggccttgaaggaatgaatagaactcagataaacaaaggtgggatttctgaaaggagtaatgctgtaaataataagaacagattcccattaaatagtactcagcgctgggagcttttctagggcttcacacatgttcacccattcaattctcacaactccatggataggtgctattgtcatccgcattttctccatgggctgacttgaggtacagtgaggttaaatgacttgtccaaggttatatggccagtaaggggtgcgggtagagctggagtttgagtcctggcagctctgatgccaaaatctgtgcttcttccgcctgtgctatgttatgcctggcccctggtttgcttcttctgtttgatgtgttgactgtaattgacctgggatttgatctgtctctggttaatcctcttacaatagcatgagcctaggtcactcccctaaggaacatcatacccagagcattttatgaatccttcatgagaattctcttgtgggagaacctgtttatgaaggaacaacactgggttcattagaagagtggccctgatgagctccagacctcattacaggtccagcacagtcctctctgcagtctctcttgatgcacctaagtgcaaagaattccttaaatagcatccattggccataaggtgcatgatgctattctatgtatccaccaaaatcaacatcagtggtataatgtcagataagggaagcactgcttggtagcaattcatgtccaaaaggaagagaaacttggcaattatcattagccatagattctgtaaatgacaag

SEQ ID NO: 89758 - DNA, 1065 bp, Homo sapiens
agacaatttaccaatcttgtattgcaacagccttcatctattggaccctataataagaagccacataatgagttcttataatttgcaagagctaccattgaagacactatccattatgctatttaatatccctcacttaaagtctcatttaattaatttttctatttagtatcatggaattttttcaataaaattatacctttccctaatcaaaaatgagcattacataaccaattacatttccctttttaccttgcccgttggaaaccaggatttacttgatacttgaaaatataactgttttgactgaggatcatggtggataatgtttactcattctccccctgctcctccttcacccctgaggattcagatatctgtttctgactttaagttttaaatgtataacattttattgtaggtcactgaaaatccttcttggaagtagataagatgtcaattataatttataacttcactaggccatgtgatagcaagtcagtgagtagagtggagttaacattccgagcttctgcttccctcatcctggttgagagttcttgttgtttatcatctgagagtgtcatccctcagtgtgggataccttgaagatacagatccacttccttttttttacaatgacaactcaaggtgttatctttgttctaaactcacttcatgcagggaccaatgatccaaaagagagattttgggggccatcagatttgatgaaattagtcacagcagcagatgctttttatcaagcacttgcttgccagacattatactgcccattttgcatgctgtattatgtttacccctccagcctgtgagatatgtcttcttttttttattttattttattattatttttgtttagtatttattgatcattcttgggtgtttctcacagagggggatttggcagggtcataggacaatagtggagggaaggtcagcagataaacaagtgaacaagggtatctgggtttcctgggcaggggaccctgtggccttccgcagtgtttgtgtccctgggtacttgagattagggagtggtgatga

SEQ ID NO: 89759 - DNA, 1027 bp, Homo sapiens
gtctgcgtggtgactcctgacactggctccgaggtagggttcccgggcagtaggggctggggagggggaaggcctgcttcccattgtagccctccccagatgctgagttgcagctagttcagctaattggcaagaaaaggagaagcaaaaatagtgaaaatctgcgaattaataaaacagccttgaagcaaccgccaaaatgtgtacaaatcatgaagtaattagaagtgtgaagaattctatcgggttcgctgtttccaaatccaacatctgatcgctttaggaggccaagggctggcaggccacagggagtagaaattctttccattgccgtctgatctcgcctccctggggcctgggttcccttgaaatccttgcagggtcctggaagtttccatgggacttgctagaatcaaatgttggccttttgggggcccgttaagcacacgcaacgccttatccaagtagcatgtaatattttagaataatgctgttaagatttcgcaaagtgttttttggatccatgttcttatttaatctctcactatcaccaaatatttttatgtcagtgtttttcagaggagggaagcaaggcccagagagtgaagtggtgtcaactcaattttaagagcccatcaggagcagaactagggctagagccaggatcttctgatagcccctccgacctctcctctcccacccacattcctcctgtgggctctgctgcatcactcaatggtgccaggcatttgtctatcacaattgtctcagctaacagccaactactgttctctctggccatggtttattacatttaggtaagttgttcaacccatttgtttgattaataaaataagacccaggcacatttagtgatttgtcgatttttcattttattttatatccagattagactggggagaaaagtatttcttttctttgtccttctggaaacacattatagaaagagatttcagggctgaagccttgtggtatacctaatgcggaagggtagaagcaatatgtg

SEQ ID NO: 89760 - DNA, 1035 bp, Homo sapiens
cttgatctcctaggtatgggccctactgtggttagaggcttccaaatggggccccagagtgtcaaacctaccaagtatttcatgccgttgaggggaaaaggtggcatttcaggtggccttgggttaggtcccctggggcggcggcctcctctttgctggcaaaagccacgtatttctctccaaatttcacgtggctgggagttaccgtgggcattctgtggattgcagactctgtgtttcttctcttcagtgaggggaggccaattttctttttgttgctgtttgatttccaaataattagatttgcaaagttcttttgtgttatgtcagaatctgtcattccagtgcccgtctcaaatgtcaagacgctgctcctgatctttcccttccaaatgagtcatccagcatcccctctgcctgtagtatttccctcaaccttgtctcttgcattctttcatgttctgtcatgttctgtgtctcgttatggaattttgtgagttatattatacacctctggactttaatcattccttaaggacagagactgagtctggtttaatttttttttttttttttttttgagacagagtctcactctgacatccaggctggagtgcagtgatgcaatctcggctcattgcaacctcagcctcccaggttcaagcaattctcctgcctcaggctcctgagtagctgagaatataggcatgtaccaccatacccagctaattttcatatttttagtagagacagggttttaccatgttggccaggctggtctcaaactcctgacctcaggtgatccacctgccttggcctctcaaagtgctgggattacaggtgtgagcaactgcgcctggcctgattttttttatatataccgctgtgctaaaaacacaatgctataaaaacacaatgctattttgtttttgttttaattgtctcttggactgatggagtaatttactaaaagccttaacaaaggttaaggctgtagtctggattcctggacaataaggaaatgggtgtgccgag

SEQ ID NO: 89761 - DNA, 1042 bp, Homo sapiens
agggagctcttcacctggaggctgaccagttctctccctctctcaccatgtgtactgtgatccagtggcctcccacgggccctgaccatcaagactaagagggttgtgggtgtgtggaatgcgctatgggcctgcagggcattccttgttcctaggagatcaatgcgctccctggtatttctcctgctagaacaaggagccaagtgcaaaagcaagtgtacaaccacgtttcctctccagcactcatgtccctaccatgtgatctctgtggcatgtgggtctgactctcagggtttcataatctttccatgaaggaggcacccacagaggagggcagcggacacatggcggcagtcaggaagttagaaccgagggaatggtgtcaccataatggacttggttagccagttggcaattcattgtagattcattccttgataccccacaccacaggctggatgtctttgtgtgtcctggaagaggagatagaaataatttagcctgatgctcccgccagtctccattcccaactctcacagaaaagaaactcaaaacacatgtgcagtggtttcacctcttcccgtgtgaaggccaccctactattggaggtgtgttgagacttgcccaaggcaggagaaggggtcacactaccagcccctacagcccacttaattcgcgatgggtgctgttcactttggtataattgggttgtggtcatgactgtacttatttctggaagcacatctgtattgccagcccgattgttcttctctcatgagtaagtgggcagtgttgttattcccacctcacagagatgagacttcttgctggagtgctcacaggcagcggcaggaccagaatccaggcctcctggctccctggctttcctggactctgacagccccgtatggtccagggattgttgacctgacctgtcaaaatagatttcttcaccagaaaacagggagatgcaatcgctgggagagggatcacttttttctgctttaggaatgatttcttgttgcctctgagcaaaacccct

SEQ ID NO: 89762 - DNA, 1110 bp, Homo sapiens
aaaaaaaataatgatatgcaattgcctctttttgctatgcccttgggagtcagaccaggcttgtggggagaaagagaagcttcagtgtagttgccattacatgacttgggcagcaggagtcaaggagggagagaatggagagctgtggaggctctttgattcccctgagttaggtatccaggccaacttcgctagcacaggccatagaatctggttcactgggtgctcccagcactgtctcttagtggctgggcatcctcaaacagagtgaatggtattcatttatccattcatcagatggatattgaccctatgtatgctgaaagcactaagctggtgctctccaagccttggtatcctcacctgtaaagttagaactggaatcagaatcgatgtttctcagtggaagtgctgttggcattcaggggtggaggggtggatgtcagtggatgtgctctgggcatttgggcatggaggtgggaatgctcggtagaatggttagcaaatccggccctacccattaaataccagtaatgactcccagtcaaataaggtgaggagggcagtaccatctccagataaggaccacgggccttgttttcttagatttcttcccaatctgaaattctgtaagtctatggttgttttgttcctggacccagtaaaaacatgcagaacagaattaccgaagatctgacaaattatcagaatcttgagtacatcttattcaaatgtaagggaatgtttaactaaacagcaacaataggtaacatctgttaagcaattactatgttctagacccttggcaaatttccttcattagaagtctttacaggcgatctgattgtttactatttcagatcatctgtgtcccctaatttgcccccttaatttcagagcattgagttgactatcgtttttgcttcatttatctttgcagagttgtgcgaagttcagatagcaaagtgtctctataggaggccctgcgatatgagaataaagcagcagtctgccaagttcatgcctttgtgttggatacagtcttctttctttgtgtgtctgtggtctttatgaacttagaaaacctgccagtctcttagacgctatgat

SEQ ID NO: 89763 - DNA, 1071 bp, Homo sapiens
agcgctgatgtgtgtgtttggagagcataaaacaaattaattttccgaaggtcagaagggataattctccaccgtaatttgcacatgttaaacttgggggagcaggcactgacataagaggcacagcatctgatggtcttatcaaatcaatccatcttctgtctcttccaggggagtgctacgcacagcaggagggtggctgggcagtgcaaagccccggaatcccctgagcaagcagtgtttcagctggctggacagatcaaataacacttgggctggttaacaaaagacgcaagtgggaaggtgttggaagccggagtgtggaaatttacccaacgttatttctttgacagggaaggagacttggtctgaaagatgccacattcctgcagcctctcttggtgcagtggaatacagtcttgggcgaggtggcgtggatgagctggtgaaagaggatgctgcccacatccaaaggctccagaggatcctggcctggcagctgagctcccctgcatttggaacctcaggcgtaacttggtgtagagctcatgaaaggtgcttgtgtttctccagcttttttcaccagtgcttaccagactggctcaggttttggaatctaaggtgagctggtagaaacaggagaggtagaaagaagcccctggatgcctccagaattcattgatgggatccctgcatactgcttggaacacagaaagaggctgtgacacagctgagctttggagcatcttaaggagctcagctcagcaaacaactcttgcatttcagccagaaagagcctcttgtaacaaagtattcaaaggggagagtttctgcatcttttactttgcagtccactatggtagaaaacttgacattccatagataatgatactgggttttctttccaagatgccagctttaaaagaaatatgagccattctaagctttaagaagggttcaggaaacacaggaattagtagacagccctcccaatgcaggttaagacgacagcctgcgcccccaactagcacagctcagcgagcatgaccatatgccattctcgtctccaga

SEQ ID NO: 89764 - DNA, 1028 bp, Homo sapiens
gcccgcagcatgaagcacgcgctccgagagatcaagatcattcggcgcctggaccacgacaacatcgtcaaagtgtacgaggtgctcggtcccaagggcactgacctgcagggtgagctgttcaagttcagcgtggcgtacatcgtccaggagtacatggagaccgacctggcacgcctgctggagcagggcacgctggcagaagagcatgccaagctgttcatgtaccagctgctccgcgggctcaagtacatccactccgccaacgtgctgcacagggacctgaagcccgccaacatcttcatcagcacagaggacctcgtgctcaagattggggatttcgggttggcaaggatcgttgatcagcattactcccacaaggtatgtctggctggaatggcggatactggtggtccacagaatccccaagaatacttgcagcattcccaagctattcctagctccatggtagtcagaggactagagttagtaattaggggaggctggagggtgctaggaagatcactagcctgaaaagttgttggaggcgtggagggagatctggttcttggtcttggctctgctatgtggctttgatcaccctgagctgtgcctgcagaagctggactagacgatctccaaaatttcttccagctctaaattctatggcttgaaaactatgtggttggtgaatttgcctctagcatcttcttatccctgctgtccacttagccatcccatgtccttcctgtgtgctcaggacacaccctgaggcttcccaccctgtgagcctcatgctctggttggtctcacctccctcatcccatccaagctgacccattcggtgtccatttctctcagtcagtggacagcaggcacaaattgttgatctgatgagctaatccttcactgtaccttatccagctaatgactctgttctcctgggtcccgtgatgctcttgcttctcagtgtgatgtgaaagccatgggtggcagacggtactattgcgattccccgtggtgggtgc

SEQ ID NO: 89765 - DNA, 1461 bp, Homo sapiens
ttacctttccaaagcaggtgaactcaagacctctagagatgctggttctcaaatacagctacaccttggagtcacctggggagctgtaaaaaaatcactgatgcctggttcccacccccccgcctccgcccccacagattctgatgtgattggcacagcaggagtcctgaacgtcagtttttttttttttttaagttccctaggtgcttccagcctgtagcaggtctgagagcccgtgctctagagtgccaccagatttccccttgaaagccagcgtgacagatgtctatttgtggcttgacagttaatgcatcttactaaaagaagccatttgcacaaggactggcctattaaaaattaatcactttggcctagcagggcttctcacttaaagattgctgtccattgtcatgcagcaccccaggatgctaatgccccacagaggagaacttgtagcccctccagcagcaaaatcagataaggaaactgaggcagaagcagcccaaccaaatcatccctccacccacctctctacccagcccagccactggtcctggtgaggatggtggtaatggagctgccagtcctggtacatcactgaacaaacagaacatgttatcctgtctttgaactgtaataggattcagagttcttgatttggaccccatgaggataatgtccaaagcttttatcagacggtgagctctagctgaattagaagacaaccacatttcaccgaagtgctttttaaaaagaagcccaactccattgctcccactttcctgctgtttaaaagtaaggagaagtacattacgctaaatgaaataagccagatgcaaaaggacaaagcctgtatgattctgcttctgtgaggtccctagagccatcaaacccatacagatagaaaggagcatggtggttgccagaggcagggggcaagaacaatggggagtcattgtttaagggggacagactttcagttttgcaagatgaaaagagttcttggctgggtacagtggctcatgcctgtaatcccagcactttgggaggctgaggaggcaggtggatcacttgagctcaggagttcaagagcagcctcggcaaaatggcaaaaccccatctctacaaaaaatacaaaaattagcaaggcatggtggcccgcacctgtagtcccagtcactctggggggttaaagcccgaggatcgcttgcaagtcttactgggagactgcagtgagtcatgatcgtgccactgcactccagcctggtgacagagtgagcctctgtctcaaaaaaaaaaaaaaaaaaaaaaagttctggagatggatggtggcgatggttgtacagcattgtgaatatacttaatgccactgaaccgtatgcttaacagttaaaatggtgaactttatggtatgtgtattttattacaattaaattttttatggcaattttattataattt

SEQ ID NO: 89766 - DNA, 1302 bp, Homo sapiens
gggaagggaagcggtctgcggagtccgggctgagggcgagggaccggctacatcgcggcgacccaggttccagcggccgcggctctacccggcgcgcgatttccaggttcctccgccggctggtgcctgggcgccccgctctcgcccgggagcgaggccctgggcctccaaacgccagcatctctttctcgctctttctgcacccctccacaaaaggacttctgtggctggaaaccctttggcaagcctatctcctttattcagtcgggccgagttaacggcaggagttaggctgtgtgtgtggctcctccctttaaaaaaagacttgctgcgggctggagagttctgagattggaccgattccgtctattattaaatgccatctgtggaccgggattggcaggtgtttctttcacgctggcgataactatctctgcatgtggtgttacctaggtggtcctaggtttcgactttcttttttggttccagagataattctagaaaatttacgttgcttgtggtgagaagcgtgatcaaattaacacgtgctttcttacaaaacgttttatcatcttctgtctgtggatttaccttcctgatgcttgtggctatcacctctaagcaaagaggttaatagcattgctatttctgttagtgttgcagttgataacgataacaatagtagcatgtattaattgctagtgacaggcagagcgctagtttctacacggattatctcaaaataaccctttgaggttgatactgttactgcctccactttacaaaccaggaaactaaggtttaggtaggttaagtaacttgcctaagaccacagttttaacgtgacaaagcctagattcaaactcaagtggtctaacttcatagctgcatcctccacccccactcccttaaacgtgtatactccttaagcattgctcatgttgttaagctaattgcgatgttgtacccataattttgattttcaatttacaaatactctgtaaattagatgagagaaacagttgtttttaaaaacatacatataggccgttcgcggtggctcacgcatgtaattccagcacttctgggaggccgacgtgggtggatcacctgagggcagctaatttttgtaattttaatagagacgggggcttcgccgtattggccaggctggtctcgaactcctgacctcaagtgatctacccaccttgaccttccaaagtgctgggattacaggcgttagcgaccgcgcctagctcctaatatgacttttatcatgcattaataggaaatgttgggcta

SEQ ID NO: 89767 - DNA, 1179 bp, Homo sapiens
ccaccagacaggtcaaataatgacattttcctggaatagggcttagaagaatctccagccccttcttcctgccctggtggcttccaggctgctgattttcatagtaattgtgaggtgttagttttcgatttaaaactcacaaagcttgttgcttactgaaatccagccatttttcctgaataactgctccctgattgctgcatttctttggtaaatttccagaatgttgaagaagttgcttctggttatttgtccagtgttcttgttgcttttatggaggaaaagattttccaaaggccttgctccagcattttcattgacattgctttgatacgaagaatttaacccatagtcaaatgccagaaattgaaaaagattttcttatgacatagattaattttttcttaagcatcatttcttctatccccttttaatggtatttcatggtatgaatataccataggatgcttaactctttcgtagttaatgggctttttgttagcttgtaatatccaagagaactagaaacaatgctacaactaaactttttgtatatgcctttgtgtgccattaagaatgtttctctagaatggctccctggaagtcagattgcttgatgaataatatgtatataaaaaatttaagaatactttaaaactgtcttccaaaggcctaaactagtttatattcccagcagtggtttgtgagaataactattttccacaccctgaccaatactgacatcagtcttacaaagttttgaaagcctgggcaaaaataatatgtcattgatttttcaaatttgcatttaaattatattttgaagaacaatgtcattgctaccccagtaagtaataatttttaatccttttatttctcctctttagggaatggcatttactttacaagaacgacaaatgcttggtcttcaaggacttctacctcccaaaatagagacacaagatattcaagccttacgatttcatagaaacttgaagaaaatgactagccctttggaaaagtaagagttgcttagatgtttctttttttattggtattctgattagaaaacttatgagcattatggttattatggcatgagaaatacacaatcttatataagtttgtgttttgtcagttaactacttttataaagattgtgtttctttcacttcggtg

SEQ ID NO: 89768 - DNA, 1022 bp, Homo sapiens
ctttttcttttcttttctttttttttttttttgagacagggtctcactctgttgcccaggctggagtgcagtggcacaatttcagctcactgcaacctctgcctcccgggctcaagcagttctcctacctcagcctctcaagtagctgggattacaggagtgcaccaccacacccggctaatttttgtagtttttagtagagacagggtttaaccatattgcccatattgcccaggctggttttgaactcctggactcaagcaatctgcccgccttggcctcccaaagtgctgggattacaggcttgagccactgcaccaggcagcaaacttaatatatatgaccaacccagtaactcatagccctgtcttctaaaagtcatcaacagacagttatgctatgattgttattggtctctagaccacaatgtacagtacaatgagaaaaaggtacaagcagatatattctgagagcatgcagagggcatctagctcaacttggggaatcagataaaagcttcctgaagggagtgatgcctaagctgaattgtaaacaggatgttacaggtagcaggcaaagtattctgggtagagggatcggtctgcatatagaactaagcatatcaattgagtttgttaagtataggagattattggtgactggtaagagtggtttctttgatgtgatagagcaaaagagatactgtgatagattgaaaaatgaatggagggggaggaaatgtaaactacccttacaagaagttcaggtaaggagggaaggaagatattaaataataagtaaagtaagacttgggattaagtatgtttcaagctggaagaaaatttaatgtttcatcgtagttaggaggaatgagcccaggagaaaggataattgttagagcaaggtctagggaaaggaaaaaggcatagggtcaaatgcggagatagagtggctggtcttgagcaagaacaaagaacagctcattctccgaagctggaataaacataaatacagatagtaag

SEQ ID NO: 89769 - DNA, 1085 bp, Homo sapiens
ttgtactgtgcaagggtggagggagctaatggatatatttgaaagctacttagcaggtagactctgtaggacttggtgatttataggattggtgttggggagggtaggagaggaataaatcaagaatggaatctgggtttcgcatttggtcacgtgatagcagaagaaacaaggtcaggggaaagataagtctgctttagacatatttaattcaagatgattactgactttcaagctttcaagctgatatttccctgttctctaaatttaaaaacaagttatttatatatttattgacatcaattgacaattgccttttttgtgctgcttctgcactctgtgtagaccttataatacttctaacgctcctgggttataaactccttgaaaatagaggtaacttcttatatccctggagaatagtgccaggcatatagtgttaagcaaatgtttgaattaatgccactttattttgcttccttgtttatatgtcagtctccttgaagactgattctttaagcgtaaggacctcatggtgatctttgcatttccagtgccttctacagagcctgacccacagttagggttcagtaaacattgtttctattgttatttcatcgtcatcatcatctactatttaagtaccctcatatttttgttaatttttagtcctgggtgttaaatagtaataatctaaggttttgggttttttttagaatgtgatgtgagaatggggctcaatttcaattttagacatttaggtttaactttcataagccaagacttttaatgtaatgcaggctgacttagacattatttactgtgcttcatttcagatatatctacataatgggaatacaagaaagaaatgagaaattgttttatagaatactgcaagatgacattgagagtttaatgccaattgtatatacaccgacggttggtcttgcctgctcccagtatggacacatctttagaagacctaagtaaggcttgtttaaaaaaaagcttgtaaatgattattgaataaggaaaatatcattccataacacccattacatttctattttatgtttgttagccaa

SEQ ID NO: 89770 - DNA, 1027 bp, Homo sapiens
ttcaggtgtctcatcttttgtgtgattttactgtaattttcttctctcccttcctgctccttcaaatttcaaattttcagtttcagtaagtcttaacaatagtttagttggccttgtactgctctcctgcattggtggcttgctttagattttttttttttttcctggtggtgtattgagtttatttgaacatgagatgtggttacatttcttcttgggtaaaatgactgtatcatttaacaataatctttgttgcatctgctatgaacagtaattacagtttgaagtacttgaaaatgtttgaaaataaaccagtgtgacttagctaaatctgcttggaaattataccatgtcttgatattttattaaaatatcaaaatatttcaattatgaacaaaaacttagaaacaaagctgttgtgaaatgcaaaggtgtttttgttctgttgcaggggattatttatttcgatctcagacagaggtcatgttagatcaattgtggataactggccagaaaatcatgttaaggtactaatagcacaaccctccttttcacaatgttttctcttttcttgtaaattacctctaaatctccaagaacagtttttcattgttgctctcatttattttgcacttatatacatgcagatttagtgctttgcagctgaagtgatgataatagtagtagttataaaatgggctactggtataaagtttgactctgagaaagaaattagagctagaatacaaggtgagccctctcggtatcagcaccactggtgtctcctgccttctcaatctccttttctatttcactaatattattctaggtaaagaaaatacattaaaatgccataaaaacttttgtttatgaatggtgttagagaagtttggttatgcctttttttcttttaaatctaagatttagaaccttagcaaatataaaaatgttaaatatagcaaatataagccctggcctatttagttatctttcataaaataaaatgtaataacttatttcaagatct

SEQ ID NO: 89771 - DNA, 2077 bp, Homo sapiens
aaaaatttggtcaaataattaaactcacagtatcatcttaagaccttccttataagtaggtattttttttgttctagacctttttctttttcacagttgctaaggttttttttgtttggcctaggttattgtgttggagtaccatgctgtttatttctaaactcttatttttctcttatggtaatctctccatcagaatcttgttcatctctgccatatttaatctttctgaagatatttaagttggtcctctagtcagaagaattctattcctaaaccgaagtcagagggaaatcaaatctagttaatgtctcataatactcagaagtcctagaattttaagtatgctttgttggtttacattggaaattagccaagaaacaattttatttttaagagcaaagagtaaatatatatgaagtgaatcaatcttttaaaaaatgcttttctttagtgccccatttttgacaacttttaatttgcatttttttgtgattaaggctgttgtagtgactgatggagagagaattctgggtcttggagatctgggtgtctatggaatgggaattccagtaggaaaactttgtttgtatacagcttgtgcaggaatacggcctgatagatgcctgccagtgtgtattgatgtgggaactgataatatcgtgagtaacatcattttccccctttatcttcctcctgtattttttaaaatgtgtacaatattccttttttgaaaatgataatttaagaagggaaagttttatgattagatttttttttcttaaactccacttttaatatttatataaataatagtaaattaagtctattaaaagtttcttggtccgggcatggtggctcatacctgtaatcccaggacattggaaggccgaggcaggcagatcaccaaaagtcaggagttcgagaccagcctggccaacatggtgaaacccagactctactaaaaatacaaaaaaaattagctgggcgtggtggcacatgcttgtaatcccagctacaaggctgaggcaagagaattgcttgaatgcaaaagacagaggttgcagtgagccgagatcacaccattgcactccagcctgggtgacaagagtgagactgtctcaaaaaagaaaaaataaagtttcttgtagggcaatacatttaaaaaattgtattagtaattttttattttgcaatttttattgtatgtgtttaaactgattatataaattattttatttttacatttggtttattttgtaggcactcttaaaagacccattttacatgggcttgtaccagaaacgagatcgcacacaacagtatgatgacctgattgatgagtttatgaaagctattactgacaggtattttttaaaagtttgagtatatgaaagcacctttaatggggtgggtggggtaagaaccaaagttttgttttgttttcctttatttctttcctgtgtagataagcaggaggcgattaaatttttgagaactttgttctgcctggctgtttctgcctgattagatgtgccgatatgaggtggtacccatggtctgccttgctttcttgagttacctgacattttgagggaagtctgccctcactgcttccatcaaacgcttactgctcagtacctttttcagccttgaccttcaggctcacgcccaccattccactgaagctcttgtgcagcttttgtattttaagttctctgaccattgggtcctcccacttctctacctctttgcaccgtcaactcaggttttcccacttctatgtccttgaaactctctcttctcttgactgctaaacagcttcctcctaacttggtctttctcccacctttctctttttttttttttttgtcatcttcacaggttcttgctgtctcttactaaatgtggataactacctagtcctcttctctttcagccatgtcaactatgacctttatgcatgttactactaaacccataaaaacccatctgtagttccactgctcttgtgaggcctgcatttctaataatcagaatcttccatctgggtattctgttatgagtgcatattcat

SEQ ID NO: 89772 - DNA, 1138 bp, Homo sapiens
gaatggccagaatctgcatcaagccctcctgtgataacagaatagaagcactcccctgataaatactttctgtgctccagggaaccccttttttcagacaagaagagataatgtcttcagttttatggtgttttctgtgttttgttctccctgaccactttggttgatgtattttttccatgcgtctccacatctgttggggtagacgtgttgattgattgcattgcccaccagcaccctacagtcagatagttgtgatgctttaattctaacatacagcccgtaccacatccaggagatgtaaaaagtgtgtttgtgaatgtcttcacttgtactctaattcagacttgccaaagtatttgctatttactattatgggtaatactcttctctggcctagttcttacagagctactaaaatagaaatttacttttatggatagaagtacagaattttgagaagaaactaaattttcaccaaattttaaggaaaaattgtcattatctaaaaatgttcttatatatctgcttcatcttaccttcatactctgaaattccctatagcagacagagctagggaaatattaaaaatttaccctatttattttctggaactaaatcaagccttaactataacattatgagagtaatgggaactactgctggctttaagtaaataaaagtcattgttttcaacagtgtataaaaatcatagtgtaacctttttatttaataaatatcttacatttaattgcttcagttatgctatcttattgcccaactagaaatttagatttgcttatgaaaaacacatatttttgttacttctagatgattctaggagggagtataagatacctaatcatatgggaacatcacgtgactttttaaatctaaattagtcatgcttcacatcaaaatgagtcatatttaactggagaaactatgcccttattccagaactgatgctctttattgcttgagataattttggaatgttactatgatactgtttctttgaatatcattagtagtgacaactctttctccattgaaggcagacttaatttttttaaaccaccaacattaatttagagctaaatggggatgaataaggttggtgttcatctgggaaatg

SEQ ID NO: 89773 - DNA, 1019 bp, Homo sapiens
ctacttgtttttttatgtgacagaaaatgtattaaaatactctgaaagctgtaaaactatgtaatatgaagatgtcttatgaaaaatgttatatcttattgaaaccatctagtggggctaggcaccgtaatcccagcactttgggaggccaaggtgggataattgcttaaggccaggagtttgagaccagcctgggcaacatagcaagacctcatttctacaaaattaaaaaaaaaaaaaaaaaaccaggcatagtggtagggtctgtagtcctagctacttgggaggctgaggcagtaggatcacttgagtccaggaggtcaaggctgcagtgagctatgatcacaccactgcactccagcctggatgacagagcaagacctgtctctttaaaaaaaaaaaaactattaaaaacaaacaaacaaaaaaccacctggtgaaataaagcctgtcttcttgtttttggaatcatgtagcaaaatgtaaatgaataagtttatgatgataagtagaacttttaaattcaatttactatttttaatgtaaattgttaggcttgtttcaaatagctttgtatgggtttttagttaatgaaaaatttccaaacgtatttctctatctcaatcaaaagggagaattaccaagatcttcatcacacaccttcatggagaccatttctttggccttcctgggctcctctgcacaatcagcctgcagagtggctccatggtgtccaaacagcctattgaaatctatggccctgtagggcttcgggactttatctggcgaaccatggaactctctcacacggagctggtcttccattatgtggttcatgaactggttcctacagcagatcaatgtcctgcagaagaactaaaagaatttgcgcatgtgaatagagcagacagtcctcccaaagaggaacaaggaagaactatcctgttagactcagaagaaaactcataccttctgtttgatgatgaacaatttgttgtaaaagcatttcgcctctttca

SEQ ID NO: 89774 - DNA, 1558 bp, Homo sapiens
ggtgcgtccgcggaccagcagcgcgggagagcggactcccctcgccaccgcccgagcccaggtaaccgcgccatgtcccctccccttcccccggccgggcccgcgcaccccgcctgtggcttccccgccccggggcgggctcccgacgacggcggcggcggcggcggcggctgggagcgcgcggaatcctctgggagggcgaccgcggcggcctgacgagccgggccgggcgggccggctgaatgccgggcggcggtgcctcgcgtccctcgggcccccagctccgcttgcagctcgtgggagaatcaagttaaactcggacgggactcctgccgcggccgccgctcctctttgttgttctcagtagtttcacggtcgccccggctgagcgcgttgggtcggctggaatgtgttgccttagggtctaagtgaaagttgtaaattgtttgtctaaatttattttctccagccaatttctgttttgtctttgtcccctactttctcttcctagtcttgtcatgccagtttacgcttctggctttgatatgtttactttttgagtactgagagtgacagcggtatgcaggacacattcttagcacctaactgaacccctccttgcccccaataaaacatgcttcctaataaaagacacagctgatcttactgttagcactgcatgtactgacagtgaaattggtgtagggtggagggcggtggctccatcacttgtcccaaactgctgttaggatttctcaaactagattttcaaagacacaagtgtgtttagttaacctgaaaggtttatttgctggtgcagaggctttaaaaagccctgttgaagattgatagctgtttcccttcaaaaacctaagtacgtttgtttttatttaaaaaaacacatttatttcccaattagtttcttaatgcatttagtttttgcaccgtagtttaaggtggaattgccagttatttaggaataataaacacaacaggataatagcggaattaccctgaattgactttctgcaaacatataatcttagctaatttttgttagtaacctttgacttttgccagaattagcatccttctagtcttagtagcagcttggttactcgggtgttttaagaagtaggttcactcctttttgctggcaaaaaccatttagtatcaaaaaaaaaaaaatgcgtaatttcgtaattagatttagaacaaggcatttgaataatttttatggtggatttcataaattacttttgccataccctgcagagactagataatatatatttcagttgaaatctaggaagttctaaaatgtaacttttttttaatgctaaggacttactctctctatattggaaagttctgatatgattagtacataatattccaaactgtaaaatgattaacatttaaaaatacggtttttaaaattagtgtttcttccataatgctgtcatgattttgtttacttaaatgggtttgttacagaacaaatgtaatagagatggaccaagcatttgtaattcggagtagctttaggtctaaagac

SEQ ID NO: 89775 - DNA, 1190 bp, Homo sapiens
ttgattctagttagtggagctggcctaacctgcgggggattttgatacatccccctttgaaggaataagctagatgacttgaaactctgcttcagttaaaagttttatgaaatgaggccgggtgcggtgactcacgcctgtaatctcagcactttgggaggccaaggggggtgcggattacctgaggtcaggagtttgagaccagcctgaccaacatggtgaaaccccgtctctactaaaaatacaaaaattcattgggcatggtggcacatgcctgtaatcccagctactcacatgcctgtaatcccagcttcttgggaggctgaggcaagagaattgcttgagcctgggagacagaggttgcagtgagctgagattgtgccactgcactccagcctagctgacagagcgagactgtctcaaaaaaacaaaaaaagttttataaaatgtatttttcagttatcagttattaaaattcagtttggtttccaccatcttttaaaacagtggttcccaaagtatggtccacagactcctggagatccctaggatccttatatttaaggggttcacaaaatcaaaattattttcataatgaaactgagacgttatttgccctttcactgtgaggacatttgtatgggtggtgaaggagcagtggtgggtaaactgctggcactttaaaatgactctaggcagttataccaaacatatgagtcctcattgtgttctttatagtcaaacacacataagcatttgaaaaaatgccggtttcacttaataatccccttgctgcagcagtaaaaaggtttaattttaaaaaaatctctaccttggagtatgtctttttaatagtgtgattaaatgggaagtatgcataaagcatttctgcacattgaagtacagtgttcttttctaggaaaagcacttgtgttattgagctgcaagctgaactagctgctttttagtgggacaccatttttatttttatttaacaggatgacagataagctcagatagctatttagatttgagtatttggcaggtaattccttggaaatgaataaagtgagctggccacttcgaggagaacatttatagccagtgctaaaatctgatgtttcaagtgaaaatcagatttttgggaaactcctgtcactatgacttgccagtttcttaatacttaaaga

SEQ ID NO: 89776 - DNA, 2149 bp, Homo sapiens
gcccccagttgatctgtgatgaatgtgtattatatcctaagcagaaaataagcttttgttttaagctactgatcttttgggggttggttgtcactgcagcatagactagccaatcctgactgatacgttgtgccaagacctaggttacctatgaactttccatgctccctcatttatagtcccaaatcactttatacctacttcttttagcatttattacttatgtaataatatgtttgggtcttccagattagtagttctcagtggagtaagtactgctctttaagggatgttgtagaaatttgtggatgggtttggtggattggtggccagggatgccatcctgcaatgtgagagacagcgaataattatcttgcatcccacaagactttcagatgccccagaaattcatgtaggaggaaaatataattagcccagaacctaactctataatatatattcactttgccaggagttaaatttcttttaattcatttttttcttgcctgcctgcctccctccctccttccctccctccctccctccctccctccctctctccctctctctttctctctgttttctttctttttccttcctccctccctgcctccctcccttacttcaggctctgttacccaggctggagtgcagtggcgtgatcttggctcactgcaacctctgcctcccaggctcaagccgtcctcccacctcagccttctgagtagctgggactataggcatgtgccaccatgccccactaattttttgtattttttgtagagaggaggtctcactttgttgccaggctggtcctggcaaccgtgcctttgttgccaggctggtcctgagcttaagtgatccaaccatgtcggcctcttaaagtgctgggattacaggcatgagccactgtacccggacttggttgttttgttttttatttttgagaccaaatcttactctgtcacttgggctggagtgcagtggctcagtcatagctcaccgtagccttggtctcctgggctcaagcagtcctcctgccccagcctcttgttaattcattttcttagttcaagttgtttaagagttcaccatttgggaaaatccatgttactgactgcagtgccattgtgctatttgagttgccagtataacacgtttgtcttggaaggtctgaatttgtagctgtcacatttgtaatgattctgtatataagtgctagcatctaacttctttattatacattctaacttagttggcatgcctgagtatttataggtggaagtacacattatatattaagcttttcctcctttttgttatagttagggcattgttaaattttcaaaatatgtttaagtagtttagaattttgtttcagtaaagctaaggtggtgatataaattatttgttggaaaaaaaatgggatgttggtctgagagagtccagacccactttcttactatgggcttcctgtttttgtatctgtagtgctttgtatatacagtgtttgttgaattggtcaatttatgtttcccacatttcttttatgtacgttgttgcatctaattaccacaataaatttgtgaagttgtcagggcaggtgtttccattttatagatgagagaattgagagagatgttaacattcagtcatgcggctagacctttaattagaatatataattttatttatatcgatattatgctcttgcctaccatacttccataatctagaaccatttaatgtaggaatacatctctttattcctgctagtattattttttatatgcataacttttaattatgtttcaggcacttgtggtcataggaatacaataaagagagagatgagaaagctgtttgtttaagaaagcgaggtcattatcatttgtattcaaagcaacttggtattaaaacaaactttgagataccgttaaggccccagcatagcataaattttagaaatgatgacatttgatggtgagattgtggtgaaatagttaacacttaaacattttaattgcattgtagattcatacacatcttttggaatataatatcagaaaatgacttcaaaagtgtctgcactcttctaatttgttgtaagacaattccacagaataaaaagctatggtcagtccagaaa

SEQ ID NO: 89777 - DNA, 1024 bp, Homo sapiens
gaagtagcagctcattgtggttttgattttcatttccataatgtctaatgtcgagcatctttcatgtgcttattggccatcgtctttggagaagtgtcctttagaatccttttgttcatttctaaattggggtttttttttttttttaattggtctcttttaacaaaggtgagtgttaactgctaggtagaatttcataccaggcgatggtaaatttttcataaatattagtaatagacttttaggtttaactagtgctgatcctcataagtaatcctttaaaaaagtgctggtaagattttcctttagggtgactagtaaagtcagtaagacttgattgagcatgccactatcataatgagaagacctaactttaatatttttggaatgtcaaaaacagtgacattttaattaagtaattttatttttaaaaattatttttaatggctaatattttgtaagaattttaagtaattttcaactctgagcatcaaattttaattatgtgcattgaatctctgacttaaccagagcaatttcatcttttcccaagtagtcagatctacttcgtaaaatgtgttctgatgtgtgtcttttttttttttcttttttaggttatcctgaatacatgtctaacaattttccttgcaacgttagctgttgtttttcactgtttccaaaggatcaaaattgcttcagaaattggagacatatttgatttaaaaggaaaaacttgaacaaatggacaatatgtctattacgaatacaccaacaagtaatgatgcctgtctgagcattgtgcatagtttgatgtgccatagacaaggtggagagagtgaaacatttgcaaaaagagcaattgaaagtttggtaaagaagctgaaggagaaaaaagatgaattggattctttaataacagctataactacaaatggagctcatcctagtaaatgtgttaccatacagagaacattggatgggaggcttcaggttagtcttataagagtttttctataccctctat

SEQ ID NO: 89778 - DNA, 1053 bp, Homo sapiens
gtcttacttttgcccaagctggagtgcagtggtgcaaaacatggctcactgcagccttgacctactgggcttatgcagttctcctgccttagcctcctgagtagctaggactacaggcacataccaccatgcctgggtaattttttattatttgtggagacaagggtcttgccatgttgtccaggctggtcttgaactcctgggctcaagcgatcctcctgccttggcctcccaaagtgataggattacaggtgtgagccaccatgcccagtcactttttacatttttaaaacctgagcacaggccttgaaattataccaaggtttaaattctaggtctgatgtatgacatggccaagttagttattgtgaattttagttttcttatttatgaaatggggattgtaatactgagttggtaggattgtgaggattaaatcagaatatataaaagtgtcttgcataatgtgacacatgaataaatggtcgtttatttttctaggtggctggtcggaaaggatttcctcatgtgatctatgcccgtctctggaggtggcctgatcttcacaaaaatgaactaaaacatgttaaatattgtcagtatgcgtttgacttaaaatgtgatagtgtctgtgtgaatccatatcactacgaacgagttgtatcacctggaattggtaagtagactttgctttcatcctaagaaacataaagggaaaaggatctcaatagtgtttcaatttttgtaagttaaattataaatttggaagatagcccgcgactttaaataaggttaaagaatcagacatttttaatatacgtatttaaatttgaatttaggaacaaacttatattttgactgctaaaaccgagtattgtagttgatattttgcccctttagaacattgtttttgagaaataagatggaaagcattataaatttgaatacttagttatgtattgttagatagcgtttatgctacttctgaattgaaatggttcatgaacttttgtaatctttggtttaaatttacattctctgtttttaaatgga

SEQ ID NO: 89779 - DNA, 2056 bp, Homo sapiens
ttgtgttcagttttttttattgatacataatttgttacgcatccttttgattatctttttgtttccataaaatttctaaagaggaactttggaatgggatttataggtcttcagaatatcatcttcatgacttttgatgcatgaacatacttcttaagaggtttttaagaggttgtacatagaaacttgcacaatggatgattattactgccttaaactagtctcaatttaataaaaagtacccatgtaacttaactgatatttacatgtagtagattttttttcaaaggttgacatagggaaagataagggaaatgatatgctggttcttaatgaaaaagggaatgtctttttgtggtctactaattgactgctttaagaagagaacctactgttagttcagtggattgttaagttctggagtagtgttagtttagaagcaataaaggattggttgctaaaggtaaaaagcaaaccttaaaacaataacctaaaaacaaatgggaaggttctgggcagagaattaacattgttaatgcagttcagtttcagttttctttttgtcatacagcagagctaactatttcctggttggttaatggaaagatgttatgctgtatcagctggaatctagctttgcttatgaaggtgtaatcacataggtgaaagatgttgattactgagttttctcacaccatatattaatcaaatactcttatttgggttgggtttctagagggaaatttcagtttgacttttcatttataatttttccgtttggttctaaacctataggggacattacattcagtacacttcatttttaaagaatatgttgcttaacaataattctagatcctgggattggatatctatcagatcccactcatatctccacagtgtgaaattaacaaaaagatatagttaaatactcagtctctatttagaccgaataattgtttttctcagctggacacattttccagccattcggtttttgcctgccttatgtatttaggtgattattcttctaggtttatcaagaaactgaggagtacctttttaggattgttgctggaggctgttgaaacatagactagcttcaaatttgagagtcagattgattgataaaatatatctcatgctgttaccgctgaataaatgacttttgctggtaaagtagtatgcttttaaaataatatgaaaaaattctgaattaaggttagtaatttacactgtaattgattttaggtgttattatattacttgctaataagatttttttttctgggaatagaagcttataaaaatttaaaatatgtttaattttctatatagctccatcaagtatgatggtgaaggatgaatatgtgcatgactttgagggacagccatcgttgtccactgaaggacattcaattcaaaccatccagcatccaccaagtaatcgtgcatcgacagagacatacagcaccccagctctgttagccccatctgagtctaatgctaccagcactgccaactttcccaacattcctgtggcttccacaagtgagttctagaatcagatgtagtcagcaagttgagttttcctaatcattgcttatttatgtgtagtcacttggggggaaactccaagtaagtaaacattaaaagtaactgtagtatctttcataggtaaacaggtattaaacaggtatgcacaatcacttggaatttaagtaatggctttgattataatattgatttaaattaatgatctgatttatactttactattacatgtagcagtaagtagcctcttaagctcccagatatattttggagaaatatttaaataattaacaagtagttttgatccaagatgtttatgaaggtctgtgttaatggaattgcaacctttcttttaatgcggtgttcttattttggtttttctgggacaatattaccttatagtagttgtctgattttctcactgtgcaaagggatcttgacaaatttgttatatattgctcaagatagacattaattaagtcaattttgatataagctaact

SEQ ID NO: 89780 - DNA, 1409 bp, Homo sapiens
aggattaacagtcgagttaattaatgctctttaagaaaccaaatttccactttaaaaaaaaagccttaaaaatgtaggacagtaagcaatatcataggatggtttttgaatagaatacaagccaagagaagcttgattctcttggtatattacatacagagagggcaattaatttcttgtacatctgggaatatgatggtgttcttgaaaagaaatgattcttggtttataaaagctcttgaaaaaatttgaaagtagactgatagtttttttgtttgtttttaaccagtaaatggtatattgattggacagcagagctagatctttttaacttcctcatcttcactatcacatcctatttaaaataattttctgctctgcttttctctgtcaaaccctagcattctgccattactagtatcagtgctgatagtgattaatttttcagttttcaacattttcttgagcctggatttttggggtcctaatcagaaaggtccagagagagaggtggatggagtggccaggatgaactgacatacctctgaagaagttaatatgataggccagacgtacagtggtgttttgctggcatttgaaatatgtttgtgaagaaataagccactacaattagttagacattacctaaaatggaataattttgagcttcctcaagttaaagtttgcctttatagatgactgtaggttttttacctgataggccatgggtgagttacactttttgcccatctttatagttgtgcattatcagataaaattggtccttcatttagtatatgaaatcataagatgacatctatgaatgtaccatgttaatgtcttcttgttcctctaggtcagcctgccagtatactggggggcagccatagtgaaggactgttgcagatagcatcagggcctcagccaggacagcagcagaatggatttactggtcagccagctacttaccatcatagtatgtacatactttaaaaaatcttttaaatagttgagaaaaaagtaggcagcctttataaaagcaaattaacccatgtgggccttaatttttagacagcactaccacctggactggaagtaggactgcaccatacacacctaatttgcctcaccaccaaaacggccatcttcagcaccacccgcctatgccgccccatcccggacattactgtaagctcttgtttttgttgtaagggctattttttttttttttttggtagggctttgttttctgttttttaaaaatgtttttacatcttttattcatcctgtgattttgtttcattaaatagtgcttttcagtattttttgtaaacagtattatttttcatagttatcctacctttttattttagaggagtgatgtttgctaaatacatttatttctctgt

SEQ ID NO: 89781 - DNA, 1025 bp, Homo sapiens
tctaatattttgttattttccttccagtcatataaacaggtatatgtaaattgacaggggctcctactctatgtgtattgtatatatcttgcttcttttcagttatgttactattttttccatttcttaagagaatgtaatttttaatggctgcctaggccgtcatagtgttgaagggtgctgggtttggacctttaacaggctgtgtgaccattgacaagttatttcacctcattaagcctcaagagtaataatagtagtatctacctcaaggggtgttcgtaagaagtaaacgtaataatttatgtgaggtgtttagcacagtgttttaacacattaccagttttcaattatgttagctatgattccattaaataaacatccttaattaacataagcacttgtttttagaatagacctaacagtttattattatacattgcattataaattgtactgtattggacgttacatgaataattcatttatgatctgtattaaatgttggatataaaattatgtgtaaattgtgtaataatagcacttggcagatagcactgaaatgttagttattaaatatccacaaaagtattaatagtttaagactatttgcttattgtaaacttttaagttcttagacattgcataagcttgttttaaacaattcctaacctataatagttatatttaagtaagatttactgaaagttttagcattagacaacttttagtaaataaaaatggaatttttgttgtcttttctttagggcctgttcacaatgagcttgcattccagcctcccatttccaatcatcctggtaagtgtatttcaaaattgatttcctgtatttagattgatttagtggtgattgaaacgcacaaacacaggctttaatggaattatggggtcacttctcagatgagtacaatactcatcatgacatgagttaatcaacagtttgagtagtcaatatagtcacacatagactgtctatattttattcagtttaactgtccccaaaaga

SEQ ID NO: 89782 - DNA, 1037 bp, Homo sapiens
tgtgtttttaaaaaataaaagttgagactacatagagaatatgtgtagtcaaatgaaataccatggtaaaataatttattttagattctgattatttctgttctttaaattctcagttgacctggtcctttgaggtaagaaccaaattccagattttaaaaaatgacttttagaacttgaggataagtggtaattggaaattaaaaaaaaaaattagtgttttaagaacagtgctaagtactgagctagaaaatagaagacatggaaattcctaccttttaatgcattatgttattttaatccagttgttttgggtgcattacatttccatctcccctccctttaccctttcttttaggaaaaactgtgttgtggagtgcaagtgaaagccttatatctttctcatgggaggatgttctttcccatttatttcctatagctcctgagtattggtgttccattgcttactttgaaatggatgttcaggtaggagagacatttaaggttccttcaagctgccctattgttactgttgatggatacgtggacccttctggaggagatcgcttttgtttgggtcaactctccaatgtccacaggacagaagccattgagagagcaaggtattgattgtatagtcagatagttactttaaaaaattgagcatagtacattgtcttttattcaaggttatgttttcccatgtacattatatgtgttcttaaatataaataaaggaataaaggtcatgttgaaaactcagaatttgtaagcactccatcttaattgtcggtgtttttgttgtttaacatataatgataaaagatagccttttttatgttagtaggtttctatgtttcgaatagtaagtataccttttgaaattcagtttgaaaattttattttctgtgatcatacatttctacaaattactgaaaggaagtaatattaaatgagaacatgtttctgaaagttttacttataatgttaaaaaaattggtaataaaagggaaatggttaagtaaattatgataaat

SEQ ID NO: 89783 - DNA, 1041 bp, Homo sapiens
ggcggagtcaggcagatcacttgaggtcaggagttcgagaccagcctggccaacatggtgaaaccctgtctctaccaaaaattagccatatgtggtggtgtccacctgtaatcccagctactcaggaggctgagacaggagaattgcttgaacccaggaggtggaggttgcagtgagctgagatcgtgccactgcaccccagcctgggtgacagagtgagactccatttcaaaaaaaaaaaaaaaaaaagtttatataatgaaatggaaatgcttacagtgaaatattacaggaacattccattttagctactgtatgatctcggcttttaaggatgtgtgtgctaaagaacataatcttggctctatcacttgctgtcatgtgactttggcaaattacctaacctctaagccattctgcctaatagaattttctgtgatgaagaaaatgatttatatttgcactgtccagttcggtagccactagccacatgtaactattgagcacttaaattatagctcacttgattgactaatcggatttctaattagttttaatttaatttaaatagtcacatgtggctagtggctatcaatttggacagtatgccttagtttctttatctaaaaaaattagaataatagtacttgttgagttgtaagggtttaatgagaattcatactacatgctcctgacacatagtaagtgttgtaaatatgtgcatcattattagatatgaacaggaaaagaaaaaaggaaatatacaaaaatgttaatagctatcttttggttttatgtgatctttatttttaatttttcaatattaagcatgctatacaatctgaactaaaatttaatttaaaatacttatcaagataaaatgtaatttcttttttcttcctaaggttgcacataggcaaaggtgtgcagttggaatgtaaaggtgaaggtgatgtttgggtcaggtgccttagtgaccacgcggtctttgtacagagttactacttagacagagaagctgggcgtgcacctggagatgct

SEQ ID NO: 89784 - DNA, 1259 bp, Homo sapiens
ttctcactagcagggtgtgagggttccaatttctctacattctcatcagtacttgttatctgtcttttttattttagccattgtagtaggtgtgaagtataatcttattgtggtagttttgatttgcaaacttcctgtgttaatattgagttgggtttgtttttgaacacatttattttagaggaaggggcagcagatgcttctaaaccactggtggactaggtcagagggtattatgaacctcatttaaatttattcccaattaacactcattgtgattccctaagtcaagtagaacttagaatgtccttagcacaatcttgtttatgttcaggtgcatttttcattctggattactgtttcctaatgttaatttaagattatatagtattgcatttaagccttgtcaaaggaaaatggcaaaatttgactcctggttgtaaaagacaatatcctaaagatgttgtcagtgatctttatgagacacacatctttgttaagtaacggttttgtaataaattcagaaaacatggttaaataaattaaagcagaaattagctcaggagtggtggtcagaaatattttttggatctgagccaaaaagaatatttaaagcctttgattactttgaattgcctttgtcaacaatttagtcaaattatgaaaggaagacagtagcatttcaataatagctttaatttttatcatccagtgtaacaaatggaatctgttatggtatccgttatcaatggattagttacagtgtgaagtcaggaggcaatgcaggttttagttattagtgaacctaactgaataattttaggtcttctggtttgagtgctataattacgtaaataatctgtggaagggaggtttgctgaggtgcccaatgaatcatttttactgcatctacagatgcaagtcataaagtttaatccgtgtgggtaacctgtaatatgtgctgctgatgttagcatagattcaggctgaaacaatcctaattgcgattatttacaacacattggagagagcctatgtgtgacatattacttggttatttttttaaatgactcgtgggggtgggggagtgttaatgttaaaggcatacttgaatcttggagattataattaagttttattccctactcccagataacattatatatatatatatatatatatatatacacacacacacacacacacacacacacacacacacacacacacaccatacttggttagtgatgattaaaaaa

SEQ ID NO: 89785 - DNA, 3669 bp, Homo sapiens
attggacacttttccaattttttttttaaagtatgctaaacatggagagaaaactaagtgagggtggtattttgataacttgtagacttttttttaattttagggtaaaattgaactgtgtgccaggtttcacactgatggggaattttttactgcagagttaaactcctgactatagacttttatgatggaaacacgtggcacccatcttccacgtctgaaggcataactagtgattcattcaacccctgttcttaacctcttcagtgtggtaagcaaatcacactggctaagaaaactgcagtggccctgcaggtttctctacagtacatgcaaattcctcccattagtttcattgtaatattgatgaatgcagatggactatatgactgtatgttctgactggaaaattagatgcagtctccattgtgacttatgttcaggagtttacaatttagaggtagattaggcatattcattgagagaatttgattttttaaaatttggggtgataccattaatttgctggtttcagtgttataaacatgcttttactgaagaatccagaactattattaagtttcatattctcatcagttgccaccactgagtaatagtgtattactctgttacactttgaaattgagagagagacttcatctcggtcatctaagaggtcttagtggaactaagaatattaactgcttcattattagttatgtcttattctgaactaggctgtttagacagtaaggtttttagaagcaacctgtggacacgcactacctcttaaaaacaagttgtttcttatcccttcacctccacttctaaagaaaaaaataggtgaggtgttggtggattgtggtaatttactttataattggttgtagctagaagacacatgtgaaatgtaaagttccttaaccaaaagtgtgcagcttgttgataaagtttagatctactgttacttcttggcactttagcagagaagttatatgctgaggagaatgaaatacagaaagctggtcacttgattaatttagaatgtagggaggatgggaagagatcaccctgtccctctgatgtcttccaaatcttttctgttaggtctgtcagctgctgctggaattggtgttgatgaccttcgtcgcttatgcatactcaggatgagttttgtgaaaggctggggaccggattacccaagacagagcatcaaagaaacaccttgctggattgaaattcacttacaccgggccctccagctcctagacgaagtacttcataccatgccgattgcagacccacaacctttagactgaggtcttttaccgttggggcccttaaccttatcaggatggtggactacaaaatacaatcctgtttataatctgaagatatatttcacttttgttctgctttatcttttcataaagggttgaaaatgtgtttgctgccttgctcctagcagacagaaactggattaaaacaattttttttttcctcttcagaacttgtcaggcatggctcagagcttgaagattaggagaaacacattcttattaattcttcacctgttatgtatgaaggaatcattccagtgctagaaaatttagccctttaaaacgtcttagagccttttatctgcagaacatcgatatgtatatcattctacagaataatccagtattgctgattttaaaggcagagaagttctcaaagttaattcacctatgttattttgtgtacaagttgttattgttgaacatacttcaaaaataatgtgccatgtgggtgagttaattttaccaagagtaactttactctgtgtttaaaaagtaagttaataatgtattgtaatctttcatccaaaatattttttgcaagttatattagtgaagatggtttcaattcagattgtcttgcaacttcagttttatttttgccaaggcaaaaaactcttaatctgtgtgtatattgagaatcccttaaaattaccagacaaaaaaatttaaaattacgtttgttattcctagtggatgactgttgatgaagtatacttttcccctgttaaacagtagttgtattcttctgtatttctaggcacaaggttggttgctaagaagcctataagaggaatttcttttccttcattcatagggaaaggttttgtattttttaaaacactaaaagcagcgtcactctacctaatgtctcactgttctgcaaaggtggcaatgcttaaactaaataatgaataaactgaatattttggaaactgctaaattctatgttaaatactgtgcagaataatggaaacattacagttcataataggtagtttggatatttttgtacttgatttgatgtgactttttttggtataatgtttaaatcatgtatgttatgatattgtttaaaattcagtttttgtatcttggggcaagactgcaaacttttttatatcttttggttattctaagccctttgccatcaatgatcatatcaattggcagtgactttgtatagagaatttaagtagaaaagttgcagatgtattgactgtaccacagacacaatatgtatgctttttacctagctggtagcataaataaaactgaatctcaacatacaaagttgaattctaggtttgatttttaagattttttttttcttttgcacttttgagtccaatctcagtgatgaggtaccttctactaaatgacaggcaacagccagttctattgggcagctttgtttttttccctcacactctaccgggacttccccatggacattgtgtatcatgtgtagagttggttttttttttttttaatttttattttactatagcagaaatagacctgattatctacaagatgataaatagattgtctacaggataaatagtatgaaataaaatcaaggattatctttcagatgtgtttacttttgcctggagaacttttagctatagaaacacttgtgtgatgatagtcctccttatatcacctggaatgaacacagcttctactgccttgctcagaaggtcttttaaatagaccatcctagaaaccactgagtttgcttatttctgtgatttaaacatagatcttgatccaagctacatgacttttgtctttaaataacttatctaccacctcatttgtactcttgattacttacaaattctttcagtaaacacctaattttcttctgtaaaagtttggtgatttaagttttattggcagttttataaaaagacatcttctctagaaattgctaactttaggtccattttactgtgaatgaggaataggagtgagttttagaataacagatttttaaaaatccagatgatttgattaaaaccttaatcatacattgacataattcattgcttcttttttttgagatatggagtcttgctgtgttgcccaggcaggagtgcagtggtatgatctcagctcactgcaacctctgcctcccgggttcaactgattctcctgcctcagcctccctggtagctaggattacaggtgcccgccaccatgcctggctaacttttgtagttttagtagagacggggttttgcctgttggccaggctggtcttgaactcctgacctcaagtgatccatccaccttggcctcccaaagtgctgggattacg

SEQ ID NO: 89786 - DNA, 1026 bp, Homo sapiens
tcttctctttctgattcttcatttctgactgcctaggcaaggaaaccagataaccaaacttactagaacgttctttaaaacacaagtacaaactctgggacaggacccaagacactttcctgtgaagtgctgaaaaagacctcattgtattggcatttgatatcagtttgatgtagcttagagtgcttcctgattcttgctgagtttcaggtagttgagatagagagaagtgagtcatattcatattttcccccttagaataatattttgaaaggtttcattgcttccacttgaatgctgctcttacaaaaactggggttacaagggttactaaattagcatcagtagccagaggcaataccgttgtctggaggacaccagcaaacaacacacaacaaagcaaaacaaaccttgggaaactaaggccatttgttttgttttggtgtcccctttgaagccctgccttctggccttactcctgtacagatatttttgacctataggtgcctttatgagaattgagggtctgacatcctgccccaaggagtagctaaagtaattgctagtgttttcagggattttaacatcagactggaatgaatgaatgaaactttttgtcctttttttttctgtttttttttttctaatgtagtaaggactaaggaaaacctttggtgaagacaatcatttctctctgttgatgtggatacttttcacaccgtttatttaaatgctttctcaataggtccagagccagtgttcttgttcaacctgaaagtaatggctctgggttgggccagacagttgcactctctagtttgccctctgccacaaatttgatgtgtgacctttgggcaagtcatttatcttctctgggccttagttgcctcatctgtaaaatgagggagttggagtagattaattattccagctctgaaattctaagtgaccttggctaccttgcagcagttttggatttcttccttatctttgttctgctgtttgagggggctttttacttatttc

SEQ ID NO: 89787 - DNA, 3148 bp, Homo sapiens
tcatagcaggcctagaatttaactggtgggagcagaagtgagatgacctactagccatgagcacggtgtttttgtcatcaattgagttttacagaggaaagagtaatgttaagttaaagtggtaagataattaggtggaagtcagtttaataacttctgtcagataattgtgaaaatcgaggttcttggactagcaaaaagaccacagattttaagtcaaactaggtttacttctggctctgccacttcctagctatgtgaaaaactctaaaacttaacccataaccagatatttagcttaaaaggtgcattctgtgatttgtctttatatatatcattgaagtagatgttgattcttatgaaatgttttctttctaacaggttgtaaaattaaagcactgagagccaagacaaacacgtatatcaagactcctgttcgtggtgaagagcccatttttgttgtcactggaaggaaagaagatgttgccatggccaaaagagagatcctctcagctgcagagcacttctccatgattcgtgcatctcgaaacaaaaatgggcctgccctgggaggattatcatgtagtcctaatctgcccggtcaaaccaccgtccaagtcagggtcccttatcgtgtggtaggattagtggttggacccaaaggagcaactattaaaagaattcagcagcagacccacacctacatagtaactccgagcagagataaggaacctgtctttgaagtgacagggatgcctgaaaatgttgaccgagcacgggaagaaatagaaatgcatattgccatgcgtacaggaaactatatagagctcaatgaagagaatgatttccattacaatggtaccgatgtaagctttgaaggtggcactcttggctctgcgtggctctcctccaatcctgttcctcctagccgcgcaagaatgatatccaattatcgaaatgatagttccagttctctaggaagtggctctacagattcctactttggaagcaataggctggctgactttagtccaacaagcccatttagcacaggaaacttctggtttggagatacactaccatctgtaggctcagaagacctagcagttgactctcctgcctttgactctttaccaacatctgctcaaactatctggactccatttgaaccagttaacccactctctggctttgggagtgatccttctggtaacatgaagactcagcgcagaggaagtcagccatctactcctcgtctgtctcctacatttcctgagagcatagaacatccacttgctcggagggttaggagcgacccacctagtacaggcaaccatgttggccttccaatatatatccctgctttttctaatggtaccaatagttactcctcttccaatggtggttccacctctagctcacctccagaatcaagacgaaagcacgactgtgtgatttgctttgagaatgaggttattgctgccctagttccatgtggccacaacctcttctgcatggaatgtgccaacaagatctgtgaaaagagaacgccatcatgtccagtttgccagacagctgttactcaggcaatccaaattcactcttaactatatatatatacataaatactatatctctatatggactcgtaaaggcatgggtataatggtaccccccagtaaacttcctaatgatttcttatgactgttatcaggctttattgggattaggctaaagttgttagtaaacttataaaaggctgctatggtaacactaaacctaagtggtctcttgtctattagtttggtttgaattattagtactatcctgtagacccagagacatagtttatataagaattgctaaagctgaagttcaacttggctgagtgaagataatcataggttgtgtgagcctatgaaaaagtgtatacgtctaagatttcaaaacaatgggtcccaaagcctaaccactttaagagtttatggagggtacttggcattacagacgattcatacacttccagtgctgccttctttacactgccagttttgacaaaacaggtttgttttttattttacaacaacatatgcctaattctgcaggattgcaagtaactttttaatgcattgtgattacttattggtaatgatagggctgatggcagtttactagatcactggttataatttgggacaaaaactgctacatcaactttcatctcgcccagagtgctcaaggctggtatgatcagtggatcaggaatgcaattgtgaattcctgcccattgcctctcttggtgaatgtggaaatggccacctgggttttcccatatcaggaagggctttgggatggcacctatattggctgataattgaggatgcaaacattccattcattagtgtgatcgagctgttaatttttagactatagatcaaaatgtgaaacattttatgttcaatccatatttgtcttgcacattataaatatatttttattttttagtaatttaggggagggaggagggagaaagggataatgatgcccttggcataattcacaaaagcagctgtgacaacctccaatcagtttacttcatttcaaaactatttccaatcacaaggaaagatttatttaaaatatactcgtacatttcacctgtggatgtctataacttcatcctcagtatgttcccaaatctgtgctggcattgaaaggacaaaacattatactagtgggtttttctactaattattttttgaagcattattttcccaacacaaaagagcttttttctcggtataatgaaaattgaaatcctatgtgtattcaatagtaaatagacaaattttattttttatttccacttgaagagttacatttcgtataaaagtttacaaataacggtttttattttgattttttcagtataaaaaaagttgccttgatggcatattatgatgtaatgctaattgcttgtaggatagtaaatggtcagtattgaaacctaatctctagctgccgtcttgtagatatgaacgaatgttcaccaagcatgtattttgtattttgttgcattgtacactgcaactaataagccaaggaatcgacatatattaggtgcgtgtactgtttctaaaaaccacaa

SEQ ID NO: 89788 - DNA, 1098 bp, Homo sapiens
actcagcccttacttgatttttagatttatcccttcacctattccaatgcccgtgattcctcaaacctttcctgaccctaccttatgtctattcgctgccctggcctttgggttactattcctgaattgggatttaaaagctaggtacttggaagaaaaggaaaataattgaaggaaaggagaaaggtaatgtcataggcagagtaatcccacccacccaacaagtccatatccgaattccccaggaactctgaatatgtcacctcatttggcaaaagggatgttgcaggtgtttatgcagacgtgattgagggtatggaccttgctttggggagcttgagatcatctggatgatcatctgggtataatcacatgagaccctaaaagcagaaaacctttcccagttgggtctgagatctgaaaaagaagatgtgaagcatgagaaggactcagcctccattgctcgctctgaagatgagtcacaagccagggaatgtaggtggcctctagaagctgggaatgaccctcagctgacagccagcaaggacactcagtcctttcactgcaagcaatcaaattctgccaacaacctgcatgtgcaaggaactggatccctcaagcttcttgcaaggaacatagcccttgcaaacaccttgattttagccctgttgagacccatatcagatgtctgacccaccaaactgtaaaataacaaatatatgtaaaaacaataaatttttgtcattaaagccactgtggtaacttgttaaggcagcattaggaaactaaagcaggtaatagggaattaaaggacagaaatatttttggactttaattgaactattggcaattccatatttactgtaacaccttaatacagtattttatgttgaaaactgcttcttaatttttttttttcttttctttgggtcagggtctcactctgttgcccaggcttgaatgcagtggcacgatctcggatctctgcagccttgacatcctaggcttaggtgatcctcccaacctcagcctcccaagtagctaggaccacaggtgtgcaccaccacgcccagatagttttttatattttttgtagag

SEQ ID NO: 89789 - DNA, 2630 bp, Homo sapiens
gggcgtgggtggggagacgagagaaaggagcgtgggacggaaaaggcgaacccggcgaggcccccaagtccaccgcgaaggggtctgggaggagccgagggtcgaccagatgtgaagatgggtcaccttgcgaaaacccacgcttttccgcccgtcttgcctggtaaaaagtgtgaagtttctcgggcgacccagtccggtggtgttcacgttacttgggctgtattcgtggaacaccaggctggcgtggcaccagaaacctcagtgaggtggtaaaaggtcgggctcgaggagttgtgggttcgctgttgggtacggaaagcttcgagattgcaagtttgcgccgccgagtgtcttctaaaagcgttcagcctcccttacaagaacttgttcagatggagaaaagaacagaaatggaggcctgtagacagagctcactggggagggaaggggtgttcaaatggtcggtatcaccgccatcccctgcccctccgctgttgagaaacttagctttggaaaagcagcccaactcactgccgcctatcttaactgtatttctctcggtacgtttcaactctcggaaagacacactgacacactggctgtcttttaaaactgttcagtgtgcaggatgaagaaaaaatggacactaaggtaattaagaaacttcatcggtttatacagttttcagttaattctcctcttcacttgccagcacaccagtactgcagacagactcctcccacattgttcagacaaaggacctgtgtctcagattccaggagtagatttgtgaaggtgggggaaggggatgcctggggtacctctgtatccgacatttttagggaaggtcctaagttctttatggtagcatttcccctttatgaaaggggcagatgttacctgctgccaccgcatgacaatgtggtttagcctggttgttgcatgcctctttactgttaggttgagagcattgttggggtcaaataaagagagatgatggcgctgccgcttaaatgatctcatctttcccaggtggtctaaagtacacataaataagagctctgtcgaaatggtggtttcacatatcagacttggcttatttctttcctatctgtaggattttaataaaaactcatctgaaatctggataaaggagatagcttagttcagactgcctgatgattggcacttacagacactgttcaaagctggacctttcaattgaaaggtagcttatgcttgtcgttcttctggttaatgagtttcagattcctggattgtttggttttggcgatacttagagtaataatccaggagaaaacttttgtttacatgggataaaattacaacatctcaatttggatcagaatgagttgaccattcatgtaagaacactgaggaatcgctatgtaccaagcttgtattttgccaggttttgagtttgtggtattgagaatgtgaagttaattcagactttctgcccttaagaagataacagtctaataaacagtagaatggcactaactatagtgtatttagtatgacaaagtctcaggtaagagaacatctatggagagggccttggaaaatgggtaggaaggagtctaacaaatggagattgaaaaactgtggaggaacaatgtgaggaggggtgtggaggactagcctaggtataattgccaagtagtgttgttttgatacttgaggtctgtaaaggggagtggtggaaaagggggaaggcaggcgttcacaccagaatgtgaagaagcctgaatgccatatgaagatgccacttctcaggacaagttgcttccgtgtgcttatggtaacagtctagggtaacaaaggaagaaaacatttacgtgccagttttactgaaggacaagataacatattttatagatttagtttaatacaaactttagtccttcattatagtagacaccccttaaagcactgctaaatggcccttacttgtgtatgttgttaatctttatagaaatcagttttttaaaagtaaagtgaattccaagtttttattttgtaccagctattacgtgataggaaatgagataaagccttagtttttcttttgagggctgtgtttatttggttaataaggaaatgttgaatttaattatgtcttagatcatggagacaaattgctggctcttccatttaaaccttgtattttcccagagttgacaatactgttaaaagtatgtcatcatcctctatcttaaaagcagaaaatctggtccttttgctgttctgaaccatacaacttgtggatcattgacccctttgccacccccatgtcccagcagcatagtaataaacctgtaaagtgtttgctcactcgtatggagaacgaagtgacttctaatgttcacattcttttacagtattatatttccccacgggagagaatctgtcctaagtaagtaaaacagggcaaatcatttcattttcttgtttgctttgaaggagctaaactttcatccttaagattaaattatccatttctgccattttatgtattacctgaagccataattttctatttgacatctcttaattgattttggaaataattatgtcacagatggagacatttatgacttcag

SEQ ID NO: 89790 - DNA, 1060 bp, Homo sapiens
ctcacataataaatgaggtttcatgagttcctgtacacaaatatatacattcatgcattaatttatatttggtcaatgttgcgatttatgaataaggcaggagatattaaagctcacagaccttcccatttgggtctaaatttatcgtcttgtattaaatcttgtttatgaagcaactttgagatttgctttttctctaaatataatgactgggattctttcattttaatatatcaaacttcccagtcccttctatctccctcagtcacaccacgcactaatttgcacctgaagagggtttcccttttattcctatggtgttgtttatgacagagtttgacacatggagggtggtgaggaagaagagttgctttaaggatcataggacaaaaaacctacagcattggccctgccctttatcaaatcgcaggctggctgctgaactaaaaatctatccaattgtaatattaaggttggaataattgcagagtaaacaaagcttaacaagatgtttgtcctagtaagaaaattgagataattagacaataattttgacgcaatgctgtaaagactgccagaaaaaaaacatggtgaaagattctgctgagaccctcagacagaagccagaactaagcacatacttcctttataaagcaggacgagttttttagggtaggatgttcctcagaagtagtaatacccagctccacgatatttcttcctacccaggaccatgaacatgtcattctcttgccttgaatggctcactgccttgcaagaaaatcttctacatggaattccaggccttccacattttggtatcattctttcaggtgctcaaaactgtcacataagcatgctcagatctctcccatattaacagaaactcctccttgacagcacatccccctcttgtcaccaccctctttactttcaatcagcttctccaatcagctgtctgcactcactgcccatttctttaccaagcactgcaatgcagccatggctcttgctgcttcactgaaattattctcaccttgtcagtaaatccattgagcgc

SEQ ID NO: 89791 - DNA, 1424 bp, Homo sapiens
actacttgagaggctgaggcaggagaatcgcttgaacctgggaggcggaggttgcagtgagccgagatcgcgccactgcactacagcctgggtgatagagtgagactctgtctcaaaaaaaaaaaaaaatcatttcaatccagttcagtgctgttttagctcttttctcttcccttattgaagacatgaagatgctgtgttgatacttggattttgttttccaagctggcaaggatgtatttatgggctttgatgagtatacttaatatgctggaagtctttcagagggaagtctgaagtgtgtttctactgtccacggctgcagccacaccgtctctggagcacagagggatctggatctcacctgatccagattctgcactgttgcttcggaatggactctcagaaagcccttctcttctgtcagggctttttggtttttttctagacttttctcatgaaatcatttcagataatcaagggtcacctaattgaggttttactagacttctgtttcctttttttttattattatttttgagatggagtttcgctcttgtcatccaggctggagtacaggggtgcaatctcagctcactgcaacctctgcctcccgggttcaagcgattctcctgcctcagtctcccaagtagctggaattacaggtgcctgacaccatgcccagttaattttttgtattttttctagagacggttttcgccatgttgggcaggttggtcttgaactcttgaactcctgacctcaggtgatccacccgtctcagcctcccaaagtgctgggattacagcatgagccactggccgacttttgcttcctttacagattactttgcagattgacatccaggctatacccttgtttatgtgagcgaggctgtgttgtaggcactggcactatacttacacagaagttggcaacttctcattgccttgcacaaatgtggataatagtaataacaaactaatgttgaatgattagaattttaatcagttctttaaaagtagccattattttggcatgttaggtagggagagattcaaattatttatgttatcttcccaacttgagaatggcattattagatcaagccattagacttatagattgcggaagatttagatgtacttcttaattatgaaaattacatttaccttactcaaataaccccatatatacctaaaagttttaataaactaaagcatgaccacatgactcaatcagctgtccgtaataacctgtggtataggtaggacttagttgggcaaagggtgagatgtggccatcttcacgggctcataagagataaccaaggtcccttcaggtcggccagcctcatcatgcctcagctctttctaatcctgcttattagtaaggtggatgtttattcatttatttatttggtt

SEQ ID NO: 89792 - DNA, 1872 bp, Homo sapiens
ctttgtaacaaattctcacaaactttgcagcttaaaacaatacccatttattagcttaaagttctgtggggtcagaagtctgggcctggtatgactggcttctgtgtttgggtcttaaaagtgtcaccggactgtgttcccttctgaagcttggggttctctttcaagctcatatggtggttgcagaattcatgccttgtgttttagggctaaggcccctgttctcttcttggctatgggatggtggctgtcttagctcctggaagctgcctgtagttccttgtctcgtggctcctccgtgtgcccctttatgcttctgtcaggaagatcccagctccactaaggggtcctattaggtcaggcccactacaataatctctctcgattgactcaaaatcagttgattggtaacctaatcatggagagatatcccatcatattcacaagttctgctcacccttaagaggagagaattatataaagagtgcacgtaagggtggttttggggaagagggactgttggggaccatcttacaattctgcctacagcaatgggcaaatgattaaatttcagctctcacaaatgtggaaagtaatgctcaagagagaagaaaatcaatggcaaatgttagagtttaagataaaattctccatccaaattactgcatatggtgccatttgctccattttctccttcttcctaatgaggttactctaggacagctgtgaagattcttgtactcttattagtgagagactgccagtgaaaccaatatgtcatttgtcataaactttgagtcactgacccagaggtgagactaactgtataagaaataaacaaatgtgttctgcttgaccctgccccatgacatgaaaatctgtcaaattccagtttcttttaatatgacagaggctatagagctaagactgacccagtgacagcttccctctttttgaaaattcatttaataagtggaagtctataccttttaactctttgtggtgttttggagtttaataaagatatccaaagtttttgtgggaagcagtacatatatgttaccttgactaccttggacatagtcttatttggtcaaaggggtgtgatcttgagtagactgaatataacttggcagctggttgagcccctatggagtgaatactcagggacccttagggcaatcttctatagcattgctcctctacctctctgctgtcccagttttgggaattgctgcaatctgtcttcctcggttattggtagagaaaattactttttttttttcagtagaaccctttgtatattccttgttgcatcttcatctccctgtctgcatctttccttatctcctttcttctggtctcaagagctttgcccccttttctgttctgctgaccctccctcctctgccattgccttctgttcttgttcccactggaatcttttcctaccagtcttctctcttctcttgtctttcttcaacctttgcttctctacttggttctggatgtcaatttctatttaccgagctttgtttgctagacacgtattaggaatttatctcttaccatctgggggatctactttcttttcttttttttttttttttactttttaaaggtaagtgtatactgatagcctttcttcctgtgctctaatggttcagagcctttttaatgacttggagttattaaccctcacttttgaggttcctttgtaatcaccgagacacagagaaactcatggcatgttcttaagtaactcactttcttatttgaagagaggcttttcagtgtctgtcctcggtgtgcaggatcatgtagtcttggctccttcatgctgacctgttgcctgcagacctcagaatccag

SEQ ID NO: 89793 - DNA, 1120 bp, Homo sapiens
agtttttgtaatacaccttcatgtttgttctttgggacactaagtggggtaaagtacatgcaactatgcttccgttgatgtccttactaggagaactgtgtggagaaaatgtgtagagatgaactgcagtgactactaagatggtttctccaaagatgctctgcactgtcagttaaattttaggcacttttgtggctttaagtgacttttaattccatcccatgtttctccctcaatcagctggtttcctggataggacattgcccagaccattagtgttataaggtgataggcatgtggagctagccaatgttctaatatactggaaggtaacaaagagaacaagatattagatgtactcagagcgtctggttagtgaggattagagggaggtgtaataactgagggtgatagcacattttgggagtttctccaaatattaaatcactgttccttatacctattctatttattggttatttggcctcacaccaggcagcaagattaagctgagaaaaccactggatttggcaggggaaatcagattttcagtgagtagtttaggatttatgacagcagtagtgcttatgaagtgtagtgcaagagactaggtagccatcatagagggggagtccttacatatgttttgaatattttgaatattactcaccttttgaatattactgtctttggacttctaatggttgagaaagtaatagagtggggagacctccaagtgaacagaatcgccaaagaaaaacctactcacccaagtgagtacatcaggaaatgttaaacttaggcaaaggaagaccttttccttccctgctccctctgaagcactgaggcccatagtggccaaagataatgagaaaagatcatggaatttggtgagaggagctgactgactattggagtacgtttagtgcaagttggctagaaagggggtgggctaataaagttgcagtagacttgggaaagggcgatagtgcacattgggccattccttgaggaacaggcttggaaagaaaagaacatggtcattatataagctggataaagtctcagtgtattaaaaaccagaaagtacagtcctagcaccccaaagaagttgcttgtg

SEQ ID NO: 89794 - DNA, 1044 bp, Homo sapiens
acgcctgtaatcccagcactttgggaggccgaggcgggtggatcatgaggtcaggagatcgagaccatcctggctaacatggtgaaaccccgtctctactgaaaatacacaaaattagctggcttggtggcgggcgcctgtagtcccagctactcgggaggctgaggcggatggcgtaagcagacccgggaggcggagcttgtagtgagcctagatcgcgccactgcactccagcctgggcgacagagtgagactccgtctcaaaaaaaaaaaaaaaaaagtatacaaaaagtttttcatatattttgaggaaacttcatacatgtttcacttattaggtgcttaacatgtaccctagagtatttaaaatgctgcgatagactgagaagtttggaataatttgatttaaagtaatagatattgaattagtaggaagtcatctgattgtgtttatatataatattttaaataaaaatacatttatattcacagggtaaaccagacttgaatacaacattgccaattagacaaacagcatcaattttcaaacaaccggtaaccaaagtcacaaatcatcctagtaataaagtgaaatcagacccacaacgaatgaatgaacagccacgtcaggtaaggatctaattcgttctccaatcttatttttcagaaaaatgctggtatttttaccagaaataattcaaataaattctggttaaaatggagtatatttggaaagaaaattattttatgtcctaggctattacatgaatgctgaagtatgcaaaatttaggtaaaatatttttaagaaaaaatttaagaagttaataatgaatctaattcataatatggactaaatttttatgcttttcgtgtggtaatatacatcagacttggttctgctaatcttagttttttaaagattatctttccaaggataatatttcatagaagaatgaagcatgtagtttgtgttgcttagtttaaaaatattttgtattatttggaagctaaaactactttttattctgatttcttgttttgtg

SEQ ID NO: 89795 - DNA, 1021 bp, Homo sapiens
tttgtaacaaagaatttctgcttcactttttcttatattgaagatataagaagattgcatatacataaacagctttaatcttgtcccataaaaaagtgtctggcttttaactccgacggtgatggtagattggtcctttagattctaaactaaactgtagaaaaactcagacacacaactgggcataaattaatagtgactcaaggcagtcctcagggtagaggtaatagaattgactgtttctttgacagttcctgggaaaactagttagtccagctttacagattgctcagcttcatgtgatactgttttagaataataaattaaagacattctgtcgtcagagcttctaggccagttaaaaggagaaaaaatactaaaaaccaaaataagattgagtgaagaataatgcagcacattttgaataatgtctcattctgtgccagtagggaatgaactgtctcattagacaatggaagttagttgtatatcttaaatattttagccaggcttttcttttaatttttttttattgcacagaaacataagtgaatggaagaacgtccatcttaccagtgtagcatcaatagtttgacctgttccatgcttccttccagtcttcatggattcaggattcatagtttgaaacagtttagagtagttgcctccagtcatccttggtaacaatgagaatctcacaggtttgaatatgtttactcatgcagacggttgcaaatacttctgtgtgtctactgaagtagacacatgatgccacctttgttctaataccagcagagtatatcattctttattaagaacaaaggctgggtgcagtggctcatgtctgtaatcccagcactttgggaggccgaggcaggcagatcacaaggtcaagagatcgagaccatgctggccaacatggtgaaaccctgtctctactaaaaataaaaaaattagctgggtgtggtggtgcgtgcctgtagtcccagctactcaggaggctgaggcaggagaattgctt

SEQ ID NO: 89796 - DNA, 1022 bp, Homo sapiens
ttcagaagcaagcctcagttggcaaggtacctgggaaatactgttgatctcagcagttttgacttcagaactggaaagatgatgcctagtaaattacagaagaacaaacagagactgcgaaacgatcctctcaatcaaaataaggttggttaatttacttatcgcatgtatatgctacttcgaaagctcttcaaaaagtatctcacatcataattaagtgactggaattttggttgtccaaatgtcccgtgcatgtccccataccctgcccaccctgtcccagcaagagagagcataagtaaattgtgcacagtagaaaacagcatttcagtatctctctaggtcagtgaacatcatactttctgacccactggggctgtttacaaaaggtttctttggtgttaattgtctccttttttctttttcccctcaaaatagttcctgttgaccaaaaagtggcaaaattttaatgtgtcaggtatcttcaccccatagtttataattacgtattgattttcaggttcagattttgagaaagggcagtgtttttttgacctttgatgatgttgaggataatgactttttgaataatatcctaattctatgtttggatatttttccgttagcgcttagttttatcgagctgtttggttgatagtttattgtatagcaatttaagcaaatctcatttgaattatgatacagtttgaacattccaaatctgaaaaatatctgaaatctgaaactcttctggtcccaggcatttcagatgagagatacttaagcctgtactaatttaattatgttaaaggacccaatatctttacaaagaaagctgctttttccctggggacaactaaacatatgtgactattttttcttagtttttcttcctctaaacttcaaggatctgtgtgtatgggtattgccaccaccattgtcttcacactgacagtgaacatagtggagggagaagtaggggctctctttcttaagatgtgactgatgtaaccccataagtc

SEQ ID NO: 89797 - DNA, 1097 bp, Homo sapiens
ctgggattacaggcatgaaccactgcgcctggctattgcagcattttataagtgacataatggcagagtaatgttactaatttttcatattaatttaggtcattagtaatactttatttcttatgtggtaaaacacattaatcatgaaaatattttctagcttagttttaaaaattctttgccatataacttttaaataaacaataatatttatcccattgtgtctgcaaatgaaaactacatcctttagtattgaactgataacgttttttgctctcagaaagttaccttgttcagtgctagcctataatggtgtttgaagtttaagagtggcattgttgtttgactcagcaaggaaatatataggaaatattgtaatgaaaatagaatttcgagtggtagtagattatttctgacttgaattgaagaatcccagaagacttcctagttgaggtggaggatattttagctgggcttggaggatttaatagctttttgataggcaggatgttgctgtgctcctccttccatctggaaagacatgactggaagattcaaaggtatatggcatattttggtgatttagagtttggaatgtaggctaccaaagctggtgggaaaagagtctgggaaaaattatataacagatataaagctttcgatgacttattaaggaggtgaagcttttttgtcaacattgaggagcttgaacatttagaacttggtactggatgtgtggctgagacatgggggcgctgaaagattgtgatgtggccttctagcttggagaataaagcactaagtggacagcagcgccactgacacaggtgcggaatatagaagatcaggttttggggtggaactctggtgggcagagatggttcaagtttcggacaatattgcgagtgacttgctattttattttgtgataccgagtattctggaagtctaggttagagttggagttgagctttgcttgtgtagaatcctgtactctttcctctggttttttcttgtattgttcttgttgttactggttgttattttcatctgcctgctgaactctataccttgaattgtgtttcacgaatacttaa

SEQ ID NO: 89798 - DNA, 1098 bp, Homo sapiens
ataccttcctttttttttttttttttttttttggagatggagtctcactctgttgcccaggctggagtgcagtggcacaatctcagctcactgcaacctccgcctcccaggttcaagcaattctactgcctcagcctccccaagtagcagggattacgggcgcacgccgccacgctgggctaatttttttgtattttattagagatggggtttcaccgtgttgcccaggctggtctcaaactcctgagctcgggcaatccgccctccttggcctcccaaagtgctgggattacaggtgtgagccaccgtgcctggccccccatttcatttttaaaattaataaacaatagaaataatatgaagccgtgttaaactgctgatgaactgctaatctagatgataaacataagtgatcacatttcgtgagtatagccttttaattgagttcaaattatcttgatttgggggagagatctaaaatgaactggtctctaatgagttttgttctgtagaggaacattgtggtgaggctctattatgttttcagctgcagtggataactgacatttcaactttaagataaggaactacttattgcaggtttaatttgtgaagtttgtcaattgattccctcataaatagcttcctatttgtctctaagccataagctaagaacagtatgcttatctttttggtaagagttactgcctgagtatttcatcttctggaaaatgaatttgttgaaataaggtgtctactctagagctgttttttattgcacaaaagagatctatgtgagagacagctgattgagaattgtcattttattttattttattgagacagagttttgctcgttgcccaggctggagtgtagtggcgccatctcggcttgccgcaacgtctgtctcctgggttcaagcgattctcctgcctcagcctcccgagtagctggggttagaggcatgcgtcacaacgcctggctaattttgtatttttagtagagatgggttttctccatgttggtcaggctggtcgcaaactcccgaactcaggtgatctgcctgccttggcctcccaaagtgctgggattacagg

SEQ ID NO: 89799 - DNA, 1030 bp, Homo sapiens
tgatagtcttggtttgtatttcctcatcattaaatatttgatttaatggtaagaaagttattgtgagcactttcacaggtcctccctcaggctgtggggccaggatttggtagctggtgctgagagaaaacctttgttggcatccttgccctgggactgtgccagtggcagctgtcattcaatgggacaatttcttctgattaaaaaaaaaggttattgtggttaaaaaaagattagttttctcaagttcattagtttcatttagtgccgttcacaattgttcgttttctagtattctttcattaacagagcattctgttttctttctaagcaggctgtctgcataaccttctgtgaactatgtgctgatgtcttgtaggcaattatatttgacaagattattctgtatctgtgattgaactccttgaggaatagatgactaggctattctcagtagaacatcttaaactttgaattttactctgtggcagttctcctgggatatggtttgtttggttttgggatgatgtttttgttcagactgactttgggtattgcagagctttttgtttgttggttttccttgtagttggaaaagttatttcaagaagtcagattgttgtagtgctcatttggatttgtggccacttaacattttcttggatgttgtgtaaattttctgatgttaaatttattttattttttttgagatggagtctagctctgtcgcccaggctggagtgcagtggtgcgatctcggctcagtgcatcctccgcctctcgggttcaagtgattcttcagcctcccaagtagctgggactacaggtgcctgccaccatgcccggctaatttttgtatttttagtagagatggggtttcaccatattggccaggctggtgtcgaactcctgaccttgtgatccacctgcctcggccagtgctgggattacaggtgtgagccaccaggcctggccattaaatttttaaatacaaacttaataatttttttttttttttgagacggagtct

SEQ ID NO: 89800 - DNA, 1081 bp, Homo sapiens
tttttgtaaacctacagaaaagttgacagaatagtacaaaaaatacccattatgtcttttctttttttttttttttttttgagacagagtctcactctgtcgcccaggccggagtgcagtgatgtgatctcggctcactgcaacctccacctcctgggttcaagcaattctcctgcttcagcctcccgactagctgggactacaggcatgtgccactacacccggctaatttttttatttttagtagagacggggtttcaccatgttggccaggctggtcttgaactcctaatctcagatgatccgcttgccttggcctcccaaagtgctgggattataggcatgagccactactcctggcccattatgtcctttcttgtagataaaccagttgttatcgttttgccacatttgctttctcttgttctctctatggattgcttggttggttgatgagctatttggaagtaaattgcagacatcctgacatttcatctctaaatacttttagcgttagtctctttgaggttaggatggtttcatgtcattccaacactgttttacacctaaagcaaatttatttttatataattttcttacacttttcataaaagagctctaaaactgtgtacaggtcagagattgtttctagcagcatatactgctagtgcgtggttaagatttagatctttaaagtataatgttagctttcttgttatataataatacttctatgcctacttacgggtaaatatgagtaaaagttttgccaatgtcagtaggaatttttttatgagatcagttttcacaatgtgttaattattaagcactcccactacacagtcactatcacaggcccttggaatttgcttattgaatttgtttacagtattcctatgaagcatgaaagagattagtcaagtggataacagggtggcagtgatctcttagtccatttagtgttgctttaacagaatacctgagactgggtaatttataaagaaaaaaaggtttatttggttcatgattcttgtggctggaaaagtcaaggttaggcctctggtgagggcctcaggctgtt

SEQ ID NO: 89801 - DNA, 1103 bp, Homo sapiens
gctccttgtcattatacatgtatttctcaatattccatattccacagatgagtattatctgttttcgtcccatttctttgtttctcctcttcttgttagaaatttctcaaattgtggtttcagggctctaacagtttagagtaggtgtgcttctctaatgattctaggaggactaactgtatttagagaaaatggtttttggttggttctaagtctgagaaaactgaagaagtgaaatttcctccaactttgctgtcgtgtgcaatgtggcactcaaatgtcttgagcagagccatgcagctcattgttggctgcatgcagctggggctggctgtatgactggcctcccgtgatatgactcaggctgggcctgcgagtatgctagtgaaactgggtcatttgcttcagctaaatagaagactaccctgaaatgcctaacctttggagacagttcttcacatagaaaaaccacaagaagtataagttttacaggttctcttatttgaagagtcaacccagaagtgagaccaggtgctctaaacctgtgacatacaaaacctgtgaaattaaccatttgtctgtatctctgcttcccggctccttttctcccacaccacgggcccttatttcagtgactgaattataacaccatctaagtgacttgcaaaaaaaaaaattacaggagtgtgtgtgtgtgtgtgtgtgtgtgtgtgtgtgtatttgtgtataattagttttgttttctctagagtatgttatgattaatactataggtatgtaagaaatgtaaaaccgtattatttttaatccatcctctaggcactagtttaagattgcttacgatacagcctttttctaatgtgtcttaattagcatatcatactctttgaattgcataattaatataacacgtttaactggaagatatttaaactagtaaccatttaaggtattttatcctagttaagcagccatcgagaagttttgtcacaaagcagtaagagatagaaaaaattatttactacagaactatttaattttttatgtttttgcgatagggtcttgctctgtcacccaggctggatggcagtagtgcagttagg

SEQ ID NO: 89802 - DNA, 1668 bp, Homo sapiens
ccgggaacatcaggctttaatagcagtagttcttcttacatgtctagccaaaaggattattcatattatttagataatagattaaaagatgaacgaataagtcaaggacctaaagaacctcaaggattccactttacaaattcaaaccctgctgtgtctgcttttcattcatttccaaacttgcagagtgagcaacttttctccagaaaccacactacagatagccataagcaaacagtagcaacagactctcatgaaggacttacagaaaatagagagccagattctgttgatgagaaaattactttcccttctgacattgatcctcaagttttctatgaactaccagaagcagtacaaaaggaactgctggcagagtggaagagagcaggatcagatttccacattggacataaataagcatattcagcaaaaaggtctgaaaagcaagggaataccattattttcggattagcggtttattaagctcttctatattaaacactaatagatattcaataacggagtaaactgttccagataaagcaagaatagttgcaagaagtaaattctggcacaaagcgtaaaaatataacagaagaaataatgtaaaatactatcttttatgtctaaagccattttatattacttttcaataaaaagaatatcatggtcaacatagaatatttttcatgaattggtggggagatgtatatgtttatatataaaaaatagccaaatcgttgcaatgatatggtaaaggacacattttttttttttttttcctgtgaaatgtggaatatctcaaattcagcctcttaggctgaatagcaaatcctactgccaactaacctattaaaaatatagatagttttgactaaagtactacattacatttagtatgttgacttttaaaataccaaagcaatttatattcaattaatgcttcttcatacaccaagaatctaccacaatacacagcacacaaaggccgttcaataaacattgaatgaatgaatggtttggctagggccagggtggggagttaaagtgagaggagggtatatgttatagagaacagtggtagaaggaactctccgtgcaagtaaattaagggaaagatggacaccagaaaggcaaggtgatgggcctataagcatactggataatggaagaagtccatttctttctagctagtttgaagggcctaaaagcactgagatgtttttgtatcttccctacatttggagatgatattaggttgtcataacaaccacaaatatagaccattactaaattggtggatgtcctctttctcccattgttattgccttcctcttttgcctgctaaactaaaaattggatataagattgagaatgtattatataatttgcaagacatagaggatgtttatagaatatactaaagtatccctcagcaccaatatgggagtatcctggtctcaagtttataatttttgcacatataatctaaagaagagactttaaaaataaagtacacaaatatgaaccaaagagtagcttaaaaatactttcttctaggtctgaaattttcttttctttctttttttgttttggagacagagtctcactctgtcgcccagggtggagtacagtggcgcaatcccagctcactacaacctccgc

SEQ ID NO: 89803 - DNA, 1053 bp, Homo sapiens
cacaaaggcataagaatgatataatggactttgtggactccagggaaagggtgggaggaggaggatggataaaagactacacattgggtacagtgtacactgctcaggtgatgggtgcaccaaaatctcaagaaattaccaccacagaatttatccatgtagccaaaaaccacctgtttccccaaaacctattgaaataagtccaaacattttatcgtgatgtgcaggtaactatctgggccccacttacctctctgacctcatttctgaccacttctcttcattgtccctgtgtcacagccacaatggacttctgttgtttgaatgcactgaacttaaacccatctcagagccttcttagttgctctcctcttgcctggcaagctattcccccaaatgtttccaaggctaatgtcatttttatgttcaagatgtcagtttcattatctcctcttcagaatgaccttcctagccacgtggccaaagttcccaaatacacacactaaacctctatttactacattgttctgctattatcttcttcatagcacttcactatatgaaatttatcttctttgttttcttacgtattatatgtctctcatattagaatataaacttgatgaggatactaactttaataggcaccagactagaaataaatcactgcattcattgcagtatccctagcacaagaacagtgtctctcaccaagacacttaataaatattgaatgaatttatggacttcagttatattatattggctaccaaatgggaagttatatatcttataactgcagtacaaaaaaataaactcaagataatttttcaacacttatgccttttcttaataatttgctactcaaaaagggccttttgtggttagctttaagcatttgcctggaagagaagcagttctttggttggaatttcgttcctttctgctcttaagggatgaaatacagacctaccagcacataggtctacacatttctctcagtgttagaagcagtgaacagtaatgtcctactatatgtcaggcaccatgcta

SEQ ID NO: 89804 - DNA, 1031 bp, Homo sapiens
acaaaaggccctttttgagtagcaaattattaagaaaaggcataagtgttgaaaaattatcttgagtttatttttttgtactgcagttataagatatataacttcccatttggtagccaatataatataactgaagtccataaattcattcaatatttattaagtgtcttggtgagagacactgttcttgtgctagggatactgcaatgaatgcagtgatttatttctagtctggtgcctattaaagttagtatcctcatcaagtttatattctaatatgagagacatataatacgtaagaaaacaaagaagataaatttcatatagtgaagtgctatgaagaagataatagcagaacaatgtagtaaatagaggtttagtgtgtgtatttgggaactttggccacgtggctaggaaggtcattctgaagaggagataatgaaactgacatcttgaacataaaaatgacattagccttggaaacatttgggggaatagcttgccaggcaagaggagagcaactaagaaggctctgagatgggtttaagttcagtgcattcaaacaacagaagtccattgtggctgtgacacagggacaatgaagagaagtggtcagaaatgaggtcagagaggtaagtggggcccagatagttacctgcacatcacgataaaatgtttggacttatttcaataggttttggggaaacaggtggtttttggctacatggataaattctgtggtggtaatttcttgagattttggtgcacccatcacctgagcagtgtacactgtacccaatgtgtagtcttttatccatcctcctcctcccaccctttccctggagtccacaaagtccattatatcattcttatgcctttgtgttctcatagcttagctttcatttataggtgagaaaagatgatgtttggttttccattcctgagttacttcacttagaataatggtctccaactccattcaggttgctgtgaatgctattattttgttgctttttataactgagtagtgt

SEQ ID NO: 89805 - DNA, 1082 bp, Homo sapiens
ttgtttttaaaacttgcagatagatggacttcaaggcaattgcccaacaaactgcccaagaagttttaggttataatcgagatacatcaggctggaaagtggttaaaacttcagtaagaaaataagttaaattatgtttcaagactttgtttttaagtaagaaacaattcattgtaaagacttttttaaaaaaatattttctgttccaggtgcagtggtgtgcacctatagtcccagctactcaggaggctaacacaggaggactgcttgagcacaggagtttgaggctgtcatgcaccatgattgtgcctgtgaatagccagtacactacagactgggcaacatagtgagaccctgtctctgaaaaatatatatatatatttttttcttttacaaaccagaaaaaaaagtgtttttacttttgttagtttttcattttcatttttcctgcatttgacagctaattatttgtggatttttattcccctttgagaaaaagataactgtttccagtaaggcttctagaaaattccatggaaatctgtgagtacaatcttctatttacaattactgttttaaattcaatgccattgatgtatctggaatttcagtgctgcttcattagctataataaattattttatagtaataaatagaaattattaagtcactaggcagaaatgtgataataataaaatacagcaatcagataccatctaatcttctattttcaaatctgatgacaatcagataaaaaatctcttctaattactaattcactaaataggaaattttcacttcaagaaataattactataaaagcagattggtattttcttgctaacagtaatattttatggaattttaaacccttcatgtgtccattaaatgaaccactaacaagtaaagtgtatttcttcattttattttattttcttgagacagggtcttgctctgtcaccaggctggagtgcagtggcacaatctcagctcactgcaacctgtgccttctgggctcaagcagtccttccgcctcggcctcctgaataactgggactacaggtgcacaccaccacacctga

SEQ ID NO: 89806 - DNA, 1111 bp, Homo sapiens
ggtgtctcgcgttgggtaacaggcctgagctttcggcggagagctgtggaagtgtgcggtttttgtttttgttttcctttatttttattttggggccttaggggtgagttaggacggaaaggagggtgtcttttcgagggttgtcccatcctgtgacagccgagaaaaggcgaaaggagagtggcgaggaaagaggaggagacgtctcctgagggagggcgcttgtggagtctctgtggaaggaagaacactgtagggggagtgccccctgggcgagggagggtcgcgggacgcggcggagggggctcacacgggcgtctgcggacctgaggcggcgacaggaaggggcttgcgctctggggctgtcgcttcggaacacttctccttcagtccattgctgcgctcgccctggctgctgaataaatggtttcggagtgaaaagcatctcactgaagaacttgtctgtgtctgtgactgacgggcggtggaacaccaaagggagggtgtcgcctgattgggactggaaaaattggaattcagggcgcccggggtaggggaacgatgcgcactgctggagacgggcgaccttcgctggccggtcggtgggttcctggttttctgctgccgagtaaacaaacgttccctttcctaacttagcagtcacagagctatttccaagagttgttcttaatttcctgtgcgatattcccattggctatttaacactgaacattctgtttttgaatcaaagttagttaaaatttgttgtcaataagtttaacattctgttcttccgcgtgatggattttcttttggagattcgaactgaagcctgtacggaggaaatggtaagatatatgggatttgcatgagatatgtggggttcaaaataatcctgtggctgaagtggggagaagtgggtgggtccctacccactttagctacaattggggtctgttcagcgattgttggaagcaggatgatgagtacataggggtttattgaacgattctacttttgtatactcttttggggaaaagttggaaaacttttcataatgaaacttaaattgtgcattttctttttgtctgtcctgtgagttgaaataact

SEQ ID NO: 89807 - DNA, 2725 bp, Homo sapiens
ttgtatacatacttccagccacatagtaggtactcaaaaaatgttttctaaatcattgatgaaggaattcacaataataaatataacaaaaatctacaattcctaacaaggagtgtctgttatagataatggattttattatttaaagaaaattacaaaaggtttacatatttagtaattttgtttgtgtatggtcacttttaattggcatcttaacatttcgtttttgtattacagttgtttttaagggaaatgaatagaaacaatccactttgaagaagccatggcgaaatcaaagacaaaacatagactttgttctcaggaatcttcagtatctgccctgctggcaagctgcaccctgagtggtagtaattcctctaattctgatggctcgtttcactataaagataagctgtacagatctgcttctcaagctctacaggcttatattgatgattttgatctaggccaaatatatcctggtgcaagcactggaaaaattaacattgatgaggattttactaatatgtcacagttctgcaactatatttacaaaccaaacaatggtatgcttttattctttgttttctttgtgttcagatgttttgaagcatttgggagatgtactgtagtattgtaaagtttgacattatttttgttactttggagtaaaaataacataatattgagatctgggtgtttttgtaaaatgattatataattctctgtggaacagtaatattcacaagatgttaagagtttgtccataataaagcttccttgaagacaagtttggaaaatgcagttgttgataagtcaattactactttacttaacacttgcagaatgaccctagaatagaaaaagtttgtattcagttcttggagggatgtggtcaatatattccggaagcaaagaatgagaacagctgttctctatgtataatccatgccattgaagggtttgtaggtgagaaaacaagttatttttccacctagtttaatagcatatttttttctatgctgcaaccaatattgagtgaccaatgttactgtgattgtattagtgtatcagatatgtctagatgatgaaagttgaaggaacagtaaattagagaacacaggaaaattcaggaggttggagagaaacgtagaaattaacacagaacgaagaatcgtgagaaaaaaagcacatcctgttttatccacctacacctttttatgcttttaatcaaagctttagtgaggataaggggaaagcagcaaaatgcctcttaaattcttaattctcatttactgttggatattataaaatatttgtatgtaataaacaaaactgttcttcgtttttcagcttttgaaaaccttgatcacaaaaagcactcaaacttcatatcctgtagaagacacaccgttaatgacatagactccatgagcctaacaactgatgatctattaagactcccagcagatggatcattttcttatacttatgttggaccgagtcaccgaacgagcaagaaaaacaagaaatgccgtggaagactgggttcattggacattgagaagaatccacattttcaaggaccctacacttccatgggcaaggataactttgttactcctgttatacgctcaaatataaatggaaagcaatgtggtaggctgaaaaacccaaaacttatgaataggactaataattgcatttctgaatcatctttgtcttttcccaagaaatcgtctttcaaggacagttcagaacacagtcttgaaaagaattacccaagatggctcactagccagaaatctgaccttaatgtttcagggataactagtatacctgatttcaaatacccagtctggctgcacaatcaagacttgctacctgatgcaaatagtcaaagggtttatcagatatttaaagatgatcagtgttcccctagacatagtcatcaggcacaaggaacttctcggcttatcaataaattagattgttttgaatatgcttttgaaccctcaaacttttcaaattccttgagtgatgataaagaattagttaatgaatacaaatgtgattttgaacatagccagtgtcaatgtgagaatccacttctcccaggacaatccacaaagccattcagtggtaatactttgtttattgcttatagttatttatttttcttttttttaaaccaaaagaagtgctgtaaagttgatgtgatatctgggagcttttatgttttgttttcatgtaatacatctttttggaatgcttataatcttcacatacagcattttgtaactagaaaatgtcttttctcccatttttttctttgcttgaaatgtcacattttaacataatttgctgttatagatgaatgtacattccaaatgatcagaactcttgttgactttgtgagattttgctatgctttacattaatttttttcttcaaggattaatagtcatcttttacaattaggtgacaaaattgaattgcttatcttgaaggccaagagaaatctagagcagtgtactgaagaattaccaaagtccatgaaaaaggatgacagtccttgctcattagataaacttgaagcagacagatcatgggaaaatattcctgttactttgtaagtaagtggcaatggaaaaactgtttagttttccaaatgaaaaatgtcatgcgaatatctgatttatatttaaacgaacggtaattaata

SEQ ID NO: 89808 - DNA, 1103 bp, Homo sapiens
taggaagtactcaaggtagtattttaagtggtagagcaaaaccacaatcagatcattgcttttttaaagaaactttttattatggaaaagctcaaataaattacgaaagtagaatagcataatgaacctctgtgtactcttcaacaatctggtaaatgttttttaataacagatgggtggctctacaaagtgttagcaaagaataggggaaaggactacctgatagtatgaaagagcttgtgaattagaaatcaaatatgtcaataaagaagcatgcttattaagaaaaaacatcagcattctgtaaatgttaaaaaaagattcttagatatctgagttcttgagttacaaacatacctcatagtgttgtaagaataagagagaaataggttgaattcatttttgtgattaatagaatttgattctcggagcattcttatttttggtggggataccctttcttctactaccccgtgaatatcaggaaagaaatgggtatttattaaatgtactaggtacatagaaaattaattcagtttatgcaatatgtctgtgagatagatgggactacaaatgttgaaactgaaattcagataaattacttaaggtcatatagtgagtgggactgagattgcatgcaggaatgttaaatttcagaattctcttcccagaataatctgttctttatgttaataccagttataaaggggaagtctgttctgttgccttcaagtaggagaacatttaactgccattctagtaaaaacttttaagagtttatggggttgttgattattagatggtaacaatgtttaattggaaaaatgtactgtttatttcaaacaaggtgagcttttggagcacagtctgtagttcaggccttgtttagctgaatgttaatatcttcagtttcttcatagtgttttcttaaagcttgaagacagaagcagggagataagaaggggttggattctggtatcagtttagggagaagataagggaattaccatacaacattaatatgaatcatatccatgatgattatttcttggtgactacttgtatttaaatgagaattcttaaattatatactgtttactttt

SEQ ID NO: 89809 - DNA, 1012 bp, Homo sapiens
cttctggtagttatattcgaggaggcctagaaaactttttcaacattagattccttcacacacctttctcctttgaaatttaattttgttactgtgtgttcattggctgttatgaatacagttatatcaagttttattttagagccattttattttttcaatttgtgtatttcccgggaatttgaaaatctgtttctgttttaggctgccattctatatgatgaattttttcccacaaaagtatagtgtttaagaacatagagtttatattttcccaaatatgattgtgaattctgtcacttactagcaagtgcaatatttgtgcaaatcatttaacctctttagtttcagtttcctatttaaaaaattattgatttttaattgacaatatatatatattttgggtgtacaacatgatgttttgaaacatcatgaaatggctaagggagctaattacctcacatactttttgtggagaacatgtaaaacctgctccattagtaattttcaagtatacgatatgttgtttttaattttagtcaccatgttgtacaatagatctcttgaccttattcttctcgcctaactaaaatgttgtatcctttgaaaaacatctctgcaactcccgtccccacatccagattctacatataagtgagattattattcagtgtctgtctttctgtgctgggcttatttcatttatcaatttccttttctgtatagtgaggttgttgagaagacaaattgagacaaactatataaagtacttagtatagtgcttggtacatggtaagtgctcaataaatgatggctcattgttttattgttattcagtagatctgtgaaattgagttttcattacaagtgagtggatcagcttttgagaaccttcatagtctgctcatttgagttgtatttcttaatttctgtccttacattctaataatcataacattaatatgtagaatgtaatctatctttctttcccctctcattctaaacatcattg

SEQ ID NO: 89810 - DNA, 1212 bp, Homo sapiens
tgtgccaacatactagaatgtgaactgcaaggacccacaatatatcctgaagtcttactttcgccttctggccagcaaatgtctaatatttaaagatggatgacttctgttcttgaagcttacctggatttaaccttcttcagcatcctcaacattttattacctggttcaggatcattaagaaacttactggtttttatccaaaatcttttacgttaaatagacttttttaaagatatagttagcatcacttttaaacagcttaaaggaatatcaaaattgttattgtgtatctcatctataaggaagtctgttactttgaaattttcataaatttaatatttaagatacattgtatttgaaaattgcattaatagtggggtgatactgtgttaaaaggaatgttgtgttgtgacattcaagagaacctcctcatttaattagtactttgattctgtgtaagataatcttggtagtgcttgacagtttccaaacctttttttggagagatatttaagaatttaatattttgatattagattgtttcccagattttaattttggggttggctcaaactagtgaaaactatgactcaatggccaattgctttatcaaatttgataactaaaacttaaaatgaatatggaaaatcagaaagcaactctattttagagctattttgtaagagttgtgctttctttaacaccatctgtagtcttaagtttgtctctagctagaactgaacaaagctctataatttttaccaagcacttattattaatacttcttataagtagtaagcatctttactaacacaactgagaattaagtcataaaacataactaatacagcacattactgcctgacaaaattaaagagtactgtgtgtatgtataactactacaggttaacacttcacccaaatgatagcgtttttcctcagtagattattgtcaaataggaatttctaagcacattgagtcaaagcattttttccaagttaataaagtgttatttactatctttgttagaggtgacatgtcaaacactacagtgagctctgtggggttttttttttttttttttgcccgtgagttttttaccatgctgctctgaccagtttgagtggcaattaccaatagatttgttttctttattctatggagatgtttttaccactgacactgttttctgattatagtctgcttca

SEQ ID NO: 89811 - DNA, 1117 bp, Homo sapiens
aatggaatcttaaaaaatgggagtgttgggaagctagcaatttgatgttatttctcaaaataattatatcaccaactcaagtggcagagctagacagtcatttaatccagtcataattgtatacagttgaggaaactgacctaggacggttaaggaactagcctaaagtcatattgctatgtagagtagagctgaatgaatagaacattttcattttttttaacttcacaaggttaggggtccttcccagcattctctgatgcctgtattagaagcccacacccacccaatgcctgccgggttagggttctcctgagagcaagggtgtttcgggaataggtaatggcgggggtgggagcagcaggaatttgtattgagcctctcctgcaaaggaatttaaatgtatggcattgattttgaggtgataaaatatttaaagttcttatttaagtttttttttttctgactattacaaaagtttatttcacaaaaagtctaatatgaaaatgtacgtgacctaatttttacatcatagtaaaacaggctctatggagagaggacatgggtttctctgctgaacagccattatttatactcgttccaaggcttctaacatgatgatactatttcctcgtattaccaccattccaatattgttctattgaccactagtcgccatctccacacattcgtctatcacaaggttcataaaaggatcaaatccccgcaatattccttgcacatgtctgccaccatttaatttcaatgataacttcttgtccataaattttttcaactcgggagggtgagctttgctcatggtgtatactccgcgggctcacggatgccttggaacggaatgcatggcttccctcatgctcccgcggtaggcccggcgtctctatttaaattttatctatgggaccagtaatgtgattttcccatcttgttttcaggataccataaaacatgttttttttcctgttcaattttccttgtatatttgttagctggaatgaatcatacattgtaaaatctttgaggcaagggtccgtgtcttctaaatttactaactcttcccagtgtctgttatatactaccttctcatacatctctg

SEQ ID NO: 89812 - DNA, 1003 bp, Homo sapiens
tttgaaatcaaatgataaatctttccaaaaattcttgaagtgagtttatttaatccaaacatttatataacatctcagcgcatctgttttgagtgagtaaaattataatattttgggggctacttctaattttcagggaaatttagaatgtgtgagggaacaaaatcgaatgtagtggggaaagcatattaaggacatttataacagttttcagcagaaggagaaatccgcaagctatgtgccaagctttgctgacagccatcagtaaggagaaatcactcttaactgccacagcatcaaattattaatagataaatgggctcctttcttgaccaatgggttttctacactggaattgggtgctgaaggggtttacagagtctcgagattctggaatagtggatgaggatggagaaaaatggttttcagacctggctgctcttctgctgattcctactggaatacttaagcttccgcttgtccaagacctacctgcctgaagacactctgtttcagcttatccagagagtccctcgagttggtatttgtaaacttcacagggaatactgatgatccccagtgtgggacccactggattatatacacactccagttctgatccaggattgcttggcggtgcctggatcaccaacctgcgctgctgtttctcaatgattttcaattactcagtcctgatctgtgagcacatgtgcacagaagattggctgttggaactttgtcaaataacaaacatttctataaatcataaattactttatttgtgagaaattatttctgagaattattttttagtcaagattgttttggctattctgtgtccctttcatttccatagagtttttaagatcagctagtgatttttgcaaaaaggcaaccagattttgaggaggaataagttgaatgtgtagtgttgtggcattgttttaaagattaaatgtgttaatcattagtatttagtgcttagactaaatgataatagact

SEQ ID NO: 89813 - DNA, 1051 bp, Homo sapiens
caaaaattaatgaacaaaaaatttaaaactgaaaaacatctatccattaaattatattttttcctataaattagaaaaataagactacagttacattcaccccacccccagaggaaaacagcatctttattcaagttattcttacttttccttctgtatttttttttaaaaaagctttattggaggtataatttacataccataaaatacatccaagtgtataattcaatgatttttggtaaatttactgaatggtgcaaccattagcacaatccaattttagatcacttcatcattccccaaatatccctggggcctgtttgcaatcactcaccgttcttaccccagccccagcaacccctaatctattttgtctgtttagatctgccttttctggacatttcatacagatggaatcgtacaatatatagtctttagcatctggcttttttcagttagaatagctgttgaggtttattcaggttgtcacatgtagctgtagttggttcctttttattgcttaactaggatttattccatgccatggctatgccgcattttgttcaccatttggtagacctttctgcaaatacttttgcatggtaaaacagatacattggtgcagcttctatggtagcataatgtgagaataactgatatgagccaacctcttatttggtgctttgactctcttctatgataattttaaatatgaatgccaagagttaaacatccaggttcctattaagcagtggtgttttctgtgtgtaactctccaacaaaccaatgttaagaacttcttaccttggctgggcacagtggctcacacctataatcccagcattttgggaggctgagctgggcagatcacgaggtcaggaattcgagaccagcctgaccaacatggtgaaaccccatctctactaaaaatacaaaaatcacctgggcgtggtggcatgcgcctgtaattccagctactcgggaggctgaggcaggagaatcgcttgaaccagggaggcagaggttgcagtgagccaagattgcaccattg

SEQ ID NO: 89814 - DNA, 1028 bp, Homo sapiens
ttgtcaggacccaactctttgccgagcgctatgctaggtgcatggaggacaaggggctcactgttgtgtctttgaggaatttaaagttttgtggatgacattacaatcttccagggggcaaacaagggtgctgatggtgcatgacctcttagaaagtgaatcaagtgtcctctttttaaacacagccatttagtcacaaaagaaagcttagtttgaaaccagtccctctctgtcctttctctgctgggtaatctaatttgaatgcaaggaagtctggcagttgcaaatgctagctggcaatagaagcgcattttcattgacttcctgggattctttgcctccctcaaatattttggatacagagaacatggcacagattcttcagtcggtgctaatgatgagagaactgcataatggagactgtgcctcatccagacagagagaagtcgtgcggatgaacgcagcccgcccaaaatggaggccgcttccaagaacgccaggctagcgactacgagcggcaaagactgtggcaaccagtgtcgcagcgccaaagtcggtggagtctgccaattgaagacaattagcaagtgcgacttctcaattgtgttgacagatgagggagaaaaatcaaatagatgtgagagctgtgtttatcctgctgcagtgttttgcaatattatgtctattgatttgctttttgtccctgagttattgggtggatggtgcgctgctctgcctgtcaacccggcaagcttgccttcacagctgcttgtcaagtgagaatttctacacaaatcagcccaacccgtctcacaggggacattaggccaaagatactctgttatgatttaatggaaaggaaaaaaaaactgtagcatgtggctcaattttctttttataacaattggttatagcgtttggattctgtaatgtggcgcagcccgctgtaattggttttgcgagcattctgcaatccaggaagttaggctggggttgtgtgtggctgttatttgctgtcatgactgacc

SEQ ID NO: 89815 - DNA, 1001 bp, Homo sapiens
ctcattgcacaaagaaataattaaaaagaccttaatgaaattagtatatgtggtaggcagcctctgtgatgaccctcaaggaccccagactcctaatatacacacctctgtagagtcacattcctcgagtgtgggctggaaccagtgacatgtttttaacaagtggaaaatagcaaatgtgatagtatggcactttccagataaggttccaaagaaactttggtttctgtcttgcctgccttccccgcctcctttctctgagccttccctctaggggaagttcctctagggaacaacaactcatatgttgtgaacagccctgggaagagacccatgaggcaaggaactgccagtccaagggccccgaggtcagctgtgggaatgagctgggaagtagattcaccccagttgagtcctcacggccctggccaacacttcatggtagaccctgagccagagaactgaactacgccaccgagattcctgacccactctagctgtgagattgaaaacattagatgttttaagccaccaaattttcaggtaatttggtatgcaattagataactaatacagtatttaattatggttaaccattcagaaaacaggcaggatcatctgaatgcctctaatgatgtttataacattttccttttgtaagcttgaaaaacatagatggttcatttcagacagaataattgagttgatactaagtggttggtccacttgctccatgttctattgtccgtctttgatcacagtgagtctggctgatgattagcaatagatccagagctgggccaagatttcacagctagatagatgtctgataaactaaacagtgtgggacaagtcacttagcctgctgtaattctcaagatgatcagggaaaaactggtatcctcagtggcttagtctccaaagttcagcaaagttctagtaattactcaggaaagaactaagcttttgcttcactatttgagattgtaccttccctagtc

SEQ ID NO: 89816 - DNA, 1617 bp, Homo sapiens
atcttttgcatccaacaggcagaatatgatctgtgtccaaaagtgaacttgagtcaggaatgaatcaatttcagcataaacaagcacaaaaatttagtctgctggctgactggaagcaaaaaagtcaagatggaatatgatgaattccaacacaatggggcaccaaggcctttaggcctctctttttattttgctttggttttgtttgtttttctttagagacatgctctttctcatgggacttgaagtggactcatctttgtgcagtgctggttttgccatactcatttcaagtattatagacatatgtaatggtgaaaatatatgaactgtggcctttttcattcttgttacttgtgatgcaattaagtgaagataagaaaaaaaaaaaaaaagcagagatttaccatgtatcagtgcctggctttttgttataaagctttgtttgtctagtgctcttttgctataaaatagactgtagtacaccctagtaggaaaaaaaaaaaactaaatttaaaaataaaaaatatatttggcttatttttcgcaggagcaatccttttataccatgaatattacaaaaaaattgtcagattctgaatatttcttctttgtagatttttggaatcattatgagtaaaagtttgttactttattttactatttaaaagatgttattttaccatgtgttaccaagatgaaactgtatgggtagcttttttgtttgttttttgttttgtttttgtttttgtttttgtttttagttgtaggtcgcagcggggaaattttttgcgactgtacacatagctgcagcattaaaaacttaaaaaaattgttaaaaaaaaaaaaagggaaaacatttcaaaaaaaaaaaaaaagataaacagttacaccttgttttcaatgtgtggctgagtgcctcgattttttcatgtttttggtgtatttctgatttgtagaagtgtccaaacaggttgtgtgctggagttccttcaagacaaaaacaaacccagcttggtcaaggccattacctgtttcccatctgtagttattcgatgaagtcatgtacatgaccgttctgtagcaataaatgtgccatttttataaactgtttctgacacttgtttcatttcattttgcattgtccatatagctatgattctcttctgtaagtaaaacgcatctatatttcattttccaagtgttggaggtattgacagcttaacaaacaaaacatacaaaaaaaatcacaaaaacaaattgaaaagcaaagcacatgattgatcaaggaagagatgcccttaatgaaaatggaacgggatgcatgcaaaacaaaaagaaaactgtctagaggattaactaattgaaggaatataattaatgtgtgtgtaacactgaagctatgcatttgaagagctctgaactgcaccagtgttttcggttgtgctgcaggttgctaagtcaagtcagccttaaccttttgcaccagttggtcggctgtttggcagaacattctcagatcttttcagtcaaaaatctaagatgatttattttgtatcactttgttaaaagctgaatattgttaactacagttaatattaacactgtatttatact

SEQ ID NO: 89817 - DNA, 2746 bp, Homo sapiens
ggtgtcctcagagcctccccctctctccttggccggcccacaccctggaatgggagacgcatcgaatcacatgggacagatgtaaaagggcaagtttgttttcagccatttctgagatcgatcattcaaaactctcatcagtgtatcagccataaaagtgaatttcacccaaattgacagatattttctttcatggaaaaagaattttttttaaaaaaagcatactttttctgttacaaatatattaatgaattttttctctcttttttcctttctcaggtccaagttgccacattgcttcattaaaacaagagaccacttccttaacagctgtattatcttaaacccacataaacacttctccttaacccccatttttgtaatataagacaagtctgagtagttatgaatcgcagacgcaagaggtttcagcattcccaattatcaaaaaacagaaaaacaaaaaaaagaaagaaaaaagtgcaacttgagggacgactttctttaacatatcattcagaatgtgcaaagcagtatgtacaggctgagacacagcccagagactgaacggcaatctttccacactgtggaacaatgcatttgtgcctaaacttcttttggaaaaaaaaaatataattaatttgtaagtctgaaaaaaaaatatttaatttaaaaaaaattgtaaacttgcaataatgaaaaagtgtacttctgaagaaaactacatgaacgtttttgttggtattcaagtcagctagtgtttataattactggatattgaattaggggaagctcggctgccctagtaacaaaaccagcaaacgtcctgatgacaacgaagtgatgacattagccattccttagggtaggaggaacagatggatcttatagacctatgacaaatatatatataaatatatatataaatatatattaaaaatttagtgactatggtaagcttttgttcatttgtttcagacttttttctcctgtaaaaaaatagtactgattaacttttttaaaagaaagattttactgtaaatatggatttttttttttttggtcttatttctgtccctttccctggtttgttatcgtaacctgtagtgccaactctgcttccagaggggtagtgcaggatgaaatgctgaccctgatgttgcttctcattcataaataagtagaaagttgtttctccagtcttttgggaacacaggacttaaaagtcacatcatgtgtagatattacaagcagcattaccaagacatggcaaaaagagtttgtctgaattgtaatgttgcgtttgtgaacctattctgggattttcagaggtacaaggttagaatgctacaatgttaccactgtgccttccaatgtttatatcatcggaaacataacataatcaaagtggctgtgatttaacaaaatgattaaagtgttacctacctgtgtagccgaagtagtgtgcagtgaggcgtttctgaatacatggtcagatttttggaaaaaaacaaaaacaaaaaaaacaagtaaagttcaaaaaccgtcaaatgagaaaattgcaagtagtgtgacagagctgattgattttgttgctttcttgattttttttttcaaaatgggtttactaaaatgtagatgacttaactgcctcctccttcgtctgaaaaatgccaatattcaatcatcatgcagcattataacaagccttataagtcctaaagcattaagttgcacttttttgaggaggggtagtgcagtatttctctggccagtatgaatgaagtttatacttaccatatttgatagaaacatagatcaagctatggcacagcgactcatcagatagctagctttgacgtctgggcacaattgaaccaacttccatcgtgaatctttataatgattgactttggtgtatagtgcagtaaacaaatagtgctcctagttaagtatttgtcagcatccttttgtctctaacttgtttctatttttacagccacacaattcttggcatgtattaagaaaaaaaaaaatccctgttcaagtagtttttccacctatcagcactgagtaaatgccataaatccattgaaatggtctaaatgttccatctgttctcctgttttgccagttatatagtaatgaaatacatttgtaaattttatgcaacaaatggcaaacgtatcattattttgaaattgtgtatgtaaaagttatatttttacatgtagactcttgttattatgtgttttaatacattgtatcagtttttgtttttttttaaaaactgtggtttaaaaagaagtctcatttaaatgaaatagctacaagaatcagaattttatgttcatttctgaaaatgtaagaacaaataagatagttaccacgtggtcatcttttacaaacccataaacattttgattagctgtgtgtgtgttgaaaaactgtaaatatgttcagtagcgataaaactaaaataactttgatttgttgataagttcctaaaatgtggaggtggattaaaaccttaggagaatagcagaaatcaaacttcatgaaaagttattttggggctttcctgtgaaatgtatgaacaaagaggctcagagaaggacatggaagacaataatgtatactctctcctcctccctgaataatgaaaaccatgtgtatttgttccctccgtatgttaaagatttccttttagtggtacattctgcactcattttgtatagtctaccaa

SEQ ID NO: 89818 - DNA, 1007 bp, Homo sapiens
agaagccgggcatgcagcactcactgtgaagcaggaaatgaggcttgtccagaatgccttgctctggtggaaccaaactgagtttgagaggccattcctgtgtttcagagcactttcaaaactattttctaaataccctgttacagaatttcacccaagctattggtggtcaacatcatctttcaatagctactatcttgtttttctttaaattaggatatttgccttctctagtgttctgtcatctctcctaatctccacaactatcaagtatttcggagagcagattagcaacctcaaccgaaagttttgaactttatcaatatcatactttatttttttaaaactgaaaaaaaaaaggacagaaaggtaaaagaacttgaagaaattcttttagccatggatgagtgataacagctgagaatccttgagcttaccatttgatatttctatattaatttaaagaaaagtcaaaagattttgaaaacagcaatagaagtaagatcctttaagctctattcagcagcccctaagaaaagtgatgaggacactgtgcatgcccatatgtgaacatggttggccaccttaggtatttccccttctctccacatgaatacatattttactcaaattcagactctatgatgttgaaacagtctggcattggatgtttacctcaaaaccctgctctctctgcacctaggacaaacaaatcctagttctctggtgtttagcatcttggagccatgaattttaaataaatcaaagacaaaaaccttgtctttcccagttttaaaatataaaagatacacacacacacacacacacacacacacacgtgtatttaaaatagaccctataacctcatcatattcttacatccttacatggttttcttcttaaattgtggaggaaaaggcaggcagacacatttaatagcacagtgatcatcattttttaaatgaactgttacagggacataatcttaaactatccataatttggaa

SEQ ID NO: 89819 - DNA, 1092 bp, Homo sapiens
cttatgttgagctcttccaatctgcaacaagtcttccagcaagacaaggctgggcatattaccagaattcaccctgtatgttctccttcggaacttttgtatctctttgtcttgtccagccctatctgcttatctctgtacacctaatacccacccattctcaaagcactgactcaaatcattcttcttccaggaagccttcccttgctaccccactcatgctagccatttttttctctattcttacagccctatgaatcataccatttctagatatttatcttaaccagctccgcatagctgtgcatcttttatagatatgactctgccttaccaactgttgtaaattcctcgagtctcacatattatattttgtctctctccccccgacccctgtaaatagatcatccatagaaacgggagaaaagaaacgaggaaacttaacattctgtgagtgtgagttggcagcccctctgctaggcgctctgcatgtgttgtcttaggcagtcttcacaacagcccagtgaggatgataatagtggtcatttcaggtgtcggtaaagtgagccttagaagtttgagcagttagtctcaagtcctgcagcgggatttaaactcaagcacatcaactccaaattcaatgctcttttttactaccaggcatactctccagagattatctatgagaacaccttttcagaacttattttaaatgctaggagcttgtgattttcaaaacttgataagtgttggttggcaaaagaagtttccaggtattccatggctgggttcccagagcagctctcttcccaaatgtatagacagagaactttccctccaaagtggtggcatgcttggattaaaacccacattatctatgcacttattcttaaaccaacatgtttgcgctgagtgcctaagaggtgtgaactctccctaccagggtccttgaggtagcaaattttaagttatcaagttatttttcttactataaccacccacttttcttccaaaattaaagcagaaatctctgaatgtgggagaataaggaaatagccaggtcttcactaccctagttagaaactcttacca

SEQ ID NO: 89820 - DNA, 1052 bp, Homo sapiens
gaggatgaattgctgggtcattgttggtgtttgaaattattcattttggtgaccctggccaaagtgtacaatttgagttcatattataatatgacattgctagtaattcaaatattagtgttttttttttaattaaagaagccaaaatagtgtctgtcaattctgagtctgggagatagaaatatatggtatgtttatttgtataaatacattgcatgtgactgtgtaatttaatagagtagctttactactacctatttagaataagtctttatttgaattatatttaagcagatttgtccatattacaattgtgatttttttcctcattacttttgaaaggattttggagataattctttttgaggatgattatgaagattcagagactcttcttaatagaatattaagtgatgacaattaatgaggtgaccagagtggtggagaatgtaacttgaccagtgattctctgtagttctgatcctcacaagctctacctcgtctctaagcaccttagtgtcctattttgccccttacaggctcgctaaaagttgcttggatgaaggtatattttccattatcactgtagcatttctcgtttaagcatggtcccaaaaggaaatgcaaaatacatacaaattattatgaggttcttttaagttcttgctcagtagtattctcctgtccatctttcagtttctcttaataaaagtctaagattaagagtaccattctgaacggtgtagtattgaaatctgcaaccaatttgaaaccaaaaatactggtttataaatagaagcaacgaactcacatctaaaatgtggaaagatatttttgaatgccaaagagaaatctttttttctttcccttgacctctgccctaaaaattcatcattgaataaaaattgtttatatgttcatggcagttgcttagagtttacaaaagaaaagtctagattttaatttagcttggcctcaggtaatgtgttaaatacacttgggatgcatataatatgagattttcgtttgtacagctcttttttttctaacta

SEQ ID NO: 89821 - DNA, 1438 bp, Homo sapiens
cgaattctatgctatagttggggctttgaactcagttagatgcccccagtgaacagttgattcaagtgtttgtgattcttcagtcttaaaatcttatactactttagttgacagaatttatataatttttttctgtaaccattttgaggcccttacacgcataccaccacacacccactggttttgatgacaggaagccagaaacaccggtaaaaactcaacaagaaattatcatccatttgcttttccctgtctctgatttggtacttagcactgggtcatataccacagggaagaccaaagaaatataccttcaggaaaagaatttaattaagaaactataaataggtcatctttccagtggtaattgtttaaaactctttaacttaatacctgccagaaagttccttaaattcagtgaatgtttttctcttctaaaataaatttaaattgcctttcaaaaggcagtaccgtatatagcacatgtatgttataatgtcctggaataattattgaatttagtttgttcatgaaaaataacactataattttaacattaacacgttctaccagttttctggaaacaacactatttgtattattgttttaaggaaatacattttattggaaacatgtatttagaaacacagtgtgttttttgtcgactaaaattttacttgtataatttaggcaccccttttgaactaaatcaaattttacatcatttgttaaccaacagcaaagccgaattgaagatcgtttagaaagactggatgatgctattcatgttctccggaaccatgcagtgggcccatccacagctatgcctggtggtcatggggacatgcatggaatcattggaccttctcataatggagccatgggtggtctgggctcagggtatggaaccggccttctttcagccaacagacattcactcatggtaagtgatgaaatttatagactctatagttatcatatagagttagaatttcagatatagatactattgttgctgttttttaaaaaatcagctttattgagatataattcacttaacatacgatgagcccatttcaggtgtacaattcaagtgttttagtgtatttacaaggttgtgcaaccatcaccatagtctaggttttgaatatttttgccccctgcaaaaagaaaagaatccccgttgcccattaagcagtcattccccatccctccacttccagcccttggcaaccacttgtctacttcctatgtctatagatttacctattctggatattttgaatatatggaatcatacaacatgtggtggtcttttttgactggcatcttttacttagcatgactgttgcagtttttctacagtttgccacgtattagagctttattcatttttattgtcaaatagtatttcactgtatggacataccacattaca

SEQ ID NO: 89822 - DNA, 2579 bp, Homo sapiens
aatagctacctagggcatgtttgtaccctttggattgctactgaaggtttaagatagctatatacctatacaccaaaaaataaaaataaaatatcctaagaactatatatttgagattcatcttctctgcatgccgtaatataattataattccaactttaattctatttattgtatatgttaaaaatgaaattaaacattttcaatctgagattttttaaaattaatacttctttacatgcttttaaaacttgtcaactttgtaatttctcaagtacttttcaccccaaagtttaggaacaatttaactttttagttggttttcatagaaaaaacagttagaagacttctaagaaatgtttcctttagcagtaattaccttgcgacttgacataattcatggtagaaatatactctgttgttcttttacagttcaatttttaccaagaacactttaacttttttaagtgtttatatttgtttgacaatatagagccacttgggaagaaatgatgactgtcttctgatgtaatcagctaaccaacacaaagatgaataacacaacaggcagtcattttcaagtatatgaaaaaaccctattctataaggcaaggctgaatgcctcagaaagtcatggttgtctttgtcctttacagatggccatcacagcagtgacccttggagctcctccagtgggatgaatcagcctggctatgcaggaatgttgggcaactcttctcatattccacagtccagcagctactgtagcctgcatccacatgaacgtttggtaaggcagacatacacggtaacgggaatgtcacagctagttgattaaacctcgtcctctgtctttccatgcatatacacaaggactctgcaaataagtgcaaaaatggcacacacccattattcttaagttgtattgtttctgtgatcaaagacataacaggttcaaatcacctttgtaaattcttccagattctctctggcattgttcttttgtttattgtgttttgctctgtgccttctttatcacaatgtcagcttccttgggtacataaatagatacctatttaagttgtagaatcttaacatggtggttcctggtttttttttttttttttttttttctatctgtagtttcaaaagatgtactgcagagggcagagtgacagtcggtagattatatgcatcacccaggagcatttcatttcccattgactggcctatgtcagctttggcctgttgtgatgtatccaaaagaaggagtttgtattttctgtagacttccatcagtaagagaaaccatgaggtttctacatagatcagattcccatttttcagtattttaactttaattcccatcccagcctgccactcatactgtgttttgcgtcactccaggtgaaaactggtgggctctagaatgttaggtctttcattactaaacatttccactctgtccatcacctacattcatctatcatagtatgtctctttatcctggaggaaacaactcagctgactttcttctagccttaaatatcaccacagcccagaatccactgttgaacttaagtctgtcattaaagagaggaaagagcctagatcttgagtgagatttgggatgcagataagatgaaacttgaatcccttgtgcaagaacatagcttaaacaatatgtggacctcacatcctacaaatgcgaaagcatatgggaaatccagtgatcccaggtgatacttacatcactactattcatcttgcatttgcccctttttcttcttctcatatctacacttaggtttctttctctgttctgataaaggaaatcattctggattcatgtggtctttgctctcttttgctcaaccagtacagataagaaacaggatctgatctcctactccaataatcaaaaaaattccagaagttaagatttctgatatccttgaaaatccgtatttagttggtcctagtggtagagatgctaagtagtcaattagcctatacattcctgagaggcagacagtggaaatggtattggcctttttgtatcacctcccaagattgaatgtgtaaatcacaaactatctcacatttcagcacatttccagtaaatagcagatgacttattttcaaattttctcttttcccacctcctatttggagatattagagtgaaagcttagagaaatatcaactatatcaactattattatgctagaatccgttttggctaaaattttcatttctgcaccatcattttccacttctgtgggaactcatggtcaaaactgtatgtgtcctatgagcaaggaaagttttgattacaaataaaagttttaggcactataccgcatgttggaatttcagttcttttaagagttgcccatttgacattaatttttcttcccttctgtgtttctttctttcttctcctatcatgctcaagagttttgagttaggcgatttgattttatcctagtccagttcactgcatgggaagtagctttaaaatgtgcttccatgcacaaaaagtataatttcaaaatggaaaccaactatattccttt

SEQ ID NO: 89823 - DNA, 1076 bp, Homo sapiens
ggccaggctggtctcgaactcctgacttcgttatccacccacctcaacctcccaaagtgctgggattacacgcatgagccaccgttcctggccgatattttattttcttaaaaggtcattatcagatgccacaagagtatttctataaactatgacccaagtatagcctaatgttaatagcttaaaataggttttatttaccttttttgccctttaaaagcaaggaattattttttaatggaaagaacatagactttgatgatcagttcacatccttgctttaccccttgaaaaatgtgcaacctggaaagacagcttaacattcctgagtcacatttgtccaaataatacaaacaatggcaacaagacttcagcactaatgtctgatgttttttgtatgattaatctgtgccaggttccattctagtttctttacacacattataccatctaattctcacaacaactttgcatagcaggcattgtcatttccactttacaagcaggaatctgaggaccagagttaaaagtaactggtccaagattgcctagttaataaatggtggaatttgcagtcagacccaagctggtttgggccaatacacttgaccttcttatgatacgtcagccttgtgaaatagggcagatactattaataatatccaccttgtgtgatcattatgaaggttagatataatgtatgtggaactcttgccaccaaagtggttccacaagaggccctaaacaaatgagtaatcattattattttaaaatgtccgtaagtgaaaccgatatgccaagaccagtaaaaatgagagcttcttaaggaaaagagtaggaggcatacctttgtttcattttgtttgttggtttctgtgcttgctttttgttcttttctgttaggcacaggttttatttagaataaattaaatttttttttctttgatgagtgcagaaataatagttggaaacattgaatggaacagctaatgtaccatagtaatacttcttggattaccaaaaaaaaaaaaaattaaatctgtaaaatgaaaacatttttgtttactttggtcagt

SEQ ID NO: 89824 - DNA, 1052 bp, Homo sapiens
cttacaccatgacttgagttcctgctcatttttatccctgagctctgcagacttctaagcagtggaagttttcattctctttcccacattgcactcaagagagctaacatgagagattctaaatcctgggattcctctgcatctggctttaagtacaggagcagaacacagggaatttaaggaacaaaaatagccagagcttcaggcttcttccactgatggtaagtcattgacatgcacttggatgaaatcctgtatctgttctttggactagcactatcgcctgagattatcagtttcagagagttacagagaggcagtagatttcatctttcctatttcaggaggagttattttggttgtttaaaaaaaaaaaaaacactttaatgtacttttcctaactccttcactcagatggtggcaagaagtttgacagaataaagtaattcagctaatatttatcaaatgcctactatgagtgagctgttagaatataaccctgaacaagacaagcatgagataggcaaacagactattaaaacctagactgataatgcattgattggggtgtacaggctccttaaggtagatatacaaaggacaactagtccacatttggccttagaggaagtgaagtgcaaggatgaatgggaattaagctggcaaaatgcaagggttataactggaagcaggggtgagcatggcatatccggtgacccagaagtagttcagaatgccagaagcttatggtacaaaaggataacataaaagatgagactgaaaaggtaaacagtggcctgatcaaaaagcgacttgtgagccctattaaggagttgagattttatcatgaatgtgacgaggagcctttcaaatgggtatgcctgagaagtaattgaatttaaaagtcaagacggataggaggacctggaaaacttagagtcagagaagccaagggaggcagatctgaccagaaggaggaaattgtcaacagtgtcagatgttgctgaaagatagaagtgacatttggctgcagcatccaggaggtcttgagc

SEQ ID NO: 89825 - DNA, 1030 bp, Homo sapiens
ggatgccagcacaatgcctaatggagtgaaaaattgtgcttattttcacaggactctcttggagaggagctaactactttcctctctcttaatacccagaccctctccctcagccctgacagcacgttacagaatgcattcacttagtgtgtgaagagctagctcaccacctccctttaagatctattcttgttattcatacattgcaaatttgtacttttgtatccacaaggaagacattactaacttcaagaaaggcagtgtcaatgaggagcaggaaaatacagtatgatacaagcctgccaatgaaagaattatactcagactctatgcgctctgttaaacaaaatttgaacctttgaggaaaaaatattggggattctgatgagtgtttttactctttctttcctttttttttttttttctatttggaaatcatggcttcctgatcctaagggataaaaaaaaaaaaaaaaaaaaaaacctcaaagaaaagactcaacaggctttctggacatcaaatagttcctacaaaacaacattctgatgacttgcatgtaaagaaatcagaaacatatgaattaagcttctctcgaaatacatatgggttgaaaaatagagagaagtgctgagaaaatgtgttttgggttttgctgagcccatgacgtttgaaaaatagtatgagacattgaacaaacacaaagcatggcttggctcacccattcctaatattagccttctagttcaacggcaaatcagtttaccatgtgcctaaatgtgagccaccttggtgcactcccccacacttaattatatgcagtttaaattttttcaattaggagctcaaaaataacattgcatttcaaggaaatgcaaatcttagcattttcttacctggtttgttcacctcagaccattttagaaaacaccacagattatttcaccttaggagcagtcacactgatgtggccctctttgatgtggctggcatataacagaagaaacgtatcatttttaagaaactggctcc

SEQ ID NO: 89826 - DNA, 1093 bp, Homo sapiens
atgattgttaaaagcgtttacattttaaaggattcctgtaatagcagatcctcttggcccaactttacagtgtcacttttgctgataaaatcatttaggattcagtttccttaattaaccccaagaaagatgacttacatgaatcattatgatatcctaacctctagactagagaagctgctttacctttcagatatgacattgaaaaatgcaaaaccatacggaattgtttcttatgaaggaagttttggttttatggtgcttttcctccattatctttagatgacgaaaaaggaaaaacagatgagaaaggacaaatagatcatggctaagtagctttaggctagcacttgtttttggaatctttaatacatttttaatcttcatgttgaagatccatttaacctgttttaaagttagatggtgattcctgggttcagttggtctgtttaaatgtttaccttttcaggataatccgtattagaatcttgcatctctcaatagattacctatttaacaaagtaaccaatttaagaaaacctaaacacatttatacattaagatattttcctgtttcgagttagatgatgtagtatataaaatatatggctggcctgatgtggaattatgtatagacaacagtgtcttcacagatgcattgccaatagggagctatgtagattaaactctttggccagtcctaggctttttacctgtgtaactcaatcagaattgaaagcatgacaggttttatgatgatgaatgtatggctggattggagaaagtatggttgggtgggtagatagatggatagatttcataactagacagtaatagataatgccaattatttattactcaaacttgtttattcctcagaaatttttctgcagagtattattttgattattgcatgtagttcagaacatttagttgaaaatgataaaatatttgctgtcacataatcaagactgctatagagttggttctaaaagttccagagtgaacatacattacctgtgtcaaagttagaggctaagactatggagggccataagatcacaaagtcagactatcacatactaagtgatca

SEQ ID NO: 89827 - DNA, 1890 bp, Homo sapiens
gttagattttttttttttttgagaggatggtactcataaaatcaagatcgctctgtcacaggaaatgtatttataggaactgttttaaggcgtttattaaaaacaaatctggtgatgtgtatctctattgattcaaacactagaaagaggcaaattgtacacacattatagttagaaaaaaaatagccatttggaacaccagcagaaagcttttgaaactgcggatggctaccagttgtccatcttagctttatgaaacagacagcaaagtccagttgtgtgtgtcccaaggaaggggccaattctataccattttttaaaatgccctcatgcatacactgaggaagcagatttttgtttattctacagtgtgtattctgctggctctaattctgcattgagtggcttttgatttggtgccagacatgttgtggagattgtatataccatgcgttaattgttcaaaatgcctatcgaagagactttacatttcttgagttttacttatcgtttggaggttgaatatctatgcttttttgtgtgtatgtgcatgtctaaccaatgtgtgtttgaacctgaattgttgaagttaagtgtggtcagctatttgttgcacaagttttcctctgaagagaacacagcactgaattccttcttttttcccagtgacaagtcaattacttgtttaaattcagtttgaactccctgaactgagagaggccagaggaagcaggttttccctgtgaataaacaaaagaagaaaaatggaaaatcattccaaaacacagtgattttagcttgtgggaagaatataattaagcattacaagaattatggtttcttcttttatgaactggcaactatagggtttgtaaaatcagttgtcctctaactttctagcagaaatataatcaatgatattttaggacaaacgaaaaaaacgtgaatttttttactaccttaagttatgaagtgtttccatgtccatatcccacaaaaaaatttttccttgtttctgtgaacaactgtacctgtccagaagtgtggactctgaaaaaaatacttaacaaaaaatcgtaacacaagagctatcaaagaataaattttggatataaaccagaatgtatttttaaaaatcagtttctcctcaggtgagagtttcatgaacttgataaaataatttttgtgatttttttttcctctatgcattagaggtttaaatactaacggatccaaatctaagcttaaaaaaaattaaagcaccacttctgaactacgaaacagatttttttttgcagagaaaatcagtagcttattttgtgttggaaatacaagcttgtatcaaagtgtgccaatgtgtctgtccttattaaggctataagaagtattaggcattacctgctctccaataagtgtagttctagctctaaattttgatctttatggcttcttgcatgttcattgaagaagaattttaataagtgattatttggtcaaatttcacatatctaatattatagcatatccacgaagataaaattatggcaaataaaactgaaaacaaaagtggcgaaatgtcctcgtaatggtaattgaagatcacatcatcagctctcgccagcatgtgcatgtgttaaaccgtagagagaaacctgtaattattgtaattgctctttttgctttatactaacaagcttcaaaccatgtttcaaagtagttgttttgaaatagttatttgtcaaatcatcaaatctcggaaagtaaatggtaatgagctttttatgtttatattctgactgttggtcatattatgcagcttttcaagtccataaagttcagagatgaaactggatgttaattatttctgatatcaaggccaaagaataaaat

SEQ ID NO: 89828 - DNA, 1047 bp, Homo sapiens
tatgggaaaatgcaactgaaggaattgttgtgaaaaaagggacagcgagtttgaaataaaagttgttagagtggtactgaggagaaaaaagaatccgagaccatgtactgcgcatacacaatcccgggcatgggcggcaactctttgatgtactactataatgggaaagcggtaagcgaatgcgggctgcgagggggatttttgacaagttttattgtcgcagggatgagcatcctaggtggtgatcattgtttgcaaagttgtgcaggactgccgcaccttcctgggtgccatgaaatatttatcatttgccaatcctaagatcttcttcttgcctacttcttctccttcgtctttttttccccccactcctcccccagagtagaaaaatagatgctttcagagctttagagagtggatcctagagcgaaagtttgcagtcaggtaaagttgagaggtggtatgattttttttttttaaagagttttggaaaattcttattccttccaaatgactgttagaaaggaaaagcagatatgagaagcagaattgagaaagcccaagttaggctgagaggaaatttggggtaagtttctccctggattgaggttttgtgatatctaaagtcttactaagttggaagcttgagtgcagtggatagagtggagagaacctgaaaggttaaaatagagcaaacacataaaactgagagatcaaattaaggagtagattatataagcttagatatatatttaaagccaaaatggggaaggaaaaacaaacgggttcattcatgcatataacagtattgtcataagttatttgtgctgtgtggcttcttccctcaatttcccccccttccaacagaaacgctttatttaagaaaaaaatgtgtctggtattttgtgcataaccccagcagaaggtttatacttgccatctggaggtttattttttttttccttcgtctgggcccactgaaggaaaaggatttcaatattttcaaatcggtatgtggggctctcgggaagagttgttgggtgatag

SEQ ID NO: 89829 - DNA, 1033 bp, Homo sapiens
attgagttgtaaggaaataggtgctttgaattattaaagttgattcttgagaatagatgtatgctcgggtggcatttgcttcggcatatgcaaatgatttagtttcatttgggatcaattcccagaggccctcctttcctgtgatgctctgaatttggcaagctcaagtcagcccatctcctctccccacatccctccctttctttctttcctttttttgtacctccccccgcctttttgttgattggtataatatttttaaaagacaataaataaatatatcaacttgcttgtgagaaaccttgccatctataaggattctattgttcagttgtgatcaataaaggtgaacaaaggttttcacgttcttaaagtttagcaaaatcgaagtttagtaaaaatgtgcatgagatgtttgctaaaatatttatacagatactgggctgcggggatgctgcaaaactctgaaaatgtggtctcaggggtgcctttggggaaactgacagctgtaagatattcgtcggttcgaaggtaccaataaacttgctttagagcccagcaaatagcgtgaagttgcagtagattgtctaaagctacagtgaaagcacccaactccagagtggagaacgtgcgcccttggggcgcccagcgccagcgaggggagcagcgccccagcccctccgtaggctctgggcccatgcggctgtctgcggcggggcgaggtgaagttcatgggcggccgcgcttcccaccagctccggggaggccggggcccgcggagcccggggcgggccgcactgctactctgtttcattccgcaaccccgttttgtaggttgttgaccaagcagtcagaaaacactgccccctctctccttttgagcgaggtcagagacgtggtgtttttttttttttttttttttttttcttccctcccctttccctcccctttctccgagtcgagttctcaggcagctgcgtacaatgctgggagctagccagcagcagagacagatggcagagttattagatgt

SEQ ID NO: 89830 - DNA, 1142 bp, Homo sapiens
ttctcactcatcacccatacctgattcagctgggttaatgttaaaagccaaaatttatcaatatcaatttttttcccaaatcattcttattttagtactgtttatgctcaataaaagtttatgaatttctttcactgttatttaatgaaaacccagaattttttaaaattgcacattatctctttaaaaaaagtcttttagattactcgtgggatttactctaagttgttgtcttttaatagaagatgatgcaaaacttgtctcacctgttccttcctggtcgtgtctgtgtttatgtgtggggtgggtatataagtgcttttgattaacagaatgaagagagtgcttattttgaaaactcagtcgttaaaattcaagtttattttgagttaaagaacaccatatttagattaggaatggaccaatgacctgcttaagctttaggctatcgattggccttgagggaacttagatctgctaaacacgaacttgaaaaggcacttcagtgatggatgtacgttggatgctctcactgtatggtcattcacttgcattttaaaatttatgttttgtttttcctttatacctactcttttcattccgtttgtcagaggtggccatttaaagtatttgacaattgtttgttctctgcctagcaagttgtcctattgctccatgatgtgaaagaacaaaggtaatcaacagttagaaacctcaggaaattgctagaatcttcacccccaaagagggttaataaaccctagataattagttcatttagaatgaaaaccattttcattgtaataatcacatttcccctctgattatcgagcaatgcattgggaagcctgatatttattcacaaattttttaaaattgagaacatcctgtgctgagattccagtcagcttcatccatccattttttgttaaaagtttctcaactatcatccttcatccagacaaataaacataaccaggatttcccctctaactttttgggaattcatttacacgtgtaccattttgagggaaaaaaacaattgtcctcgaatttcatttgactcaggtgattgtggtaagctcgctaaccagcttcatctaggaagtgcagcaatctgagtcaacttcctccatctctgt

SEQ ID NO: 89831 - DNA, 1028 bp, Homo sapiens
gagttcattttgtaatgctttataagggtctggtaccactgattctccttgcagactaataaacacagagcttatatgactcttaaaaatacagtgatagcaagtgcatcctaaattatgtaatcatgtggtccatgataacagtgtaatatatgatatacagatggaatcagccacctggcttactgtaattgttgttgaggtcctttgttatgaacatatatttctgttaacaatgcaacaaaataattttttaagctgtttttttttttctgtactgcctcaaatctagataaacggaatgtgttggaaaggacaacaaataagaagttaaatatgtggaaatgacatggaaagcacctgtttcttccctttgttttcttctacgtcatcaggaaataatatttaaccatagaatatggtgtccctctaagaaaatgtttataattgaatgttcaaagtagaatatagattaaataagtaaagatgacttgccaaaaaaaattaaagaacatttgaaacaaacagaagtctgcatcacacataataagtggcataacagtatcacctctcaaaagtgacaatagatgtgtccatctttatgcctttagcatgttgttggcattattagttattgtattgagagagtagccacgctatacaagagaaaggaaggtaaattagatccctcacgcccccttcttctgtgaattgtatatgtttttgaatacactctctgccaggacagcaaataaaatttggttcatccctgatcctcagcagattataatctaggtaaaggacagaccaggttcatgaaatcaaaaataataattagaacatttggaaactaggggaacaggtcctcatattgtgtgcatgttttatcagtctaaagtagatatagctctattgaaaattgttggctagtaatatgctcattttcccatttcatgaagacttattctcaaatggaagttacagctggctatcgtgtttttccgacaaactctcttctctgtggacat

SEQ ID NO: 89832 - DNA, 1033 bp, Homo sapiens
ttgcatttttaatttagtaactaacatatgaataaatttgcatattaattagttgcagattaaatcatgcatacataattgcctccttactgtgtttaatgtttgtcaaaatctccagcctggtttgatggatgtcgtatgaaagattacaatttgatgtacccttggaagtatttacaccaataatgcaagattcttaatagcagaattttctagttatatacagttactaataaacatgtaagataggtacatgtccctttgactaaaatttttttctttgcaccaaatcatttactattcataatcattaatgcatctcctaattatacagcatatgtctgttaaccctttcattgctggccttcaaatggtagcttctttctttttcttgccccctaaagaaagcaaaattgtttgataatactctgaaattactcgattgccttttatttatttctctcctagtatatggacaaacctcatttgccatttattttaacatacaatagataattatatgatcattttgtattttctagttaaagatcataaaatgacccacgtgcacatggttagtagctgatgggcttttgcctttcttttaccaatgctgaaaaaaattgaaatatttcagatacttcatatagtagtaaaaaaaaatgtatacacagacatactctctatttaggagggtaattgtagaataagtaaaagtattaaaattatatttaaattcattttgaatattgaaatgcatttaatgtatcatgatcaaacataggatggaaatgtgattttttttattagaattgagatctctgaagtagaaactgacaagagaatagatgctcttgatttgacataattttaaaatgccaataaatgttttctcaaatttcttcaggtatttaattttttaagttttatcttactcatataaaaagtagaccaactggcttttttttttcctttttactattttgatgtctaagctgcttatcacactgtattaccctgcattaatgagtat

SEQ ID NO: 89833 - DNA, 1423 bp, Homo sapiens
agaggtcacttgctttttctgaaattatgtaatattgcttttttttttttttttttttgagatggggtcttgctctgtcacctaggttggagtacagtggtgcaatcatagttcactgcagtctcaaactcccaggctcaagcggtcctcccacctcaggctcctgagtagctgggtacacaggttcacaaccaccacacctggctaatttttttctttttttttggtagagacagggtctccctgtgtttcccaggctctgcaaacccatctctatcaaaccaagacacgtagtcagcccttttaatcattagacctagtggtctgcaaagtttgtgttggaaatactttatcttctctcttttgaactggtacatcggctgtgatgcccggagctgcttatactgtggttcccttggccaataatttgtttatgcctaaatcagccttgcctctaagtgataaggagatacgtgctttttcttttgttttgtgtcagtggtattctctaataggccgggaacgggtctgcccaagtgatgcacagccccttggtggggctggctatagatccccccgcaaaactgaaggttaggcctaagatattagctttgcctggcaagatgaagatgtgtggactaggtagacctgtgtggcagtctgtttcttttataaagtaaacagagttcagtttgtttaggactgcttaggtagatttcttacactgagcaggaatatttgtacagatgttttaaggtaaagtcaaagaatggctagattgtagcctttgacgcattataatgtatcttttctcagtgcccctgttgaattcacaaaagaaaaggtatttttgatcatcggctatgagaaacttaaaacacttttttttatatataaaggctgatttagttaactcttcttgcatttaaagaaaaaaacatctgctgaaagtagggaggggggaggtgtgagcggaagcgtggtctccacattccacaatgaatgtcttttcccagccaattttaatttgcagaaaaaccaggcactgagttagattcctcgggaaaagtccctgttggctgatgagccctgaacttcttccgtgtacaccctgaacagggactgatgcttcagttcacagagataatttttctctggaaagccgatagatccgatttagccacccctcatttgtagtcattgccaccttgtggattacaaaggatattggttttcatcaaacttccatttcgatttggctttttatggcaagtacacgttggcagtggattgccgtgttcctcaccaaaaggatcctggtttgttcagcaacacctcacttctccactcacagttcatttatgattctgatgagagtgttttttcaggaaacacacatttcactttttgacctaggagcatc

SEQ ID NO: 89834 - DNA, 1097 bp, Homo sapiens
agagagaattataacagggcttgcatgtattttgaaaataaaacctttttctatggcatccagcttaactgtgaatttatatttacgaaataatgtagataaatgccttgataatttgattgaataccattttttaacttttaaaatttaattgattgaaatagttttatttgctaacatagcaaaatgttctccttttttccagatcactgacaatttctgcattttctatgttttcttggttttgaataattctaaaggttttcattgaaagtaatgaatcaggaattggagggctaaataagattctcttagaagatgtggcagtaatcctaaaagaataaggagtctcttcaagaattgtcaaagttgtattttcttaaggcagaatccatacttgtcaggctgttgacagacacttgctttgtcttggcttttgtttgattttttacataactgcactggattattaaactgaacataaaattgcacctcaaagcaatagcacaggattttcagccttgatcaatttctactatccccggatgtgtgtgtgcacgcgtgtgtgtgtgcacccatgtgtatgagtgtgcttcttttaaaggaataggagcttttatacaatgtggtgcaaaacttatagttttaaatacttaattattttatctggaaacagcagcatgtgagtgattcttttttaagttgcagctgctgcataggtgtagagctatttgaggagtttgatgctttacttgagcatatactccctcttcagagaagttaaggtagtgcagaagtttctgcattttgtaaaatttcagggttgaaaataaagatgctttatgatttggtgagatggatagatttcacttctgaaagaatgtgcaagttgtattttgaaaggaacattttaagaattctacttaagtggtttagtgacacccactcttgtctcttgtctgactttgtcatctgaggaattaatcataaataagccactagggatgaaacttgatatataagtgcttacttccagagtaataagaagaggaactgtgtgtgtgttaaatttcactaaatttattttgattattccg

SEQ ID NO: 89835 - DNA, 1319 bp, Homo sapiens
aaatagtaataaatctgtcacaatctgttgtggcaactcactttaccccccattttgaagtgggccctctctttcccttataataaaaggaagaaaacttaaacggtgacactgcatcatcaggtattatttgtgacacgcctgtggtacagagactggacttctgccgccattaggctgggtcttcctcccaggcaatcaggagagagaggggattgcctagccctgttttgaaaacactgcagcatctgtgggagagagaaaacgtaggcctggccagacatcatgccatggatctggcaggatccacgaatgtgtgtttgtactgtgtgctgcacctagagacctcacgtcactgtggaagtatgacacgatggtgggataacagaagacccaccaggcagggtctacaggacaagcacagcgtgtcggggggaagcctgtccctctagtgcacatagaccagtacttgctaaggtgattttttttttaaaggaaagcctgtgtgaaagacagctatctaattgcccacgagagctctgcttattactgcagtacatttttatcttctcggttcgtattttagtatgttgctctttttagtcacgtcccaatttctcgtagccctcgttttttgcgaagaccttagtaataaagtgttgtcttttgttgatgtcagaatttattttgcatgtctaagctcttgaatctacatgagaacatcttgttttgctagatttctacattttggttttccatttcaaaccatatttcatcttaaactcaatattttgcaactttactgctcatttcaacaaatttgttttatataacctaataatcatacacattgaatcatgaattcatacacagaaaaatgtactatagtaaattaaagttggaaaaaaatgatttatgattcttaacagaaattaacatgaaagtactaaaatctagaaagtagcaaaaaattttatattgtgctgttttaagatactttcatcaaacacagaaacaaagcaaaggcattatcttttggaaactttattctgcccatcaacatgtaaacatgtaaaacttttatcttagaatttgaaatatttcaaaattatatacgttttatcagaaactgttaacaactacaaactttctacttcagactttggtggaatttgtctccacttgtaatccgatttgcatctttaatgatggtctcaccatgaccccagttggaatctcttgaacatcagatttttctggaaataggatattttatccttagaaatagtttatgacctctcatctccagtgatctttcc

SEQ ID NO: 89836 - DNA, 1035 bp, Homo sapiens
ttgtgagtgacatggtgattagaatttagattagggaaaacacattctgtactttatcaaggacagtaattagttcagtcagtaaaagttgattacaagtaacgataaagttagatttttagtacttaattttaaaatttctttattaaatagtaaatttgttcttaatataaatggtactatctactcttgttttattgcatatcagaataattaaaagaacaatgtgttcaatgcagagtataatcaagcgatttatatattatgggtaagtttctatgtagtttttagaaaatgtaatattatataatctttctgatgtcatcatttttagaagtttaataattgtcacactgtgataggttattgtggaagttttctagtgttcaggtaaatgtttaatctgtgggatgtgtcttagcttccgatagacctcaagagggcattctgaagtcctttgtggctgttagcttggaatatctgctatttctgtaattttgagagttagtgtgaggatttgaatttcctcttggttcagttggcattttctcttctgtgggtgctatgtcagttcgtggagaatcatgatatgcggtacagagaggcagggttctcagtcgagttcataggctacacttacccccagtgtatgcagccaggggaagttgtgtgcgttcacaaaatgaggttcttcttgttaaggaaggggatgaatagttcccagatatgagcctcagtctagagaaaggaaacattagtcttatataaatgccatttgttttgtgaaatgaaaacgtgagtcatcttaaaagacttaaaaaaatattgtttaaagggaatcatctactttcctcctaaaagtaaagaattaaaaattcacaaactttgtgatagcttcttagactgcctttcttttgggtttttgttttgttttaattgtctcagcttagcagatgctgtttgctttattgcattggtttaagtactaacaatcagttgggaggtggtgaaagtaaaaaattaaccttatatgtt

SEQ ID NO: 89837 - DNA, 1018 bp, Homo sapiens
ttaatgaagcttcttctccctactaaatcttatctagagtttaactatctattaatcattcatttttgcacatttttacagcttttgtggggtattttacattctttcttctgtttgaatatagagggtgccttgcaaacttcactcatttcactagaagaggcaactgtttaaatcctactcttctaatatatttcctggttcatgttttcctgcacattcataaatgaggaggacgttgatttgtcagttatcttcagtgcttagaatagttgctgaaatgtgacaagaatgtttatggaagaaattaccttataggttgtacatgtcctctaaagacatcataggcactcctacattgcattggtgaaggggccaccaaacagcagaatcctgcaacttggttgaactatgaaaatgttcttgatacattataatttcctcaacccctttagccagtattggccattcaggcaaaggaatagaatttccaagacttgtactgtatgtttgcagaaggagggaggatggcagataggtttgtgtgtgttgggatggagaaagtatgcaaataagctaattaatatcaattgtttttatatctatattacacatacacacactcgcatacacataagcacacataattaatcacacccatgagcacatgtacacagctggtctacaccagattgccctgacaattttagagctgtgtgctgaaaaattttagaggaatttggctttgaatgtgcaacacgtattacagagcaaagatcaccttgggtcctaagggagatgactttcatctctaccatgtgagtaaaacctgggtgattgaaccataaattattttgggtatatagaactttcttcaaataacacttaaaattaaatgtccaggtaagtgattttcaaatcagaacaaccaaaattgttaatagttatgatcatgcttatatacgtatggaaatgtatatgtatatggaaatatggaaatttgtgtataagcatgctc

SEQ ID NO: 89838 - DNA, 1051 bp, Homo sapiens
tgattatggatttaccaaccgctcagggtatttatattttaaaaaatatatctcaaagctgtatcataaatgattagaagttcaggaatattttatatttttggtggactataggtttcatcagtatgaaatatccaacttttttctttttttacatttttgccttagattggctttcaatgtatagtaatgttctctacatgctttatttttgtagattttatattacatattttttatatatttttatttttcatagtctctgtgttttatttttgatggtttgttatacacagcatttagctttacatttttctagcctaatgtgacagccactgtaacttagttgaggaatataatatccaaataaacatagtttaattttctttttttccttggcttgatcacatttcctttgttttatattttttgctgcttaaaaaaaggtctttttttttctaatggtgcaggaattatacatcttatttcttgtgaaagttattcttgcctttctaactcacatatttcaaattatatatctctattaaagtctaaatctgtttggtgtctgtatctttcctaaaaaagatgacggagagtgttagcacatttttaattactgagtttctccctttgttcctcccctttacctctcatgttgaggttgatatgtttcctttttgacgttttaaattgcatcaacagtcacatagagtctactagcgtttccttgccccatcttgctaatttttgtggaccatgttgttctgggtttttttgggttgatttgtcattatacagttatatatccttatgtaatttttttcagaagtgtgggggtataaattttcagagtctttgcattttctaaattgcctgtagttagctcacctttttgaaggcaagtttggctacatataaaatttgagttttaaagtcttgtatcccctttttctgtcacatttttgttctggcttgccttgcagctctaaatgtagcaccccaattaatcacccgattattgcatcacactccactccagctccatgta

SEQ ID NO: 89839 - DNA, 1101 bp, Homo sapiens
gtactgatgacactgggggtagggagaacaggagcagttgaagacgacacatgctgtcacctcatgtgctggtgtgagtggcgcagggaagggctgtgattttttataggcacactgattagccaagcacttgtcacctccactgccgctcattggcctactgagtgtgagcgtgccatctaattgacagctgtctgttgtcagagggccatcttttctccttttcagtttgagtgaacacaacagagacatctgcagagctctctgcagctctgacaaggttgccctgcctgccaaccctcagacttctaggcagcataattgaagagatcagaaaagaatattaacccgttgaccatcttgggctgaggtgtaatgaccaaaaagtcactttttaaggtgactgtgagtctttcttagtagaggaagacatgagattctctgtcagaagagtcaggccagtaggaagtgctatttcttggtagtgattgttcgtggggtttcagttcatctgagcacttggaagaggatgagaagttcattttcaaggtagacccagtgtttcatggtggggttacactgaagcctgaatgctgggtcacatcattcatgtctgatttggcttgtgtaatgacagtagtgctttggatgtgtgtagtttggatgagggttactctttttcttttaccgccaggcctgacactgcccttttagcgtaagattccagaatctcttatgcagtagcatggaatgtatggccaaccccgtagtaacgtggactgcctctttgggacatttcctgtaagccagagatatcaaggtggactttgtgatgggtagattgtttattatacagatatcagcttgggaatttgaatgtttaattatttgccttgtcgtagtgtcttcaaatgaagctctatttgagcatctactgggattggtacaatatgcagacaagctggctttgtgtgggtcgagtcacctgtgcttgcaggatgggggtgcttgctatatttggaagtgatttagtggtatcctaggtttatcaggaggaaaatacatctttgcatttatttgaacatttgatttagaaaggga

SEQ ID NO: 89840 - DNA, 1153 bp, Homo sapiens
tggagtctcgctctgtcacccaggctgaagtgcagtggtgtgatctcggctcactgcaatccctgcctcccgggttcatgccattcttctgcctcagtctcccgagtagctgggaccacaggcgcccaccaccatgcccggctaatttttttttgtatttttagtagagatggggtttcaccgtgttagccaggatggtctcaatctcctgacctcgtgatccacccgcctcggcctcccaaagtgctgagattacagctgtgagccactgtgcccagccgaggctgggattatttttaatccagttttattgataaagaaactgagatttagagagatttgttttcactctgaaggcagagatgggactggggaacaaactcctttggatccagatttggcattttctttgtcacttctttagcactggataaagttggtgtagctttgtgtcatagcaagtagcccacagagtcttttcatagatggttccagctctctattcattattaacttagggatcattcatggaggcacttacctagttaccaggctgagacctctgtctgccaatgagaaaaaatgtgcatttctaaagaggatatgaagaacctagcaatctgtatatcaggagcattgtctttacatagacaaaaaagaatattttgaatgtttcctgtaagtaagtaccagttgcaatagcgtggtgcgtaccgcccatgctatctattgcccatcagtggtacctctactctctggttgtggtgaaaaggaccatggtcctcctggaaatttctggccctgaagctcaggggagaagtgcaacaccagccacatctcatcccccaagtttcattctccttcactctccctggtacaacttggcagaggatggggagaactgggaagaagtggatgcattgagtagatcaagcttttcctcttcatgtttactttatatgattttaattttgtaaccttgttgtaggacataaaaaatgaatgacagtggacttagcttttatttataacattgaaatccttaaagatagaatgttagagtcagaaaggacctagacatcatctggcatccagtgccgctttgtagcaagtggaaaactaaagctcagagatgttgaggttggtcgtcatc

SEQ ID NO: 89841 - DNA, 1039 bp, Homo sapiens
tatttttcagtgaaccaaccattttaagttgcagatttaataagaatgcacccatagatttttcagtacatgtctcttaaaaataagacatttgcctaactaacatactgttattatccctaaagagattaacagtagtttcttaatctcagtccatattcagatttcttcagttgtcctcatgcaaatgtcttcagtagctttcttaaaaaaggcaactaaaatgccatttacgcgtgtcatttgatttctatgtctctttataatttcttttaaactagagctgttcctctatttgtattcttttttaaattgtgtaatttattttttagggatggggtatcgctatgttgccaaggctggactcaaacttctgggcttgggattttcccaagtaatttttttgttggtttgtttgaatgatagtgactttaaagagaccaggccaactgtcctataaaacattcccctttctagaattattagatttcgtttccttgtggtgctgtttaattttgttcatcacttgttttgcctacaaatttaaaattagttctaaaggtttatgcaggttcaggttaaacattttcggctggagtacttcattgggggtgctgtgtatatcaaattacattccaacagaatattgagctatgctgctgttggtaatgctaactttaatcacttggcaaaagtggtgaccactggattgttccattgtaaaggaatctttccccatctgcaattaacaaatagtctttgtattgatactttagcaatggacagatacccctttttcccaacaacctttgacctaatagttttagcacacattgatgacccttgcctgaatcagttatttcaactgaagacttcaaactggtgattcttttaaaattccatcattccttccacatttatagctagtattcttctataaaagggcagtttctttcatcattcattttaacactatcagtttcatgtttcatattttatataagtgtcataacaattactgtttctaatgtttccttac

SEQ ID NO: 89842 - DNA, 1280 bp, Homo sapiens
tttctcttggcaggtaaaacagaaaggggctcatactcatcttatgggagagaatcaaacttacagggttgccaccaggtaagtgagaatctctgttgcggaagggttgagaggattaacctggtaaatcagtttgttttctaaattagatgatgcattttaaactgtgacaccaaagatgcaccggcaagtcagatgatggctctctctttaagtaatgaaataacacagagcttagaactaataaacacctcatctttagatcgctgctgtatcagaactacattcatgggcttgtttttattttttaatccatcagccggtaccagtggcactgtttgcaaaccagcaatgtcggtgaaagtggttctattaaaagagtttatttgcaattaagaacttaagaatttcttacgcaggaaatacttcgcggagtcatgtgtcagaccctgggtttcgggtggctattgccctaaattatagttttcataggggctgtatgatgttgtgtgaaaacagggttgtattgagggataaaaatgtctgtgaaaatatgatttgttgtccctttttgtttctgaattgtttttggctggaagtcaaggccagcaggctaacagcaaagccgtctcaagggaagcatgcgtgagctagaaaaataagagtactttaattaaataataaaatgccagtgtaatacaaaggtatagcatgtgtgtgtttgtgtctctgggcactttgcatttgtatactttaaactctccagagagagcctatttctaaaaatactgtcaatagctaaaagtataagctttgtttcaagacaactgagtttttatagatgctttctttttcagttcagtatcagtattaatcatgtatttaaaatcttttttaaaaatttatacttcctttttataagtgcattggtttcttactttggaaaactcttgatggaatttaataatcctctttaatattcagagctctctactgtttttattattcacgcaaacaaaatgtactttttttttttcaaatgctggaaaggggatgcttactctcttgaactctctcaccctctgatgttcttgatgggggaaaaaaatctattttaattttattttaaacagcccatttaatatacccctgaaaaatgtaagcaaagttttgtttttgtaattaaatcgagcctatgaggaaagtttcctttacgtaccagacataggaaggtacgacttctggtgggttggtgtgtttgttttttccctgtatatatt

SEQ ID NO: 89843 - DNA, 1049 bp, Homo sapiens
ttccaagtgaattttaagcagaaaatcaacatcaagaccatagctaatttttaatggataatttacacaaaagatagtttcttttctagaaactgaggtgtccttttaaaatggctgcttttagtctttaaaaaaaatgataggaatcgcgattttatgtttgagaaggtgcgtgggctttatccacagtgcctgattattttgctcccaaacaggggttctggctctgagggcagatttatagttgaattggggaacaaaaagatgtaataaagttaaaagcttacactatcagaatgaaatgtgtttgttcatgatctctggaccgatctatttgatggtaaaagtggatgctacagatgaaatctttacaaggagcataatccttaaaaaaaaaaaaaaaaaaaaaaagtccacctcccagcctcctgctggctgtgctgcctctttggtacctcgcagacttcgacagagccctggacgggtgcccattgatgtcatggaaacactcaaattactgagaatgattcatgtctatgctggtctcttatcctcccccacacaaacaggagtagatttttaaccctgacaacttgtaatttgcagtgggtttatttttgtatctggataaatattttttaacaagcaaaattaagattaagcagtctgtatctgatatgatagtaaagaatgctgggttccatgtagccaagagtactttggggactctgcagcgtgaattcatattcttctcctcctcctctccctcctgcctctttcttttcctacctcttgctctttgcattccactcttcctctctttgtttttctcctacttattctctctctccttttaaaatcctgcccttttatctttaaaataatggaaggagtagcccaacttatatctataagtgaggcaaatcctggcagaaagattcctccctcctgttctgtgtgttggagtcaagttgggaaataatgctgagtggtgaaattctacaggggatagcttcaggaattccttctagagaaaaaaatagatgctt

SEQ ID NO: 89844 - DNA, 1121 bp, Homo sapiens
gtagaaatgcagttttctgccatgtttttgttaattagttgctttgtgttaatgtgcggagatggtggcagtttattgtaagatgtcacagaatccatgtgtatcatttgtgcagctataaagtacctagagaccttttaggaataaaacaccatgtaaatgtaaattatcattgcctataagacactttcattaatttcatatcaaattcatgagtgttttgagctctgggatttgagagtcttcagtgtcgggcctctagtttatttatacttttttttttttcccccagagtttaaacaccagcagcatagcatagtgctaagagcacagtctgggcaaacaaactgccagggtttgaatcctggctctgtcacttgtacctgtgtggctgtgggcaattttctagatctcagtttcctcatctgcaaaatggtgtttctattacctgccttatggggttgtgcagattgaatgaatcattttatgtagagctttgagcagtggttaatacatgataaggacacagctattcttatttggacagggaaggaaaaggcaggcatggaaacgatgaaggactgtaaataataacctcatgtatgtgttcagaactactaaaaagttcagttgttgtttaatgaactagtcctttctacatatatatagattcacagggtaatcagagatggatgggactggggatggggacagaaatttattctgagtcaaacatgtttatgatgagttccctagtctgatgccagggaacaaaaggctcattcttcagttcccagaatgaggattaacagtgaaacagccttgcttggtgttgtcctgcagcatcagataatttttcatcaaggcgtttcacgggatgatatattctcccatatagatgaatctatttcagcggtgggtgaaacacctaccatttatatataatttttaaagtggcattttacaaatgaaaggctacacaaccaaacatgaccctgttattatcctactggtcaaccacaagagggatcatctctgttagagcttatctctagaaatcattttattgataagttgctcgtctgtctctagctctttctaggtggtttagaactgtcatg

SEQ ID NO: 89845 - DNA, 1079 bp, Homo sapiens
ctcatcggctgactgtacccctcctcccccatacagatttggtgagacttagtactaaataagtttggggagtgcctggccatagccggctcttgttggggcatgtgcgccctctgctggctgctcacataggaactgactggtgtgtgaggttctttctttcttttacttttcaaggttgggttttttttgttttttgttttgtttcaatttatttttatacaactgatcagatatttaccatgattataaagttgtagcttaatactgagtatggccgttaatttgtttttatttggaaataaaggtgaggttttgttttgggtgtgtttttggtaaatagatagtcctgatagttcaaataacatgcaatgtgtgtaatactcttgagttttttaagtggttgattgtatatcacgattaaccatattttcattgctttcatattccccttgccttgattgtatttgagaagtattcttgttggactaagttgggaatagaacttaaaaggggatagataagtcattgaaattttgaaatatgattatttgtctgtaatggatgtggtaggtaatccctagtagaaaaattcctgttatggttggttgatagttttcacttgctttgccaaggaaaatgagtatatttacatcataatactttataaaagcatttttggtttccttgcaaaccaaattaagctgtgctcactggcagacattgagaatggtagtttgagtaaaatattttttgttttgttttgcttttgcagttgctgtttatagagtatgagatgttaaaggaacaaatcactgatggtctctttactcccaggacacaggactaaactatacaagggcagttacagaggaagagtgtcagcctctctaccattgcctgggtggagagcatccttgggtcctggtagtgaaggccagggctctgtgtaatgagtgtgtcttttaaaaatagcaacaatttttgttgacaaggctccatcaaagtctttataataatttagtttgtataagtgatttctgtgtatctctgaaattaaatgacttgatggagtcagt

SEQ ID NO: 89846 - DNA, 1054 bp, Homo sapiens
ctatatttgctatggatatatttatgcatttaaaaaatttgcatcattgtaacttttcattgacaaaatatatttaatatgctcggtttttacagttttgcttaattagtttttttcccacttatatttattttctgtaacttttctcttttttgttgtctgttttgctctattaagatgttatatatcttctcctccttctccagagtagacctctcatcagttcaccaaaatctctctccagtaagagtcaggaagcttaccgtgtgacaaccccttcaaggcaataaggctccaactaagggattaagattgttttttgacaccaaacattgtttatcctcttaattttgagctatgtagcctgaaatccatgctctgtgatgaaatggaggtggtttatctgagctttaatactcttaaaaatgaagataatgatagagcatagtaatgaaaattaaataagatgcatgcatctagcagagaagctaagaaataggagattcttaacaaatgtaacctcatttcttctttagtttctgtaaaaccccaggaatgttagaaaatatctaggtcgaaaggagaagatcatgagtttggtgttaattttgaggtacctttaaccagtcaagtgaagacatgaagtagacagttgaatttaagggtgtgcagatcagagatgtctgagtggagagtctgcagttgaagagctgtttgtagagatgccagttgatggtatgagattgcttatggagtcttgagtaacaggtgggccttgagcctagcagtagaaggattttcaagatttaaagacattcaattgagaacaaaagagcatgccagggactgggagagaagggaaatgtgatgttatagaagctatgctaagcatagttttttaagaaggaggggatgggtgtgtcttttttggtcatcaaggaagatgagtactcaacagtgtctcttggctttaaccactttagtggtcactgttgacattttcagagagttttcttggtggaatcatggaataggaactgactttccatccctc

SEQ ID NO: 89847 - DNA, 1102 bp, Homo sapiens
gtggaggccggccacggtggttcacaactgtaatcccagcacttttggaggctgaggtgggcggatcacctgaggtcaggagtccaagaccagcttggccaacgtggtgaaaccccgtctctactaaaaatacaaaaattagctgggcttggtggcaggtgcctgtaatcccagctactcgggaggctgaggcgagagaattgcttgaacccggaaggcggaggttgcagtgagccgagatcgccccattgcactctagcctggacaacaagagcaaaactccgtctgaaaaaacaaaaaacaagaaagaaggtggaatcaaagggatgtaggggttccacaaatttagatgagatgtcaggtttctcagatgtgttccttgatttgaggtaggtgatcttagaagagctgcaactaaactccaactggctcctttttcccccatgtcttagaagaaaatgtgcttcgtttttattctcttgacaaccctctgcatttgcatctttcagcttcttctaacttgtgtctcctgggacctttcttttcataactctattttctttcatcatctgtctttcccctgactccttttccctttgcttcaaaatgtgcaaatggatcctctcttctctggcagtgattatcaaagtgtggtttctcggcgaaatgtgatcacttacttcaaatctcctgggatgatgtgaaagttgggacccacttcaggcctatgtgtcaatacctcagtatgatatattccagcaactttcccaaaaaactacttagtttccaaggcagtttggcatctcctagagtggcacagcaaattccatgatttttttctagccctgttcgttttgtcttttaaaacctgtctccctcaacatccacaatgttaaaaacgtctaacttgccttctgtttcgctcactactctttttttttttcctgctttctgcttctgtcttcataagtgcaggcatgggaagagctgggaatttggagtcccagtagggtttgattccttaatgtcattgctcagtagctgcgtgatcttgggtcacccatgtatcttcagtagggcatctgctttggaggtttgtgtg

SEQ ID NO: 89848 - DNA, 1052 bp, Homo sapiens
atgcgtattcagacataaatccaataaacagacaccccaaagttatgctgtgtaagaatagacacacagtaagaaatttccagctatcaggctaacaggcctgtaatctcagctctttgggaggccgaggagggcagatcatttgaagccaggagttcgagaccaacctggccaacatggtgaaaccccgtgtctactaaaaatacaaaaaattagccaggcgtggtggcacgtgcctgtagtcccagctagtcgggaggctgaggcaggagaactgattgaacccaggaggcggcggttgcagtgagctgagatcatgccgttatactcttgcctcggtgacagagtgagactccgtctcaaaaaagaaaaaagaaaaatgatcgtttaagtggccttgaataaccaagacatctttcctgctaagttcttttcgagttacccattatgcccagcgttgaatgtttactgtgcttattaaggatgatttttgtgtcctaggtgatcactgagtccttgattgggccagtatttactggatggatgcttcttagtgccagggagtgcgctagatcctggactactgggatggaaaagctagatactttctgagggtttttgaagtcacttcttcctcactcatataagcaaccccacctctttccaggcattgatttcagtgtgttcatcatccctggtcttgcttttaaccagctacttgatgggcaaaggtctggagaggggcagcctcctttgttgctggctcagtgtgctgtgctgtcctcagcgtggtgcctgctttttgcccttatcctcagatgtggatccctctcttcccaagctctcctccatcccctgtgctgcaaacaaaactccttgtttgttgctccccaccagtggccacgaaggaatttgcaaacccctcaacctcctactgttttggaattcatgaagtttttgccctgagcaagaggctatactttcaaaagtactttttcctttcttcattttcccaccccctgcctttcaaccactgccccgccctggtgcac

SEQ ID NO: 89849 - DNA, 1028 bp, Homo sapiens
aaatcaaattgaagaccaacttgattctgcctgcagagcaaagctatctgcctttttagaaaatctggatggttaaattggaagcacattctgcacatggtttagcagttagtagcctggaaaatgacccaatagccaagatagtttttttgtttgtttgttttttgtttttttaatcttcattgtaagtgcttgtttaaagtgtaagcttgtaatggactattttgcacattgttcattgttaattcttttcaggctattatagttctgtaaatacattgcctgctaagttgtgtcagtggagaaacattagtgctataagaaaatccagtgaaatgtgcttaaaagcattaccaattagcgcatgggactggatcaccgcgatttcttagtgatcctagagaagtcagtttcagttgacttcccatttatttaaaatgggtatgacaacgttctttttggagaatagggcagcacacaaatgcacactatgctgtggcctgctgaagagtttccactgatttgtgactatattactcaatattgctttgtagcacccttagtctaatccacattgaaggagcaaaatccttctgtatcttacttattatacgattatgtaatacatatgttactttatatataatatgtagtagtacttattttactatttttattcattataatgaaaataacaaatttactgggtggtatctaccatctagctcaagctgttctattttgtattgtttaaatttgagaaaagctaatattggttaataattaaaggttacaaaaattgtagtgggaaaggagttaaattctgtctctcagatagtaaagactgccagaacatggacataatcatgggaaataatagggtggatagaatgtgatttatctgcgtatgttaaagaaagaaaaatagtgatcgtgaatgtactgaatatagcttaaactatttatcattatgtacaaatggaaacttacataaaacccctgttgattaagttttatctgaaacaaag

SEQ ID NO: 89850 - DNA, 1066 bp, Homo sapiens
gttgatttttaatgtggaggattaggtgcagccaaaagacatttagttttagacaacatgccaagactggatgaaatggtgagagctggatccaacttttgtccagaagtttcccaaccctattgaacagtctcatgtcatgaatcagacccattggaacagaggcagggggaaggaccatctatcattaaaggtaaccaggatgtgaaataaacagtgctgcttttatttagtagaaaaagtttttctctaggtttttacatttttatttattttcatgtttttatttacttactttctttttagacacagaatctcactctgtcacccaggctggagtacagtgacatgattatagctcactgcatcttcaaacacctaggctcaagtgatcctcccgctttagcctcccaaagttctgggattacaggtgtgagccactgtgcccagccaattctctaagtctttccttgggaagatggtttctctgaattttgcataagccctatacttaaaatgtgtctgtgacagtattaaccagtaccctacttctggactggatcttgggtggcggggttgcgattaaacactttgtgtttctcaaacctctcattactccatggcttcaggagaataacatcagtatagttagggaatcctgaacctcacatccttgaaacttctgtgtccaccttaagtgctgtattcatcctcaataaaaataagactgctttctttgttcacattatatattcttagaaccaaagaagcaaaggagctgttttgagcagtgcacatcttacagggtgtcatgggacagtggattctaggtcttcaggggtcacttcagcataattcttggcttttcacttcctagtgatgggtgatgggacattgggcaaatttcctcagagcccccgttttctggtttcccaggtgaggacagggatgccagcctggcccacccctcccaggctcactgagaaagatgtggtgatgtgatacactttgtaatcactgtgctctgctgtgtaactgttagggcattgcaaggctaaccactggt

SEQ ID NO: 89851 - DNA, 1392 bp, Homo sapiens
atgaataccttcaagtgactttgccagtgatgtgttttccaaatgtaattctttaaagcctaactaaaatagatattccttttatatctcagctgattccagatctatagctaaggaattggattggttggggataaataaaataataactcattaagttgagtcaccaggagaaaagttctgtgcatagatcagtatttagcatagaggttgtaggacctcaataaatgactgtcgagtgaatcagggaattagatagatagggtttaaacgttgaatgaaaagcccatacattaaagttaggcctataccttactgtaccaagaagaagaccctaaaccagagccagtcatatagaaattcacattttgttctataggactatatccttgactgggcaaaatattctgccaagataggaaacgggccatattacagtgtggcctgtttcagttttcagtacaccacagattattttatatataagcggaaataagtaaaatcaataatattttgggtcgggcatagtgcctcatgcctgtaatcctagcactttgggaggccaaggtggaaggattgctcgagcccaagtgtttgagaccagcctgggcaacatagcgagatcctgtttctacagataataaaaaaattagctgggtgtggttttatgcactagtggtcccagacattcaggaggctgaggtggaaggactactggaggctgggaggttgaggtcactacagtgagctgtgattgtgccactgcacttgcactccagcctgggtgacagagagagaccccattgctaataataataatacttattactatatttatatttttgtaattatataataataataattactattattattataaataatttgaaaggccattgaaaaaagttgcgtttctggtattgagctaagataactgatttccttttgtccagtcagaggacatttccattcttctctcattggtcttgtttcctttccggcctactctgtgatatagcacagctaatgctgtggtcctcaaacacttttagagtccaactaggtttactaatccaagtcgtataacatttagaagaatttctaaacagaaaaatgttacttgaaaactatggccaacagagatgtatagaccttctaaataccaggggaagatttctcacatagaaagttattgacccaaagagaagataaatcatttaagcttcacataaaagtaaaaagcaatttgtatcaggtaggaatgcttttgcttcgaagtaatggaaaatgtgactaatgatggcttaagaataatttttctcattctagaaatctggtggtaggtccctgctggaagtggtttgcagctcagtgatgtcagggctggtg

SEQ ID NO: 89852 - DNA, 1078 bp, Homo sapiens
tgattttaagctttggaagctataccagttacttcaggtccttgaatctcaggcattctttgaaaaatcaccatcaaatccatctaaatggatttcagatatttaacacaaaatagtcaaagcagataaatactagcaacttatttttaatgggtaacatcatatgttcgtgcctttgagtatcttaccaactttgagaaccacaaagttggttttggtcatagaatgttcttatttttgtgctatttttgccttcaaagtagtaaatttcatatttacgttttaacattgtaactcaagcaggaatcccagttctttatcagttgttgatagaaaggtgcattgtttcttgttctcaggatatgtagatacaggtgaccagatatatttatcaacttagattttaaaaggcagcttttgactcttcagtgtcaatagttatgattttatttctaacacccttgcttctctattcatctccacacaaccacttagaataaaagattcacttgaaaatgtagtcttgagaagtagcacctaaataatatactaacttccttggatcctaaaatgatcctccaatgagctacagtaagaaaaatagaataaataaatactcatagggagacgcttatgttatctatgtgaaaaaagttttaactctaaagaacaacttgataaattaatattacagaatacaccaagcagtacaaacagattaaatgattgttctgttcatgtttcctcatgggcaactgctttacaaatcaaattagtttttcaacccaaatagtatttaaaatataagtggcctgacagtctagagcggagagagctgattcttttcacttagttgttgtttaggctgcaaatccatgtcagctttgctcttttatcctgtctgccctccttcccattaaactcttaaatatggagaccaagacagtctcctgcattgtgataggaaatgctactatgtccacgaggcccccacccactgttcccagtgaaaggacttctctgttagataagctgtctggtttgaaacatggctctttattgtttacaaactgctaca

SEQ ID NO: 89853 - DNA, 1261 bp, Homo sapiens
aacaataagctgattgtaataatgaaatatttctgtcaaaatttgtctgccttacaactggttgttttttgtgacatgctttgtccaactccagaaatgctaatttatgctaatgttttgatgttcatatcctagttaaaccctaatattcttaactttcttatgtgttaattacttatgtgacaatctagttctcttacaaccacaataccacaatagtaactataataaaacattgaaacttcagtatcctaacaccaaatgttattgtttgaatggctctatcttggtctttgaaaagcaattcattgcatgctatgcctaattttcccttgtggcacaattttgctttaatgtggccttattaaaataataatttttaacataagcaatatactttgtatgtgtctggtgtcttacatacactattttatttaatcatgtcaacaactccatgcagttgataccattattattattcctaagatttctcagctattatgaggaaaatttggacttcgtagactctagagctttcttttagccactatacctgtgaaagtgcagattccttctagtgaagttccagggagggaatagtggactccaatttctttggaggggagaagttttggtagtggagctatgtttgtttatgtgctgtttattaatataaaataataacttacactgtcattttatttacagaactatggagatgggactccctatgaccacatgaccagcagggaccttgggtcacatgacaatctctctccaccttttgtcaattccagaatacaaagtaagacccattttaaattaacttacactttttgaatgctcaagttttactatagaaggtaaaaccatgtcctagacagaggttctgcttttagaaacttggatatttagtcagttcacttgtaataatcttaaattgcagagaggattggcagtctgtgtttggtaatagtgcattaaggattaagttttacaagcatatggaatgaaatgcttttagtgatactgaatctatgtggaaattttgttttccttagacctaaagcacggaccacagtttcaatgttgtatcagtagtttcctaagttaaggtagatgaagtcaaagtggtgaatatttagaataaaaatatcactgggcttgttggttggcagtgatatatagtcagtgttaactgtgatttctgctaaaggggttatgaaaataaatggtgttaatgggcttagtgtgcttaaat

SEQ ID NO: 89854 - DNA, 1075 bp, Homo sapiens
cctgcacagggtatttcttactgtggagagctgttttgtgcaattatgagatatttaatagcaactcttggcctctgtgtgatcaatgccactagcaacacccaaattgtgacaaccaaaactgtctcctgggtggctttgccaaatgtcctttgggatgcaaaagccccactgacctggcagtagcgtcctctttcctccaagtctctgcctacttttcatgtttaaaatcctcttttaaaattgaaaagataaaatgagtccaaacaatttgaaatcttatggtacttatagggattcaaatctgttcctccattactttttggccaaattcaagaggagaaatctctcaaatgaatccaagctggctgttataggtgaaaagaaagtcaagatgcgccagacttttaaaagcttgcagtggttgagagattttgttatttatacactttttattttggctgaaaatatttggtttttgtttaagaattaagagaaccgtgtaggctacaaaatttatttatgtgcgaatcccagagggttgtaagtagcttctttgtgtgcttcagttcaacatatacaggataggccagcatgttggattgttaaacagcagatctggggaaggttttacaccttttctctaggcttggtgcagtcccgagagctttcttgacatgccttgaagctcacagtgcactgatttaaactgtccataggggacatctgtttgcagtttgtgttatctgctgaagcaccaactaaaaggaagtgaaataatatttgtcattaaaaaaaaaaagagaagttaatttaatggtaataacttagttgttgttgcttttctatctcttaagatattctgaaacaccatgtactctactgtatcccaaaataaataaattaattatactatgattacttctgctgataataaaatagcagtaataataaaaggaatgacagtagagcattaagagaataaacagtatcactgaaatgtgaggaaacacaataaatgggattgtgtctcctgaaccttagtttcacacttcctcctccacttctgtcagag

SEQ ID NO: 89855 - DNA, 1009 bp, Homo sapiens
tgaaagtgaaagtaagggaagcagcatggtttagaggaaaccttggtccatttttccgtcatagacctgtcctgctagcaaagtcctgggcgtttcttaaactgatggcaactgcgtgtgccctggtggtgaaatggtgttgcagtatgcctgggcactgccctgtgaaaaaggacacacagaggggagactcacagttttgttttcattgctgacatggtttaaaaatgtacgttgctagctgtgaaaactcagtcattataacaccgtacacctttcttctttcagcaagtattccttgtgaacattagcaagtattctattctctgttagaattaaacaggtaatcgtaatagcatgaaagggtgaaagtatgtcttatgcaaaatagcctcttttatatagggcatctaccaattttcttgtgatttttgttttttcctcttttgaaaaatgattttagtctgctcgtgtttaggtaggtaacttctcttgatcccaattttatactttaaatgatcccagatattgcattttaaatgagatgagtatataaaaaataggaagcagaaagcataattaaaaattgtggttacattatcgtgagaccaaatgaccagtcagactcctctgaccaatttcatagaaaataaggaggtatcatttgaacaagttgtaacatatgggaactgttttaaacaccatcattgatatcaagaaactattaggaaatgcaagtttgtgtatcgtgtgtgtgtgtatgctgattttacacacacaggcacatgcacacacatgcacacacacatttataagcccaagtaagagaaacctttgccaatgtctgccaggcatttggctgaagtggaattgtgaggaacattttctcagcctttataaatcacagttgaaatatgtcagcactgttcagtttataaaatgacaagggctgtaggctgggcatggtggctcacgcctataatcccagcattttgggaggctgaggtgg

SEQ ID NO: 89856 - DNA, 1038 bp, Homo sapiens
tcacttcctgccatcagacagtatgtggggaggtcaaggggtgggcagaggagaggcttggtgaaattcagacttttgggccccatctagaagaatctgcttcagtatctcttggagctacccaggaatatgtattttcaacagtgctccagatctgagggacagttggaattaggaaaactgtggctctaactgatgccccagtacttctcaaagtgggtgcccccacatcctgatatgctggatgtgttttgtaactgcagattcctgggctccactgggagtggtggccctggaccagcctctgtcatgtgtccccaaccacactcttgggattcgtatttgtatgaactttagagaatgaactgccacagagattctaggtgacaggaaattgtggggtaaattggaggattacagatcatgcttctaatatcagcacaggtacacacaatcgtcaaaataggggacaggtgtgtttggaaagcttgttttgtaaagaaagtcttttctccctttgacttctcttctttacgtggaagctacacttctgaattacaaagagacagagaaaaaagagaacaataacaacaaaaggttcctgaggcatacctaagctgcaggagccaagggagtgtcccttgttttacttggtgatggctgtttgaacagccgtttgctttctccttcctgtcctctgatgtgaggatgcaggattggaatcattagaaaccctaggttagtagcatcaggctccctgccctgtgtagtctctgggaggacagagctgcagcttaagttgtgcttttgtcttggcaagcacctttcaatttttatcctagctcagttgctttgtttggcattttactggccaatactcctttttttttccctctcttctccatctcctaattctcaacctcttctggggccaaaaacttggaggaaagactttaaaaaaaccaatttcactcctgtttatgtaatcgtttctatattacagaaggctatggtatgttttaaaatgtatacatctct

SEQ ID NO: 89857 - DNA, 1039 bp, Homo sapiens
tactactggtaacatgtgaacagatatggaggtcctctacccgagtattttaataccaaataatagctatatcttctcagatattggtagctatgtcaatggagatgtgaaattggctctatcgatggcttttgtccattctccaagagaggcctgtctttgtgggtggaggtgttggtggatatgtgtatgtgtctccttctcttaccctcttaacagtttggtcacagtggtgaccagtgagtatagagcagagccttgacaatgcacctgactttgggctttagccagatagtatgaatgagtgaagcagatgttaaggagaggtgagtttagggcaactggggcattcgtgccccctcattcattcagttaacatttccaagaatcctgtgcagggcaaataagatctatctcaggaccagcaatatctcatccttggtatgaagataagaagtcaggagacttgagctgtaggtttggttgtctccttgcctggcaggcttgcctaatttacagcaagtagaaaataatctgtgtcttgttcaaatctaaataacaatgctttaaaggtagtgtagaatatttgttaaaaagaacatattaattatgtttttagaagcttctgtaaggaagaaagaagtttgaccccccaacttttctcttttctagaactgcaaattactgctattttaaatagactttgttgtttaactgtacatccaggaaaatctaggaaattaaagaagcatgcatataaatgattgtgtagcagaacatgaacattaaattcatacagtgaagaaattaaagttagaaatactctcaaacataagaaggttctagaatcaatcctttaagcacagtctgagacatggtatatctttgcacttacttggaccttggtttctattcctgtgatgattattggatttgatgccatctgatgtcctgttcctcagattctatgaagctgagtctgagattaacttaggtctgagattgacataaaggggaaccggtccctagatttcctcag

SEQ ID NO: 89858 - DNA, 1023 bp, Homo sapiens
tttcaatcacattgctgtgttttggtcagagaagtaaaaatctagctgtcaatgccaactggagtagttatttaagaatataatatttaagtaggggagtatatgcaaagtaatataaaaatgaggaaaacatttacaaaatcaaatgtgacctcaagtccaatatttttcaatcttctaagtctgttggtttcaccacctcacattatttcaatgtatgtgaaatatatcttgctgtttatatttgggttgatgggacaggtgcaggatctttgacctggggaaataaattggattaaggactagcttaactagtctacagaaactgtagactacaaaaactgaaggcaagaacctactgtcacatcttttgcagagagacaaaggcattttggtatttggatattttacttgggatatgtattttgtgtatttgtgtaattttgtattaatttacacaaacttaagtaaacaatatattaataagattcatcaagtaatttataaattaactttcccacatttttctgtgttcaagaattatcaaggagatgtgtaaatattgaagcctatactatattccattatttgcttttaatgtatttcatataattcagaaaacagtaatttatcatttacattacttcccttttcctattgagccttctgaaagaataatgtagaccagcattttaaaaaaaagcttgtttcaagacatgttaatagaaattttattttcagtccattctgcattaaatattgtaaaacacccctagagagtgatattatttgtaatgattcccaaattgctttgaccagagaactccttttttcatgaaatacctcccatgtggaacattctgcagaagagttttgtgaaatgctaactcagcccaaaaggttttttaaattaaggcctttcaagttggtaatggtatttagtttcttgttttttaaaatagactttgtttaggacagttttctagggtcactgtgccactcatgctgactgtcctgtcgtct

SEQ ID NO: 89859 - DNA, 1063 bp, Homo sapiens
tttttttttttcccaaataccttcttatattctccaccgactttttgggctggctaagtgtgacagaaatgggaactttagttctggcttttgattctctcatgttaatgtaggtttttgataagtcacttggtgcaaaacactgaaacaacttatctattggcttaaatgagtcaacagtctgaatcaaacaggttgtgaattggttaaaataataaaccagtaaccctgtggttgagctcttgatgattaaagaaccagacctaagaatgcatttatagtcttttaaaagagagtaaagactcccacttctttgagctgtgtttctttgtgtagatttctttttttttttttttaaagaaaggcttcattatctgtttcagatctttatagatgttgcaataaggtactcctttctattagtataggattgaaaggatcaaagttaataacttgaactgagatgctttaaaataacaaaatagtttattatctctttccttttcaagatttatgttcttacaagggtacaatgttcatgattgaatgtggtcctactggtaaggcttccatgtaatagaagagtaattcccttgtctagcattctctgggttgttttaatgttgcaggtgaatgtgttctgctgtgcaaataaatgtagttctcttattcacattcctgatgacttgcatccttaaacccttttggtcagggtattattgtcctttatcctgaaaaatgtctgtgattgtagtgccctaatactataaatcaatggggactgaattcagcgcctgctaagtagagtgaggcaaccctttaaatgcaaatgcatcagggctagttttaatgtaattttaataaggctgaaaccattttgaagtagacttaaatcataatactaatcttaaaagactctctatttagctgagaagtccctttattctcactggccatttttcctctgtgtgcatccaaaccacctttcatgtgattccacagtttttcatttctttttttttttttctcaaatagaatatatgtacagtttgtggttacttta

SEQ ID NO: 89860 - DNA, 1049 bp, Homo sapiens
tatctatcaccatttctctttctccacttcattgttagtgtttgtatgattagggtgggcgggggtcttctggatggggttgctcacactccacaaagccttttccctcttctgttgaaagaagacacagctgaaatcagtctctttgccttttcatgatatggggatgcggtggaatcaaagcaggcaggatgaaagcccaaaagcttcctgtttccagctgttttcttcagcgaaggttttttttttttctcccaaagatgatgcttcctttcaaggggtttttaatctgctaactgtttcctcagtttatttcactacagtaaaatgtgttccctttaggtcatatctgtctcttttaaaacccaacctgtccttttcagccgtgttagttgctactcaaaagaacaaacgtgatttataaaagtccttttaatgaggtacaaagaccaataaacctttgccactagagtttcatcttttcagttgctttattttcatttatgaaaaatttgagatgtcaaaaagccattgagaacactattgatttgaccatttaatatttgtaaacaaagccgttaaaaataaaatatattgttatggccttaaggttggttgtggtttttttttcccttccgaatgcagtataatcatatgtaatttgtttaatgtaaattctttaaaattaaggcactggaaactgcataaatgctaaaatgaatactaagagtggcttgatttattaagtgataatgtgcatgaaaatatggcttttttgcactgatgtttattgcttcactttttgcattgatgttgttttggaatttacatttctaaattctgcatcctctagggataaatgaaatataaaaatgaattcttttaatcactcattaaacattaactagacctttcacccatttcctagatcttccagggttctcagtaataatcatcatcattatacattgatttataaaggaatatcagagtgagtcagaatttttctgtttctttatcacttgtctttccccaaatatccatactga

SEQ ID NO: 89861 - DNA, 1084 bp, Homo sapiens
tgttctatgttactcttagttattgttgtcagtctctcactgtgcctgatttatgaactaactttatcataggtatatatgcataggaaaaatcatagcgtatatagaattttgtgctatctgaggtttcaggcatctgctggagatcttaaaacctatccctctcttagagtgagtactgtgattatgtttaaataaatgaatgcatgcttgcttgtggaaatatttttgtgtgtggggtatgtatatgtgtgtgtgtgtgtgttgcatgtggacattttaatgtgtgtgtattatcctagctgatggttttcctttggacatttgggttcattttgtagaaagaaaatgcagttttagaatcaggaagctgattggatgattccatctgaatatatgtgtgtgtataaataaaatatattatcaaaagcctgacttgacttgggaactgggaagtagcagcctcaggtcctcctaggtttattggagttacacttattagtaagtagcctaatcctctctgcaaagagaggaagtacagttttatgatagaatcacgtgggatgaggatcattgaaccagagagaaactgctgctgtttgatttccactgcaggtcatcagtatttcttgatctagaacaatgataaaaagtgttctggtctttaagcaaaactcagatttaggctttatccttagaatctgatctttaaaactggaagcacaagctttccagctttgaattcactccatttcagagatgaagaaaccatttctcaaagaggtgtctctgttgaggtttcacagtgaacaagtcaggtcagctgaatccaggtctagtgttatttcctgcaaatacattttatttttcatttttgcagtaatctttagattaaacccactcctatactgttggattagttaggcacatggactgggtgtatgtttcccagatttgaaggttggttctccatgtcatagttatttgttctggttgcttttttttttttttttttttgagacggagtctcgctctgtggcccaggctggagtgcagtggcgggatctcggctcactgcaagctc

SEQ ID NO: 89862 - DNA, 1036 bp, Homo sapiens
aacctggggcaacacagttatttaatttctctgtaaaatgaggataatacaagtccctgcttcattgggctatgggaattaaatgagtgaatgcatctaacattgagaacagtgttcagcccatagtaactgctcagtgagtatttttaagctattagcatgatcaaatttagagaggagaaatataatggagcagtttctcagttcttgttagaaataatcattacatttgaaaatccaacaaaatattaacattcaaaacccattttcagaagtggtggtggtagaattgctataacggaggaaaatttaggaatggcagcctggttaaaagaaagggcgggtagacctggagtaggttatagatcaatttaaagcagcaaagttttctaaaggtgcttctagttttactttaaatgagtttgcagttgcacatatcaaataataaggtgttatttgccagaggcattttgttggtggggggtgggagaaagttttggggtatattgtgtgtgttgggggtacatttccccggctgcctttttccactgctgctggtcctctggtcaggaagcctccctgtcccgcactggttctgttatttgttcttggatagcatcaacttgaggatgagactttataggcaacacattagcctcagtgtctcctcctggttgtagtcatttcccggttacatgggtcagtttctccaccttacttgagtgaatgcctagaaaggctatttcagcctagagaatttttaggggaatggagaagctgagggtaactcctcagcaccaacacttgaacccaatcaatacttgatagattactcccagcacacacaatacacccagaaatcttctccccaatccacacccaattaagtttcagccaaggttagaattcagtggttccctctgtgtgtgtccccttagctgttgctgttcaggtgcaaaggtgttcatttctttgtctacccatgtgtagttgcctgatatccaactaaactgcatcaaaatatggaacccctagg

SEQ ID NO: 89863 - DNA, 1115 bp, Homo sapiens
taaggggcagactgagcgctatatctggagttttactttatgaatgtgcacctttaaccttgagtcagaaaatgtggttactgtcagtcttactcagtaagtggtgctgcatagaacatcagggggagacttggccttggtttagtagaaacttgaaggagacaaacatgaaaagcagtgtcagaaaatggaagaccagtgttaaaaatctttggttttgctttcatttctcttggttatttcttaggattattgctttagatcattttcccaggcattttcatggatgaagaattccaaagaaagttattatttcaactcttgaaagctacgcttcagggtgaaggtagggcttgattatcaaaggaatttccctggctgcagtcctaacagtttaacttcctgtgatttccccccgcccctttccctttatttttggctcagaacttcagtaatgtctggattgatggaattcctctgggaggcagatttgagggtctaaaggtgcttctcaataaagattttgaggaatgatattaacttattagaggcaaccctctattgttttagtataaaggggatgagatttgggggaatcattttggatgtcacattaagccactagccattttactcttgatgaccttagttgcctttaaactgtatttttagtggggatcattctttcaacagtccattcttttttaaacgcaatttggtttataattctgggggctgcctctacatgctgtactgtcaagagagacatcaaatattttctgagtagttttcaacacagtgaattaaagctgaaaaaacaagtagcgatactaccagcatcttaactgagtatgtggtggtggtgtttgagtgtttgtgtgtgtgtgtgtgtgtgtctgtctgtgtgagtgttttatgttgctgtacctacttgcttttaggtagctacagttttaccagagaagagaataacttagattatatcaaagtttttttttatataatggtttaaaaacctgccctgtgtctagtactcctttacgaagtccgcaagacttggggataacagtggacaataatgttccttaaggacttacagaaataagacacacaca

SEQ ID NO: 89864 - DNA, 1039 bp, Homo sapiens
aaaaaatcctccaatgactttttaaaaacactgttatgttactgataaactgatttttgtctgtgtcccttcgtatatattcacacaattttcatatttctgggttattcatccttgcttcacatgtgttatctcacggttaaaaaaatttttgttggatgatcaaaagcaattaaaacattcttattcagtgcttacatacttttgtgttctttttctgtgtcattttttcatatacagaatatgttttccaatagtttacattctgaattttttaatgaccagtgttaaactgttagacttaccatcatttacttaagtctctcctacatatttggtgattttggttatttctgtatctttgcacacgttttttcatttttgtttctattttctaatatgcagtttttatagcttcttgatagagtctttgaaattttgtttctgtgaaattgtgtagtttcatagaactaaatttgctctacttaactgtacctgatgaattcatattagctataaatatttaaacattttatataacagacagcaaatcatcatattgctgggaatgtaaggaagataaactccatgcattctagaagtcattagagattttgcatataaagaccacagctagtttcaagatctaaatcttgaagcaggcattcaaggtgtttcaataagtacttaacggtaggccattaattcatgtaatcatttaggataaatgatgggcagaaaagttactgtgcaaaaagtattatttggagaataatggatatatgaaaacttacataaatgattatttattgtaatttttgttactttcaatttcttggtcatggcaaaaattgaaatgcaaggtcaaacagaagagagatggagaaagctctaaccagcaagggcctggactctcacacttccctgattggagctgctgtgtgtgtctgaggagtcaccattgctttactgcttatacctaaacagaagtatatgtagctttgcttgcactgaggatgtttataaatcctctgggttt

SEQ ID NO: 89865 - DNA, 2412 bp, Homo sapiens
atgagactttagaaagaggatgacaaatcctgaggactcgtgtcttaagcaaattttctgtctagatatttattataaacctaattgcatctgataagtgctgtgtatgtcatactctatcaaaggtaaaagggttattaaagtaacctgcactttttagagcaatggtggatggccttgcagaaggcacatggcctttatcagtcaactcactgtggggaagctggagaaataaagttcaggtgagagtaagccgacagttctggtgtgattttcttgggaggataacgtataatgtaggtagcaaacacatgggagaaagaaggttttgcattatgagatttgacttaatgtgtacagtttgcttttggtgttgtaaagcagtaaagaggcttattgacatctctattgaaggtcattgcagtgcatgaaatgtaaatcaaagtgttattctttattagaagctagaagataacatttacataacatgcttttaaggtaatgagttaagttcattattttttattactataactgtttgaagaaagttattttcatgctaaaaatactcctacttgaatccgatttgtcataatttttgcatgatgtataatctattgttaggaaacgataattccatttatttttgtttctgggggaaaattgttagacagctgtttcagtctttccaaataaactcgcttccagaattcctagtaagtagcaatgctggttgataggaatgtcaccatttttctgacccccctcagccttatcacaaagacatagtgcagaagccatataagaaatttgagaaaaggaaaagataccaaggcctaggtatttcacaaactggataattagactctgaattgcgacgaataggctgaaagaaaaaaatgtcacaagcctatagtggcttaaggaacactgatttcacagtgaaatctttctacataaattttatggttaactggtaataggaataaaactgtggagcaatgtcagacaattctgttatgattcctgcctaatgaatggcaggctttcccttggtattttctccttaacctgcccattgccctttctgtatgatcacattttctttaaccagttctttgctcataaataaagccgtgtgttccggttcaaaagttgcatcttcatttataaattcacagaatatgtttttcagggaaaaatgtaactcaatcagctttgcatggtttacataatgtgatagtctcatatttactatgtggttaacaagaaataactgttaccaacaaaaatcagagaatttaaaaacaacgaacattttgcttgggagcctatgtatatctctatataaatacatatagacatctataaacatcatcgatccttcccatgtgcacatgccatatatatgtggatgtgggatgatacttgtttttatatatacatatctatatttatatagctgaagaagtgaaacatattgctttttatttaagtgactcaatgcgtttatagacaagctttattttacagtactttatcaatgccgagatgataagatactgctttgatttggtcttctaaaggtcaaaatttgaaagaataaattgattcctagagacattcttatgctatcattggccttatattgaacagagaatttctaggaaaattattattcctcaatggaaataaaaattcattttaggtagcttaatcaatttgaattattcatttatggcattgctttcaattgttgatgagtgtatttgtgtactgggtgtggggaggtcttcaggggatgggaaggtggagggatgagaagattcttatagcactaaactgaattttcaattccctgctaaagtgtgaagaaagaagtgaagtgcttcattttcttctttttagaatcatttagcaaccacagttcgtactttatattttttatggagtactttcaacaacttgcttttgcagttgggaaatgacacttacctggattttcttgggttctttattcatgacatcaatgaagactactgctaatgaaccatagatgaagttacacatatgctaagcagggaaatgcaggaagaatgtgaaggtcctagagtatctcaattcagcatgtaagtgagttgtgtgcacagtagcacagttctgtcttatggctggtcaatgctccatattatgaatttacataggctttattttaggctctgaaataattatttttattatatttctcaaatttgccaaagtatctctgagagagattcagatcccatctgtttgacagctgaggaaatggggacagttggtacaatggtttctcaacattagaacacatctttttttttttttttctttttttgagacggggtctcactctgttgcccatgctgaagtgca

SEQ ID NO: 89866 - DNA, 1020 bp, Homo sapiens
tctgtttcaagaggacccttctctatagatctgtagtttttattagttataatttcttcacacttctgtcagaaatgtttgctgttaattttgaacactgtttttcatgtgaatatattttttaagtggatatctttttcattttgtttttttcctcctggcttttaaatatatatttaaaatatttttatccatatctaatttttgcaactttcaaaaaaactttctaagcagtcacctcctgaccctctttttcccccttagctgtttcccccccccttttcagggccacctcccctccttcagagcccccgcataatgctattcctttaccgtccagccatctgcctgttttagcctcttcttcactctctctgtttcttctatatagatttccccatatgtctgcttcttcctttatccacaagtccagacactcctccatagctttcttaccaccccatcctggtgtcccgtctgttcataaataactctttcatccgccttgaatcccaaccccctactctttctaaaaagagtgtgcaaataaacctaaagtgcacggagccaagatgcatagcatagttttgattcagaatagactttctccttccaatcacctgttttagtccccattttttgttgcttggcttctttgtacagatccacaattgccgttcaatttttgtatgaaagtggatgcaaagttatttaatgtcttcatgacaaagtttttgcctcttactggcaggttattttgccctaatcagttacacagtcttgtgcagcctagtggttgctattttggagtagtcaggtttgaaccttttgttcttcagaaattaacgtattatctcagaaacagcagtctctgcttgcgtgcttggcaacacaaaactgcgttaggtccttttctaagtctgagttctaggacatgtgccatgaaaggagtgttaactgaatcacctgcagaaatggccacaaggagggctttgtaatgttctagatatttaaaatgtt

SEQ ID NO: 89867 - DNA, 1756 bp, Homo sapiens
aaactcatagaatgccttgaactgataatttgtttaactctctacctactaattggaccaagaaataactttgtatctttatctcttttccatttcatgttttatttctgtttcaattagtgtgtgcctttggcaaaaaggagatgattttgctttctgttttaggatttgcctccaagaaaaaatatattttattgccacattttctcaattgatccagtagagttcacagacaatgaaaagagtaagaaaactaatttttaaagcttggtagtgttataattttcttccttataataatcagaaaaagaatttgtataacttttgtttctaatatagcagttctgaaaatctaggcttacacattttccttcccattactgctgtttatacttaagtaaaacaaaaatggtcgctgcaggtttttttctcattttagtgcagagtttgaattcttcaaagactgctaaggttttcccaccttaacaatttatgacagacccttatatcttcataggctgagtccgctgctaagagtttgctaactcatgactttaatacaccagtagagatcacactggagttaaaacaaagagagcacgaaccctgaaatgatttaagactgttcttagctgactactggaacacagtgtctcacgtggtgttattggtaaccttaatgcagattataattctgtagtttaaccaggatgtgttggctatggtaaagtgcctttataaggaattgtgaaagggcacaaggaatggaaacagaacctcagttttctcagtgtaaatgatgatgacaagaattccctgtgcacatttgttgttgtgagaaagggtgagatagaatagattggacacatagtaggtgctcactgttagtttttctcattcattcattactgtgtcattctattggcatgctcacagtcatgtagtggaatatgaagttacatcgtgatatttttcattcattcaccactgtgtcattctgttgacatgttcacaggcatgtagtggaatataaagttacatcatgatattttaaaagctaccgatgtggtagatttcacagtcttgaaaaggggttttttttaagctgaattttcagtttcacttgagaagagtcctgatttgcttgtacaaagagcagtagggttgcagagaaggaaagaaggcaactcttttaagtcccagccgctactctgctgtgtcttattctctaaaacagtgaagaagtctgggtggacattctagtggtcagaagcctaagctttgtcttttgatgagtgcagacaggggagggagcaactgacgagggagtagaggggcttggagccccttcccaagtctaccatccctcacttatgtgtctcttcctcagtaaagcacccccagtgcccttatttgctgtatttttcttcatggaacttactgtctatgggacctatttgtgcattcatttatggtgtgtctctgcattgctttccctttcactacccatgtaagttccatgaaggcccagtcttaagcattacaggttgagcgtccctaatctgaaatgctccaaattccaaaacctttgaacactgacatgagatagtgacacctttgctttttctgttgttccaaagtacgcaaactgttttatgcacaaaattatcaaaaatattttgtaaaattacctttagcccatgtgtgtaaggtatacatgaagctgcatatgaaacataaaatacatttcatgttg

SEQ ID NO: 89868 - DNA, 1260 bp, Homo sapiens
tgaatatttagggtaaggcactgatatgtcagtaggatgaccaacactaaaagtccagtatcctgggaaacctctgtctttggtagacctggattgtcaccttagtcttggattccttccggagactgaagaaatcctttaaaaactttcctgctgtggagtcttctggctcaggccccaactacagtgttacattcagacttctttgttagaacaaagttttacatatattcaaatagtaaggataaatattaatctgtttagaaagagagccttgaaaggatcctagtctttttgcataggaaaaatgtccccaatcaatgagaaagtctaggagcatgatcaagacttattttatatagtttgtcttttagggggtactggtggattatacttttagagttacattcagtattattgtggctggactaaaaacccctcaagaatacatttcacattgattttattatagacatctgtcaagcaaagcagaggcaaatgatagcatactcatttaccagtaatgcaaatcaaatgagctagtggcaacaaaatcactcctgacacctttgccctttttctcttgatttgaactaatgacgtgtgtgtgtgtgtgtgtgtgtgtgtgtgtgtgtgtgtgtgcgcgcgcgcagactagcaaaatccagactagcaaacaaaggccaatgacaggataactttcataccttcatgcctgggtcactcaccatgtacgataggagcagtgcattctcttgtgaattaaaaatctatttatccttcctgggtgcataagtcccatagaaggctgggaggggaagtggaactctttatataggaggggcttagacctcaatagcctgtccctttgaatgacaaaatgcccaccagccttgccacaaatagcttctgaaatatgagaaccttttttaattcttaagatccttgaccactgcaactaatgtaaagacacactccgcaacaaacttatacacacacacgtacacacacattttattctgttttataggaatggcagtctttagcagtgcataatttttttattattattttgtttgagactgggtctcactctcactcaggctggagtgcagtggcatgatcatggctcactgcagccttgaccccctcctgggctcaagtgatcctcccacttcagcgttttgagtagttgggatcacaggcacgtgccaccacgccttggtagtttttgtgttttttgtagagatggtgtttcgc

SEQ ID NO: 89869 - DNA, 1111 bp, Homo sapiens
gctgttctttattttttcttctgggaactatatattgggtgattcttttaaaaaatgtggttatatgccaacattatgggaaaggaaaaaaaaacttaccagacttttcttccatacataatccaaatttcaaatgtattaattttgccgaatgccatggcaacatacatatctgtttttcagttcatgaaaggtattttgggaattattggctcatgcatgcttgagcgttttcgtctttcagctatagaaatacactatgtatcctcttcattttgtgtttgtgcttctattcaagatgagaataaaagcagttagtttctgggttgtaatattcttcagtgaacggtggctttctaaaacagttacaccttgactgaaatgaaaactctgctgtatcataaaagatattctaattactgcatctagttaaaaggagaataaatcactgggagattattttaagtgccttaaatataataaaaaagaataatggacgttgaacagcttgacaggtttgatgaatgcagactatggctgatttctgctgctttctaatggaaaaggagagcattttactttctaggtgtattgtcaaagcaaatttttgttagggaagataaggagaagccttatctttgttgagcacttgccttgtaccaggcattagccaaggcagtgtattatctcatttaatttcatttaatcctccccaaccttgtagataatgttatccccattttgcatctaagaaaaatgaggctcagagaatttgaataacttgcctcagggtatatagctgcaaagtaggatccagactaggttctttctctttatttcattaccccagtagggttgtgatgatgatgtaaatataaatgtaaatataattgtctccactgttacaaagatactaatttcatcccatttaatttagaatggttgtgtccaaacaattttaacttctttgagcctctgtaaaatgggaacagtcaggtcactgtgatctaaaaggagaatatatgtgcaaacctctttgcttagtgcttgacagtaaatggggagtgcctgggagatttgttttccatatcatcaacagacaaatgggtgt

SEQ ID NO: 89870 - DNA, 1033 bp, Homo sapiens
acttgaggccaggagttggagaccagtctggataacatggcgaaaatgccatctctactaaaagtacaaaaattagccaggcttggtgctgggtgcctgtaatcccagctactcgggaggctgaggcaggagaattgcttgaacctgggagacggaggttgcagtgagccaagatcgcgccactgcactccagcctgggctacagagtgagacttcgtgtcatagaaaaaaaaaaagaataacatgaggatgtgtttggtgttggcattttggtcacattgaagcagggagggaatggacatttctttcagaaccatgcagccctaaacgttaaacagagaggtttttggggataagtgttaagattttgatgtggatattttagaaggttgggcgtaacagctgattcaacccttttttatcaccatcaatgaaaagggctacataaagatttaagaagaggaggacattcttttctccacagctggtcatgcgcccagtgtagttggcaggaaaacggattgtttggaatgtgtccctaaaatcctgtaatttaattttcattatttatataacgcagtccgtatatgtggcgctgtactacatgcacacaagaccaaatttctggccagtgtaattttaccaaagaagagactgtaactgaaatatttgtacctactaaattatctgcagcttggtaactcaccgttagggagtccatgtgatcccaatcagcaacagggattggaggaacgcattgttggcagtgaaataaggggtcaggaactagaataaatagtgctgggatggtaaacgggcccatgttatactaaatgtaatataaagtcactgactttgaggagtccagaaaaataagtttgtaaatattgacattaaagtagcaaccagtttgcatgctactatgtaaaaggaaactattaaaataattattatacgtagttttttgcttgcagcacttgtttcattctgttcacttttagaaacacaaattagaaaggagtgagtctcttga

SEQ ID NO: 89871 - DNA, 1057 bp, Homo sapiens
gatttcttttagtcattaaatctgttctgcaaatcttttttaaaaaaattatgagtgactttatgttttgttttagataattttatcactaccatctaactaatttttctttatgtattttcaaaaatttaataatgaatatgattgcaatatgctttgagaccaggatagatgcttgcttgtttttttcttttcctttagactatcatcttttacatacctttctctttctcttaaagtaagtggaaaaattggattcattgaattggtcttgatactatctagggttataacatcctaatattctgtgagtcttattttaggacttgcatatttaatacagtttttaagtctttgatctcctaaatatgcttatagcagccgctaccttcaccacacccaaatccttgaatgttatgatacatcatactactcatgctggatatttactgatctgctgtgttcaagacagactgctgagcttcgtaaactttaccacccaaactaaagacagagagtaaatacataaacacagggagttggggacttggctgaaaattgccacccaaagcttgaaatttatttgcatgctggaacaaagaatatccatgaacttgaaactcaggatgacgtatgtttgatgtttatcctgtatcattatgtattctagggcaccacttctgtatacccagatggaaatcccaattttaaagcaatgctcttgggtattgaggggtatatttgcgaagtcacagtcatcatttattccatgttcccttgccttcttttctgtcaagtactctgagagtcttgatgttgaggatttattggaagcaaacgttgttacctaaatgaagtctagtgaacaaaaccaccaaaagaggacatgaagtgactgctatgtatgtatatatgatatatttttcctcagaattatctaagtgctttggttggttgcaaatgtggaattttgctgtttgtctctaagtcactcttatagaaatgatctgtgtgtgtgataccataggatgtgcttccactgggctcctgagcagtg

SEQ ID NO: 89872 - DNA, 2056 bp, Homo sapiens
ttgggaatgggagaagtaagtgatggggacaagctaaattttaaattactcttaaagtactttgtttagattatattaacctgtcaatgtgactaaaatgtcaacagaattctcttaagttttacagatttgtagatgctaaatgctcatgaactgaactgaataacagtaatgaggtatgatgatttggtaattttattttaattagcaacatgagtaactttaacctttatttaagaaaataaaggtaatatacacatgtgtatttattatacaatgggaaaagttccctttgaaattctccatgtggtttggtgtattggcttatgcctgtaattccagtactttgggaggccaaggcaggtggatagcttgagcccaggagtttgagaccagcctgggtgacatggtgaaaccccatctctattttaaaaagaaagaaagaaagaaattctcagtgcaacagtctttaaatcatgaaactgttcagttggagaatttgcatttgcttattgatagctgcatatctactattgtgaatttaatatcttatttatttacatttatgaatataatactattgagaaattaggctctattctttttacagtggcatttttactgattgatctagtctcatcaaatataactgagatgtggaagccattatcatagttcttaaacactattgctcttgagcaggggatgtgagatacagagcattgtggaaaaaaatgctattctggaaaaccactcactcctttgaaagtcaaagagaataaacaatgtggaatttgaaaaaaaaatcacactgaaagataaaggtatataagctcacttaactattaatgatacaaattaatctgcaaagaattaaaagcagctttgttaatggcagaagacacatgcagttaataaggacattacttctcatttggggttagattggcttctcctttattaatatctgtttaaactacaaatagaaagaactccattcttaccagacttcttgtcacaagacccagtctctaaagagaaatatcattgataggaaaccagaaagactaaatagatgtatttggtctcacaggcagtccattaatttgctcaaattaaatattatctttaaatattgaaaggttaaatgtacaccgataatggatttagacagctattaagctgtaattgctttctaatgcagttactaaaagacatttgatataacatattgagaaggaaggattagagacttctctacctcagttttaactgagagttttatggctttaattctggcagttgtaggaattggataacaacagtttttatgagaacgcacacaatatgcataaaatattcagtgggcagattgttgagggaatgcattatgtacagtgtatttatgttcatagtttttgcaaatctgtaccagcagtactatcagatcaactattcaccctaaatatttttctattagatctaaaagtcgtatttctgaaaatgttaccattttatggtttcgacccctctaagctgaattaatgtgttttgtgccctggatatatggttacagtagtgaccaaattaatttgaaaacttctcagtctgttggagagtcacatctagttcaggtagtcaaactgatggctttccctgcctgggtaggcagctttctttttagtattcgcattgtttgaatttgtagtatgagattttcacatttttacaggttgcattttgtgagttgagtgtctagctgtgacaaattattgttaacctaagaacatatgctgattgatacagtcagccacttgcctccagagttcaatggaaggacaaaaaatttttggaaaagaaatatgaatgagagctaggctcttcaaaacatattttcctggtgaattatttaaacataatctaagtatgagtatgggtcaggaaaaaaaattacctgcagttaagatatcaagccaaagtattttttgaattgaataaagaaagggaaggaaaaagcctgctgttgatccctgtcactcatgtttttgtattaata

SEQ ID NO: 89873 - DNA, 1105 bp, Homo sapiens
agtacagtagtaggatcctagctcactgcagcctcgaactcctgggctcaagtgatcctcctaccgccgcctgctgagtatctgggaatacaggtgtatgccaccatgcccagctagtttttcatttttaaactttttgtagaaattgaatcaaactatgttgcccaggctggtctggaactcctggcctcaagtgatcctcccaccttggtctccccaagttctggcatttaaagaactcagcccagctcatgtaatttttaaatattcccactccatgtgattacttcagtctggacatgtcagactgaactgtcatttcagtttacatgtcaatttgtctttcatgtaaaaagggggaaaataggaatatatgcttatattttgttgtatctgcatttaaaaaaacacaagaaaccaaagtggttacctgagtaggggtggggaaggcagtaaagaatagtgtgatggggatgagacttccaaatagataactttttgtattattttgacccttgaaccatgtgaatgtattttctctaaatatatttagatttgtttttgaacaagaaaaaaattgatagcagctatgaacatttttttctttttttcattttcctccttgatataagttacattttaattgtcttttggattgttttcttcagaattttaatcataaaataaatgaaataaataaatgcaatcatcattccattcctatcagtaatttctattagtgtggctttttctgtgtttgtttttgtcatttagagatggcatctccctatattacccaggctggactccagctccagggctccagtgatcctcttgtgtcagcttcctgagtagctgagactacaggtgtacactactgctccctactttgtgtgtgtgtgtctgtgtctgtgtctgtgtgtctgtgtgtctgtgtgtttgcattagtttatgggcaactagaacacgttagatgcttttaagcatcgatttggataaagaagcagtattaaaaatccaactgatgccatacttcatggaagaaaatcattgcattaaacaggaattacacataccgatatgaattagttgatccaatggtcct

SEQ ID NO: 89874 - DNA, 1076 bp, Homo sapiens
tatggaaaatgtgattgggtgagttggttttattggactggtagggtgtgcccttggccaaaccaaaggccagagggtacaaggaagtcagggggacacactgctggggagatagagagggggctgcccagttgtgaggggaactaacttcttgtccagaacttccctagggccttccctggctcttgccttctttgctgtatattttggttactggcaggacactggttcaaatatacatttccgtggtttgattttataaagctaaaaaagcctcatgctaatattcagtctcttatgttatgaatgttaccattttacctcttagctatataggtatctataaaggacattttttaaaaatgaaaatcatccttcctcagtaaagaactagagaataaacatgtttctgaaagtagaatgatgtggactagagcaggggtcggcaaactttctctgagaggggccaaatggtaaatctttctggctttgtaaccacagactctctgttgcaaatactaaattctgctgttgtagcatgaagccagttatagacagcaaagaaaccaatgagcattactgtattttaataaaactttatttgcaaaacagacagtagttgtattttgcccaggggactgtagtttgtagacccctagatgaaagaaatgtatcttagggcctcccctcttagccctttccatcatcagcaatgtgatcttggacaatatactttaagtcttaatgaatttattcatttgaaaaactgacattttattttagatcaggcttttcattcactaattttttattgctctggacatcactttgaggtcctggaatttacagatgagaaaaattaaacaatgaatgaggacagttttcttgtatgagggatttttgttttcttcatatttttaatgtgtttaatatactggagtgagcatgtcttattcttgttaacagacaagctatctaaaaattaaaacacaaactaaaagtagaggaagattgttatgagaaacatgtcatgtatgtgaaatacattttataaggaatagattagattctttatg

SEQ ID NO: 89875 - DNA, 1146 bp, Homo sapiens
atgtagccaaattctggaaatctaggttcttttgcaatgtttgctggtaagtagctgtttcatattgaggaagtggtagaatcttaaaggctgcacctcaaaactaaacaaaatcgaaactcaccagtacaattcaagaggggttttcacattttttaaaaaggaatactgctgtatttaaaacattttaagattgcaaaaattcatcattataatttttattatcatcactggcatcaccatgaccagtgtcacattgtttggtcaaaagctggaatggaaatgtgatagttatctttgccatattatatattgagaaatgcgtttaaaacttttccggagataccgtgatcttagcaaaaactaatgtaatatttgtaaaaacattgtgaagtggccagatataccttttaatgaaactgaccagaagtacatcacaaatagaaaaatacacgtgtgtgtgtatgtgtataccatcccttcccccaaatattgttcagattaaagtgtctttctctctgtgacctgcaagtatcttaacttagcatgtgtgtccaatttccatagtgaagccaaaaattcaaatgatggttgatattggcttaggaagaatttattaatgaatgactgtgcttggtatagagtaaaaaaaaaaatttatgacaaagaggatattctagactcatgtaaaagatttcagttaagaacctatgaattcctcaacctttttcttcacttttcaaaaagtaaaggatttatattggaaatattttgcaaccctacaacctgaaactcaaagctttggtcagcaggtggtaataatatttccaggttgaatatccaatttcatacataacccaatttgtaagtttgaaaagaaatattaaacgatgtcagttttaatgcttgtttgaataattgttctttgttatgtgccctcttggacattattgtccactagtgccccaaaccattgaatgcttttctgttctcttatggccactgtgattcttcaatctagttacttctaactgcaagattaattttcttctgacatctaattttcccctgattttattaacatcttattattctttttctggctcattttgaacaatttctcttttatatggggtgtatatttgt

SEQ ID NO: 89876 - DNA, 1208 bp, Homo sapiens
ggaaactctctcaaaattccatcacttaatttaagagcaattttctaatacagttgtaatcaaacacatgaagataagaccagtgttaacatggggaataaattaatgttttctatttgaaaataaggggaaaaaatctctaacattcataaaatgggaaaatcccttgtaaataatatcatttattaggtactgtatacaattaacccttttaaagaaatgaacacttaattctgcaaatgaatgctatgtagtaaaccatagctgtaaatagcctcttgctaatcttagaggctaaatatgaattcatttatatttaaaataccctttttgatgctttagctgtttttttttccctaacgatttacttgtgcaatgaatttttactgtatttaaagttgcaaatctggaaggacttttacgttttataaatgaaagatctttgggtgatgcttaaaaaagatgctagcactattcacaaaggaatctgtgtgcacagtgattatctggaatctaaggaggggtttattacagggctattcgaatatctcttattaaaagtgcagagtgaaaatattcatttaaaatgtattttttttaatccaatgaatttcaaataagaaaaagttatacattgttgcctgctatcctttaagtccgtggcttaagtccatttatgcttgttaaacagctgcagtattttaggagttctggcaatggtatataacagtacattaggccaagtactattcttaagtcagactggtaaatgttgacatcttttaactgtgagatgccagtggaattgtctgtcaactatgaatataatttaacatcttttaatattcatttggtgctatagcaatgaaagaagtttgttcacttatgtgatttgtataattggtatatttttataaaactaatggctttaaaagttgctcatttccaaataagttccttctccttctattgcctgcctaagtttagggaatttgtgtctcgataacttgttttaaaaaatgtgagatgcttcttgtatttttattttagttttctggtgcacattgattaaaaggaccattgacagacaatatgtttgtgttttactatcctggacctggttatgttttccacttagggatttgggatagtttttatattagtattatatctttaaatttctgtatggtatcctctatgcaactttt

SEQ ID NO: 89877 - DNA, 1022 bp, Homo sapiens
gtgtgcgaggggggtggggtgcagggtggggggaaagttgagatcggatcgttctcagtagtttctcttttctctgtgatccattcatttctcgctctacctcctgttgcataaaatgatgcgctgaagagcggctttttttttttctttccctgatttggttttatagtggatgttaccagtttgatcgtctctttggaaatacaatatcgctttttttttttttttttttttttttttttttttttttgctattgctgcctattccatcttaaaaaaacaaaaccaaacccaacccaacaacaagtctcccatcccttcctcctttccaccttaatcccacccgcccccacgtccccacccccaaccccccagtctccaaaaatccgattgtgttttctccaaggattgggactggattttctgattgcggttatttccatgtttctaggtttgtgtgattttgctaaaatgcatcaccaacagcgaatggctgccttagggacggacaaagagctgagtgatttactggatttcagtgcggtaagaaagaacggtggaaactaacaacagctgtgaaaaaaacaaaacaaaaacccaaacacttcagctagaaaccagtaggaatctaaaggacagtaataatttttaattggctgaatccttggtaaatatgaaggtctttttgacaagtttttaactataattttgtggtgtgatggaagattcaggcttttttttttttttgagttttattactggccttcaattccctacccactgattaccccaaataatggaatctcaccccagtggaaagcaaaaatagacacccctaaaactaaaccacccctaaaacttggccatgtctgaacactgagactactaatactttgcacactactcttcgttttatttattgtttttggaaatggaaaatagaaaataggagacccagttgtctctttaaagttttaagctaatgatgctttggattggtaggacctgttccttacatctta

SEQ ID NO: 89878 - DNA, 1005 bp, Homo sapiens
tttaaaatacagtaggaataaaacaatacaatgtattaaaatcacagtggtcttagtcaaggcccattaacattgcaaatatagaaatctatacacatatctttattcggggtttgtctagtttttctctcctttaggcatttcggaaggcttggaatatggtgtatgactttgaaatgcactttctagctgtcgggaattaagtgatcagggacagtgtgtttttgcattatacaagagaaaaaagaatgcagtttgttgctgccttatatttttcttctttggtggaaatagaaagctgtgggaagaatcaagaccagttcacggcctaataatgagatcaggttgaagatactctctttggtggattcctcagagctctccttccccccattcccaagccccactgtagtgttgggtccaggaagaggtccaccctggaattccccaggttcctgatttgtcaactggctgtttcctgattgcaggacattttggcttgagaggaaaatacctaatgaaggtcagggagagaacactcaggccttgtactagtttgttttcatgctgctgataaagacatactcgagattgggtaatttatagaggagagaggtttaattaactcacagtttaccatggctggggaggcctcaggaaacttacaatcatggtggaaggggaagaaaacacatccttcttcacatgatggcagaaaggagaagtgccaagcaaaagggaaaaagccccttataaaacaatcagatctcgtgaaaactcactcactatcaggagaatagcatggaagtaaccgcccccatgattcaattacctcccactgggtccctcctgtgacacatgtggataatgggaactacaattcaagatgtgatttaggtggcaaaacagctaaaccatatcaggcctctagtggaaggtggcagggggaaaactgtgtaatgaagcatctgaaaacagaaactatagttccagtgtagccctgac

SEQ ID NO: 89879 - DNA, 1840 bp, Homo sapiens
tgtgtttcccaagtaatacaatgatcaataatgctctcagtgtttatcagcacaaaatttacttgtgatagagataatgccagttccccttctagtggctcttaaaacctgaatttcttactcttatccacattcttttatatgaaactgcctttttatcatcttgctaccttgtgagctttctaacatggtgtctttggaccaaaggggagttcttttaaggtactagaagtgagttttcttagggtgggaaaaacatttctaggattgtgtgattgggatttcagtggaaagctttcaggtctctcatgaatgatgttgacccagctatgttatattttagaccagacatgtactgatgacctttatgagttttgctggtatagatactgccatttagaatagaatcaatgtaaaatacgaaaattaaatatataaatgtacacagaaatctttctacacaaacatacattcagtattttgcaagtaggtttctttcaaggcatttttgccctaagaatacattatctaatgataaactgtaagttgtcagtacatttctcaattagaacatagttttcaaactctcctgcagagaatttgttttctagatttgttggtagagaacaaatttttattcttcacatttttatgctgccacatatatagcaaccagaatgttttttataatcctccagtagaggatttttctaatcattgacagaaacaaggtttattcatttcatttttaatagtactcttaaagtaaccaggatctttttcttaaaccagaaaaaattagtcacttttaatctgttttcattgcatgtcagtgtattgagggggaaagtctggaaatttgctatattgggcatgaaggacatgagtttaacatacgcttctaattccagattcttttgtgatcgacatttgatttctaactatctaaaaatagtatgtcaaatatgttttactcatatagcatcattttttaaattaacttctctaaactttcaaccttgtttttaaaaattgctatttaaaaaaaaaaaaaaaactgtgtgaaaccaaaaatagcctgcatgtgttttatttttaattccttgtggctgggattggaggggaggtcacagtttgcttcaacagtgaaaatacattgcatgccagaaaagatccaaggataaaaattaataccaaggttttaaactgattattagtatttttaataactcatatttaaaatcaataggatgtacatataaacttatttttgtttttctaggtagttggcaaaaaaggagaaagccactaaggtacaaaagacactggacaaccatattgcaatcagatctacagctcctggataattgcttgattctcgccagagactgtcaatgtttcattcattgccattaccaataaatcattgcttttgttcagatggtatcactagtgtttccattgtaatcttgacacatgcaattgtaaataaaagtcaccacttttgccaagcttaatttttgtctttctaaatcagtattttctctttccatgtatttgaaaactggttaacttctgattttagtagagacttaagtgtctggtagtatattgattgaaagccagtttctttagaaaaggagaaactgttctagggaattaagaagtacatgtgtacacattcatggcaagttattttgataagtgaacctggaacagctaaccatgttaaattattactgcatttttattaaaggacatttgtatatctgagctatggaaattactcaaattataaattagaagaaataaacaggtttaatgagatttagctactctt

SEQ ID NO: 89880 - DNA, 1170 bp, Homo sapiens
ggaggctgaggtgggaagatcgcttgaaccctggagttcaaggctgcagcgagctaggatcacgccactacactccagcctgggtgacagagcaagaccccatatcaaaaagaaagaaaaataaaaaagattaacaccaactaataataaaatagagcaattacaacaatatactgtggttaaaagttgacatggatatggtctctcccatgcttgctctttctctcactgtctcaaaatatcttattgtactgcaccataggcagttgaaactgcagaaagtgaaagcatggataaggagggactactcttcagtcatgatctctgtctacagcagtttatattcttgtagataacatagggacaaacatagggaaagttaatcaaaattaatcaaagcttagttcaagggtttctttgtccacagagtattctcagacgttaccagctaggtgacttttccttttcccccaacgactgggaaagtctgagaatactttgtgaagaaagagggccttgaactaagttttgagagtagaatttggacagttcaacaggcagctatgggcacccttgatagaatggaaaagtagggacctggacatgaacttaggaaggtggaggattcaatcgttcaaggacaagtcacatgtggcatgtcttttcttttacttgtttgctcagtctgaattagtatatacatagtaattagaattgaaatttttttctttttttttgagacggagtcttgctctgttgtccaggctggagtgcagtggtgtgatctcggctcactgcaagctctgcctcccgagtttaccacattctcctgcctcagcctctgtagcagctgggactacaggtgcccgccgctacgcctggctaatttttttgtatatttagtagagacggggtttcaccgtgttagccaggatggtctcgatctcctgacctcgttgatccgcccgcctgggcctcccaaagtgctgggattacaggcgtgagccaccatgcctggcctagaattgaaaattttgaaatagatttggcatatattttataggcacagggaggaaaattttgatgacctctgtgtagtgaagggcgctatataaaatggcttaatgaataataaagtagatcaaatgtttagcattttcagtttatatt

SEQ ID NO: 89881 - DNA, 1034 bp, Homo sapiens
ccaggctggtctcgaactcctgacctcaggtgatctgcccacctcagcctcccaaagtgctgggattacagacgtgagccactgcacccagcctagattaatttttacaaagaatggagaatatttatgttattaatttaaggaaattgattaaacttaaagcatgtttgtgaagaaggattgtaattataaatgcaaacttttttttggtagatatttgttcagtcgaatcaaggtgaagaggaaacaacaagaatttcatattttacttttattggtactccagtccaggcaacaaatatgaatgacttcaaacgagtaagtttgcttaaatgatacttcgggatagtaaaaatataattttaatggaataatttcatgtatctcaactgtcacactttcttttaacaaaataattcaaaattatatcatgtcatgaaattttacaaggctaaactaggatagaaagttcccctaactatatttttagatatccaacaaagtaatctttaataaaaaatgatgtcttaactgataaaagagtcttttaatgaatgacatcaacataagggtaaaaataatggcttggttatagaaagtggttagtaataatggaaaaatgaaagtaaaatcatttgaaagcagttgtgagaattaaataacttagttgatagtaagattctggtgattatttctgatgaaattttaaattacttgaataattttatttaaaaaaaatggactgagttttaatatactgacatgttaactttccaaaccatgtttgtatgctgaaatagcacatttcatcaaataatgatgaacaggcaagttttctgaagtatttttgtatatctttatgtgtgtgcatataattttcttttgaaaagacacaattataaggttagtaaagaattaatagggtacatgggacctttgttaatccagattaattccttctgtacattactggaacgacttctaatgggcaacagttccctagcgtcactcttaaatatacagccagagattat

SEQ ID NO: 89882 - DNA, 1424 bp, Homo sapiens
ttggaagaaataaccaaggccttatttagaagatagcattttcttatttgttctgctaaattttcatgttaataatttttattaataaaattgtacttttactctgaaattacaaagtatttgtataagcaaatgctgtagaaatgagtcttacttttccttcttcagccacaaaatatgggtcttaaatcgtgccttgaagttaaagggattaaggcattctatacatgggactttaccacttatcacatcctaatctaatccctaaaatgaaatttggcaatttttattaattttcttttggctaaatgttgtcactgataatgctctcctcctaaataactgaatgtaccaactattggcaactataagatctagctcaaatgctatttcttttatgaaactttttgttaacctgcatatattgtcagaatctattgtcaccttccttgtacctcctctcctgtggtattttgtttatcgtagcatgtcttttgtagttggggggcagggactccctctgtgtgtgtgtgtctgtttaaatcttatattcctaatatttaccacagtgttagctcggccaagaaggaaccagtaaatgtgttttggaaaataaaggattggctacctgaatactcagacttttgtacaagttctaataatggagttatttgaagtatatgtgtattgatttgtgtgtgtctgtgtatagtgtgagtgtagtggtaaagggagtatagtatatttgaggtttttaaacattttattttattctaccattgtataggtcagggccctaaatatgtaaaaatttttatcaacctaccccgatctatggattttgaagaggcagaaagaagtgaaccaactcaagctctggaactgacagaggatgatattaaagaagatggcattgttccacttcgttatgttaagtttcagaatgttaacagtgtaactgtaagtagtatttcgttcatatgtatttaataggtttgtgagtaacaatactattttcagtatcctaggtaagtctaagtgattctttaaagtggtatttattcactcagtttgaaatgagtaaaatgtttaatgggataaattttcttctttttaatttatgtaccctaaagaggaaggacagattgatttttgaatatttgtggggttttgtcagttattttatatgtatatggtaagttttgctggaagtttattctacaactttatactaaaactgaagatatttgtgctttattctttatacctggtatagtagtgatgtgtttgtaaaatcttatttacttttcttgaatatggagtttttaagtgtggtggtcatgatcttagtaaaaatgactttttatttatttatttttttttgagatggagtctcgctgtgttgcccgggctgacttgaactc

SEQ ID NO: 89883 - DNA, 1026 bp, Homo sapiens
tatgtttccatcttctatctcttactggtttagaatacttttaaataagagctttcaaatttattagctgactattgagttttgtctgtatgtgtacgtttgtgtgtgtgttaagcctctatcataaatcatttttcctaaatttctcctaattttctttgccactttttaaaaatctgctttctgaactattttaatagccatttaaaaatacttgctttatacttttttttccagaaaatgtagaaatgtgcattagaaatttttttttcactttttgacagttatgtaaaatgacttacaggttttagttatggccattaactccttttactgtcactcacttcctatagttttatctttttaaatgtatgccctcttttctggcactgtatttaaaaaaaaaaaaaagtctaattactgattttgttttagaatcaaatttgactttgttatcacatgtattctaggttttaagagtaagttatttcaaataacaacataaagacttaagaatctaaaggatagtgtgtggaaactgcagagtataaatagttagaatgcagcatttttaatttgagagctattcaagaaggaagcaaaatttggaagtagcacttcatggtattagatttgcttatacaaataggtaaatcttgtatactaagagatatatatagtttttaatttctctggttacaaagttactgcactggcagatcaaagaatgaattttaaaaaaagttacctcaagttaaagttaatatcttttttttttttttttttgaggcggagtccctctgtcacccaggctggagtgcagtggcacgatctcagctcactgcaacctccacctccagggttcaagctattctcctgcctcagcctccccagtagctgggattacaggcacctgccaccatgcccagctaatttttgtatttttcgtagagacgaggtttcaccatgttggccaggctggtctcgaactcctgacctcaggtgatccacctgccttggcctccc

SEQ ID NO: 89884 - DNA, 1962 bp, Homo sapiens
gatggtgggggtgaagcccgtcgggagcgacccggatttccagccagagctgagcggcgcgggctccagactcgccgtggtcaagttcaccatgagagggtgaggccaggctcgagctctgtgggtccccgtctgtccttccttgctttcctttcactctttgttggccctggtttcctagccgtctgctgccccggagtgtccggcagtcgccgcagccccaggagctgccggaattaggcctcgtttctcgggtgtgaacccccatttatgcacaggggttcctagacgggctcgggggcctggctggccggcttctccagctcaggagatttctcacctgctccttttcaattctttgacaaactggttttgggggtggcccgcccctattccttccagcctgtgggagtctccgcagccacccttgcctgagcctgaccccttctttctgcagagccagctgtcatttgcatctccagagctccaaaagcttaatttaccgaacactttgtttctcttcaccacctacatctctctaaagcctttgaagattcagatggggcgatctaactaatatgcgtagctctgagtcctgaatttctgctaatgcatttcgaactaagttaacgttgggttagggtgctttttaaattatttgaacttttttcttcctcgttcggccactaacttgtagcttaggctcccctatgtatgcgattgcaactggtcacacacgacagtacatatataatatatttcaggtggacagttggccggatgtcttagtttgacccggctctgttttttcacttaagaggacagggatcttgaaaaatgttaactgtctttggtaaatatcaacaaaattataggtcgtagaaaaggtggaccttttatagtggatgtgtagtaaagttcctttgtaagaatgacatgttggaactcggcgttgagaaccaagatttcagcgtgtgtgtgtgtttcacagatctctccttgtgtatgtcgatagtatttagttagaagtatgagaggtttccgctttattttccttgaccccttggcgttatttatacatctaacttggagcagtctactgctggtatcactgtttatgtaacacactttcttgtccaaataactgtataaacacaaaattccattttgaatttcagagcaaaaaacaaagtttctactagatggttcactaaatgttgagtatataaatggtggcattaggattatatcgttttagggaatggatgcagatagatatgaaaacaagttaagacttatttttggaccagtctctcttacactgaattgaaaaaggatagtaccttgcatttcatatggtgggctagagtacccatatgatatacggaattttgcatttactaaatttaaaaggataagtgatgtcatatatataaaacacctaaaaggaatgttagaattctataaatgtgtcttctcatttttagcaattttgtgatgtctgtattcttaataataggggaatacctgtagtacattaagtatctaggccacagtagaaaagggaagataggatttcaataaggaacctcacctcacttttagttcacttattctaattctggcccgtcgaagcttttatatttttgtccctcaatgatatattgtttttctcccttaccatagcagtgggagagataataaaataataaataaatattgattgaagtgagaaaactggggaaacattgctgcgaaggaaggttttttctatcagtgtggtgtcacttaagcataagcataactgcagacattgattggtaaggaactgttacatttaaaaaggtattttagtggaattaaaattttttttctttgtaaaaaccgagggaaaattaatgtttggatttagagtaagttcaaaagcatatttatattacgtttacaaatctggtaagatta

SEQ ID NO: 89885 - DNA, 1979 bp, Homo sapiens
atggtttaaagcaatgaggcttgatgagatcattgagggagggagtgttgccagagaagagaagtctaaggactaagttgtgggaatgccaatatttaaaggttaaaaaaaaaaaaaaagaaagaaaagaaagaaaggagactaaagctagagaagaagaaggaaagtcaggaaaaagtgaagactttgaggccaggtaaagaagtatttatttcaaagacggaatatgaactatgtcaaattgctggtaggtcaagtaagataagggttagaacttgataatggatttaacagtggggaggtcattggtgaccttgtcaagggcagtttttgtgacaggcagagcaggaggagggtaatgttacaaatgagaagtttaacttgagacatcacatatttcctcagagtttaaaatggaaatggagagctgggttcctctctagttagtgtgactttcataccttcacagttgcccatcttattttagtgattccaagactaatgtgacaattcagcttcaaatttggggaagcatgtttgtttcttctttttctgtttaattcaatttatatacaacgagaaagttcagtgctcagtttagacttttgatggcaacctaagggaagaaattggaatgactggagatgcaaatgagattagaggtgggtggcaggagaaagtcgaagttggttcaaccaaatggaatttcctttaaaaagtaaggtcttggtgggcataatgggcttttagcttaatcagtaactcttgaaattgctgtaggttggtgatggatacagcataagcagaagagttcattcattataatatcacctgcagaaatttaaaacatgatttatatgcctcagcatctatgaatcacttttaaaatgtgatttatttttgaccagatagttctgcagttcttcaaaatctgtctctcatgcactcagggctgtttagcaataagaaataagtgtagtctcctgttgccatctgctcattccacatgttcctttgaaaccgaacactggggcttcctttaaccaagcagtcctaaagtgtcaggctcattgagagtacagtatatttcttaaccacccaaataagaaagtataatcttgtcagctgcttaagtgttcagaaggttgtgtcccttacagcccttaaattctggaaacactttgttataaggaagcagccgagtagtttctttagtgtgtttttatgacctagctgtttcatagtagtataataaacagagtctttattatctgcttcaggtttgttttccaagtcttcaattgattggtggtaaatgcacaagcacacacacacacacaaaatacatcatcttaatcatcatgtcctcatcacatcatactgtgatcttgacttgggtacactcttttgacaaatgacataggaatgttctctgagaatttgaataaacctttacaaacttctcattcttctttcactgcagctgtggcaaatacatttagctgtttagggtttagtacttgcttctcatattccccatcggtaggtgggtagctaaggcctgtgccaattcatgtatgcgcatcctcgtgagagaaaatttgagtttgtttttgtctgcaagtcacagggggcctgcctgggacacaagaagtacatagactgagaacatattgactatcctgtgaaaacaccctgttgctaggatagaaatacgtcctgcttttgcatttgagagctagacaaacagtgtggaggaattaacattgatctgatactagtttgtatataatcttaactgtttatagcttttagaaatcatgtgtgctaccaatattacatgggatagtgtgaaacaggatggtcttatcagaatatcgccccataggtcattgatagtttcaaaaggaaaaacaaaaacagtagcagtgaaagtaatctggtagtcaccatctgaatcaaatggtcgaaggtagcat

SEQ ID NO: 89886 - DNA, 1056 bp, Homo sapiens
cattgcattttattaattttttttgttaaatgtatttcttcaatagacaaggcatgttgacatttctaattttcaatgttatatctttcaatcttatatctagtttttttgtgtgcattcaataaaattacaatacatacagaatgaaaactggaatctggtattttatttgcaaaagtttgaaattcagttgactttaacttttgttttttgcagtttgaaattctctagctacctggatgacaaatataaaatctcagtagtttaaattagaagtttatttcttgtttttgtcacttgtccgtcatgtgtcacttgaggcctctactctgcttcactgttatccttactttgaggttcagagtgagggagcaacctctgtgtgaagcagccagtctctggaacagagctctggaaagccttgcattggttccggccagaactacttacaagacttcattaaccaaaacggaaccaggaaatgcagtcttattatgggcctacaaagaatgtggactatggtggggggtgggcagtttggaaggggtgttaggagggtcgagggaggactggaaattttgatgaacaacagtaataactgtatgctactttttctgaaatatattagttttaatggaagattaattttaaatcactgtgacaaagttgaatggtgctttaaaaagtcacactcaaagctgaccattattttgttttatagagagatgtgcctctgggatgtgagtgatggcagatgtattgaatttacaaaattagcttgcacacatactggcatacaggttagtttctatttctgtgactctaagtacaaactattataagtatataatttaaaatatttttaaaacattgagcctatatttttatatgaaaaatggtgggtggtagtaacaagacaagaaaactagaattgaagcggtaaaagtgttcctcgtaagatggtacagttgggaggggtaagaaaggagaggagactaatggggaaagatacagggcaagcaaattgctgctgcttctgctattctgggctacctt

SEQ ID NO: 89887 - DNA, 1155 bp, Homo sapiens
atgaatgtagttctaccagttctctgttgggaatcagcgagaaggaaggcttttatgccacggacattaccctgaaatccttgttgtggatgctaccagccttgaagtattatactccttagtatcaaagatatcaccagactggattagctccatgagtattattcgatcccaccgaacacaaggtcagtgtattatgcctgttaggagctttagcaccatgacttaatgtttagtttactagaacattctacaatttatcataaattaatactttgggatatattcttctatgtaagaaataactacaccaataatttatggtctgtttcttccttcataaagaaatctttgattgaatgaagacttaattgttggcttatctccattccatgatgtatagatcatcagcttttgacagagtatatgggtgattatctgaagtggaggaagaatagcttaacctttgggggtgtagttttacctttgggaagagctgtagttttacctgtatatttctggggcctggttctgtcacttgcttaagaggcatagggaatgtttccatttcaaatggggacagtgaaaaaggagagattatacacagttaaatttaatgaaagttcctggaaggggctgatatgtacttgatgctcaataaatattattatcttttcttcatttttgttgaaacctcttaataacaaccataaaagcaaaagtaaagttgtcaggaaaagagtaatagttaatgcagaacattgaatgtctacttttataagccttttaaggagcattcttttactttcaaatggcttcatagttatgtgcttcctatagaggccagtaaataaccaccaccactaccaccggtatcagcagcaccatcaccatgaggactttcatttactgtgtgtttacactaccaagcaccatgctaagcatttacatatgatcaattctcacaatacttagtggggtaggtactgttaatattcatcatatagatgaggagaatgatgagagttagtgtgatgccatctttgctaaaggaccccggagtagttactttaaccactgtgttacactgcttccctcccattagtgaattgccttcaactttataggagcttttgctttgtaacctcttagggt

SEQ ID NO: 89888 - DNA, 1047 bp, Homo sapiens
cccttacctgaagcttaggaacttagattttatatcatatctttctcttgatcacactctggggagggtgtaatgtgcaatgaagtatctggaaggtggcaaggtatgtgggaaagggggagaaatttgtgccttgaagaaatgaagtgcttgagctcatccatgataaagaattagaagttgtaaattttgaagtgtataagttcattgttaacatagtaatcaagaacatttgaaattattaaaaacttcttgattagaaataaaaaattcaattagctagaaataattttccttgaattttaagttgttggccatctttattaacttgtgtttcaaaacctggtttctgtttcatgaaatagagaattatgtttttctgctaattgtaaaacatgctattgtttaattttattcaagcaaaacatcttaatatttagaaaaagcgtattatgttcgtaacctgggctgcttttttgtcccttctcattttagaggacacagtggtagcactctcggtgactggcatcctgaaggtctggattgttacctcggaaataagtgacatgcaggtgagaaaaaggaaactggggtgatttctctgtttttattctctgtagctcaaaattttagtaatgatatgccccttccattttttttaagggggaaggaaaaagtgattattttttgataattttcttataggcatagtatggaagattctctagtatgctatgggagtgaattttttatttacttttaatggcaacatctgctctatcatggatataaaatagagaaacatattgcgcaggatatgtagaggagaaacgtaaaagaggtgaggttctcctcaactgcttctgtttaaattgactcaaaggaaaaaaaaataaagcaaatcaccacaaaaaatatacaaagccatttttagtcatctatttcagttctttgggcttgaattccttgttcttttttttatcaatgagaaagatgaagtctgacaattttgatgctactctcttcagctagggaatttttaggcat

SEQ ID NO: 89889 - DNA, 1010 bp, Homo sapiens
agagcacacatagttatgtaataatgctgagtaataatagttcctttgttgaacaaggcattgcaatacctccacaaaatcatgtagcattttaaatcattagaaactagaaataaagaataaaacattttttctctataaaaataaaagtttattgtgatttctgaaaacgtgcttaatatccacttaatgttgaagtacaacagcacttagtactgggttttcaactctatattgagcagtaagaaagaagctttggctttgaaagcagagttttttttgttttttttttttttaattgatgttctaggtttccatggctttatcattctgaacattacgtctcacgtttatgtggccgggtggctaggggaagggaattgttctttccatgaatattttgaatatatagaatttgtatatctatgtacaattaagatcatctttagcctgtctgttctttattcaaacttccacttactgctcttcaacctagatagtcatgtccaattaacctaaggaataatgacttgtataaaaaatatacataagcaaaaccaaaaaaaaaatcattttctttaaatatcagctccctaatacgttttaaattaaaaatgtgtattttgtggtgtgttgaaatgtagaatattggttattacagctgctgtagcaatttttccttgttaaatatatagtttatcaattaaaaattttagtctgggcgacatagtgagaccccatctctacaaaaaaaaaaattagcatggtgtggtggtacacgcctgtagtcccagctacttgggaggctgaagtgggaagatcctttgagctgggaggtggaggctgcagtgagctgtgatcgtgccactgcactccagcctgggcaacatggcgagaccctgtctcaaaagcaaaaaaaattcagtaagtaaagtcaaacgattggttatgcttaatatgtgtagtttccattggctaatgcttttagctgttaattactgtatttgatt

SEQ ID NO: 89890 - DNA, 1045 bp, Homo sapiens
aatccatactgcatatttttggatacatgtataggtagtaaaaatattaaaaccgaagggaaagctagtgccaaattcagaccctggtttacttttgagagtgagaggaaggagtagggaaacttattaaagtgtcatgttttatttacttttagtattatagctatttaatatttactatttattttcctcatttacattgacgattaaattctcagagctgtctttctgttgttagaattattcagaacagaagttttcgaaaatgccgaaaaataaactgtttagtaccagtgatatgtttctacatgtaagcatataggctaagttctttaatatattagttaaagaatgaatactttttgtttaatttatcatattaaacttttggtcacgtaatctccaaaaatacccagaagggggcagcatggatttgtgaaaacaggaatgtgcgtcatctaacctgaacactagtgtttgtgccttcaattgacagtattaaaaccagtattagattcccggctcctagaaacaggtatgctaatatgaatggaacacgtgactgtgtgtataccagtgtggctaatgttcacagccagtaagggcaattgacaaattagatattctttttaatatatcatactattattctgacaaagtactgaaagcttttgcctgaatttgctcttatctcccatttttgattctagatttttgttattaatttaatttgaatattgcatttaaaaagcaatgtctatacctatagcttaatatctgaagtcaagcagagcaaactttgtgaatacaaactaagcaaaaacaggaagcagaactaacattattttcttaaaatacaatgtacataatgttctgtgtcatcctttttcctttaacacttaattctctttgattttgagaacattttcatatatttttatgtatttggcaccatctttttgatattaattttatttttaaaaattaaataatacatagttatagaaaatagagatattttctaaagacatcatatttgtcacta

SEQ ID NO: 89891 - DNA, 1161 bp, Homo sapiens
cccatgcacatttgaccacactttcctccctttttttcacctaatacctatcaacgtgtcccatttgggaaagatattgagatattgatctttagtttaaaaacaacctgtttgcttaggagaacccccagcagggtgaggtttgacgtgttttttctttagatcccatacaagggaaagagtatatttatagtgcagtgggcctccccctcaataaatagccacaatatgtacaagaatgagtttctgatggctgtttttatgtggtttccctcagtatgacctgaaagcataaaccagtaagtcactgaaaagttaagttttcaattgtttataaattgttttatagaaatctagactttaatttttaattttttaggtcatgggttcagttctctcttaccagagaaaatctttgattatttatatcttgtcttgttctaaaaaggagttgaagggcaaaaactagaggtgagcagaaaatacacagcagaacatttaattggctattgtgtggctacttgaggtgatgcatctgctgacattatagatagaaaccatgaaggaaataggaatgcatatctacagataatgtgaatatctatgactcctaagaaatgatcgtggcagagggacggtgagggtattgtttttgatcaaaggtgcagggaagagcatgggtctaaatgaaagagtcacagacagaaagaagcactgcagaaagcagctcccacagcaaacaaaggaaagttcacactgtggaaagagcacacctaataacagatcaattttttctcagctttgcctgctccaatatagcaatcattgtagtgaggtcatctttaaatttgaacagcagtttttccagtgtaccttttgcaatctttaatctagaattaatttagtataaaaatattttgatgattgatctgggttttatgtataatataaaggaacatacttttcaacatgacctaatattgtggtggtttttcagtggcagcaaatgtataattaattttgccttaagttattgaaaacaggatccattttattctaaatttaatttaaacacaattaaggtttattcttcttttcaggcaagagtacagcactgcatctgctctgtagccagtgaccactcagtaggacttctaagtt

SEQ ID NO: 89892 - DNA, 1052 bp, Homo sapiens
ccttccctacccttgttttttaatctcactcttcctcaggacagtgaagccattaccaacccttagcccctccacccattttggcagagttagttcttacattctttttatgctcacattttttttgttcatacgtttcccaaaacacttttccctttgtatggggtattttttgttctttatatttgtcttccctactagattttaaacttcttcaggacagcagttcagtttttcatctttttatttccaatactcaatgtagtataactatattgcattgtagtataactacacatagagtatggtacatactagtgaaaaatgataattgctcaagcaatttagtaggaagttagtttgaggtgtcaattagaattgtgtcatagaagaacttgaatgcaaagctgaggatgtaatttaatgggtgctgacatgatgctgaatacttttaaaaggatacttttgattgcttaagaaatattttgtcatatctaacattttaatgtaagacacttacaaatattgatttgggaaatgaattgtgaggttactggaatgataaagtgagaggtcatggggactggaaataggattaggccctggaaatgtggaaaaggggatggttaggaagctgttgcataagttgaataaataggacttcactctggtcttgaagagtttgatgttcaagattatttcagaaaccaaaacccggctgaggggagaatggcagtgctattaacaagaatgtacaggccatggaataggctttgaggatgattgtaataggagacgtgcatcttattggtagtgttaggagttggggtgtgtgcaagtcagcaaaatacctttgagaaataagtgacatgatggtgagataaaatggagatggtattatttttttcctaaatagatgctggagtgtagagcctgacttagactgcagttcacatttttgggtgcctgctgtcatttgatttttttcagatatgctcttttcctgaattgtcactgcaaataggtgaggtagttcttattgtccccaatta

SEQ ID NO: 89893 - DNA, 1054 bp, Homo sapiens
gacatctatgttgtgatgtctgcaagacctttaagagagtgaaacttgaggcagggctgtggtgatgagacatccaaaagatggttcttaatactgtggaagtggaggagatcattcagagctagactctgggcttactaaccttaagggaggaggaaaaggaaacgatttagagaaggagtggtgtgaggcatgtgaggagagccaggagaatgggctaacctgtaaacagagggaatcaagagtttcaggcagagtagagagtaatcacttgtgtcaaatgcagtagatgttgggtattagaaggatcgaaatgtgtttgtcaatgaagtcattagtattctttttaagaactgtcttcccaggatgttggaaggagaaggttcactgtggagagttaaggagtgaaaggaaagtgtggaaatagaaatagtaacaaatgtataatacttttgaaatgtgtgtatgagaagagaaggaaagagagtagctagagggagatgcagttttgaagacagctgagagtatttgtgggctgaggatgatgatcaagtagtgagaggaacgttctcgatcaggatagggaggaattgataattgatgaagctaggtttccaggggatgagagagtgggcgatttcaaaggtaaagggaaggaaggcagttggccttgatgtggaggaggaaaaccttatttctgaaactgaagggaaagagcagaggctggggccgggcgcggtggctcacgcctgtaatcccagcactttgggaggccgaggcggacggatcacgaggtcaggagatcgagaccatggtgaaaccccgtctctactaaaaatacaaaaagttagctgggcgtagtggcgggcgcctgtagtcccagctactcgggaggctgaggcaggagaatggcgtgaacccgggaggcggagcttgcagtgagccgagatcgcgccactgcactccagcctgggtgacagagcgagactccgtctcaaaaaagaaaaaaaaaaaaaaaaaaaaaaaagaaagagcacaggctgggtgtctggat

SEQ ID NO: 89894 - DNA, 1056 bp, Homo sapiens
agataacagcatttgaaagcccacacttacgatgcacagaatatcaaggcatcccttatgtgacactgtccagtgttcatatgcagtaaaatatttgtaccattactctacggttcataatagtgtgacatctaattagaatgctgaaagtctccagaacagcacgccccaacctttttggcaccagggactggtttcgtggaagacggtttttccatggcctggggtagatggtttcgggatgaaactggcgttagagtctcataaggaacgcacactgtaaatcccttgcatacacagttcacaatagggttttcactcctatgagaagctaatgccactgctgatatgacaggaggtggagctcaggtggtaatgctcacttgcccgccgctcagctcctgctgtaggaccccgttcctaacaagccatgaacctgtggaccagtaccagttcttggcctgaaggttggggacccttgttctagaaaattagtcacatgctaatttaagtttataaatagcaaaatataaaaatagcacttgtagcataatgagcaaaagtaaccttagtaactcactttactaaatgaccctatgcttaacattgtgtcatttgccctcctactttgaatccttttacatcccataaagaagccccttgacctccaacaactgcagaccctaagttgaaaatcactgacctatatggatgttgaactttcctaggacaatggttggccagcaagtgtgtgagtcagggacaatgatttcaaggtttaaacatttttttccagtgtgaatcttgtaagatgatttatatgacatggtattgcaggccctaaaattaaccttgaatagaaatatatttgtcagttatctcagggagacagtttactgcattgtccaagtataggaagtataactggtacatagtggttgtgactgaaattctatatgatgctgtcagttgagtacaacaggtaaaatatccaaagatctgttaatgtcttccactgatctctctcttattttgtattaaaatacttatttttcc

SEQ ID NO: 89895 - DNA, 1050 bp, Homo sapiens
ggtaggcagtcttttctttatttggaagatagaaggattgatactagggaagctgagtcttgtaaaggtctgtacaatggaggaacactcctggtcttgttactttggtaacttggccctttgggaagagttgaaaatcaatctcttttgtgctgctgttgtggaagctcttaatatattgatcttctaacctcttaatatattaatactatttggatattattattcaggcattatccagtaagacatggtctacagaaatatctttgaaagatattttctttatcaaaggcatgacctaaacatctatacttaatggttacaacttactgtaattaagtgatttctattttatttatatcatattaaattataacgtaatatgaaaccttaaaacctcagtcaaatgtctctagtttatgcttattaacatacttgttaatgaaaacatatgaaaagtcaaataacatgaagtctgtgactgtattgtcattcacacctacccatgaagtcttatcctgtctaaaataaaatatttaagatgaataatagtatatattgtctaattccaacataaatggattctctgatgaaactcacttgtattatcctaactcttaatgttaagtaacagcaaaacaacagcagagggcaccaaatatccatttcagtctccacagtttcttgatattttctaatttttatgcctcccttttcactctctgcctttctccttcttccttccttccttccttttttctagtacttaaaatatttaatattgaaacattaatattgtgcatattttttagtagatgatgaggtttttcccttagctatttaaaaattacatcaagacatcaatttgtttttattcagtgaccgttttacatttaacatgcatcagaatttcagaaattcttttaaaaacttttattcaataaatatactaaatcaagagtaaaattataaaatatttaatttatttttcctgccaaaatattattaggcaataaaccgtttttcacatttaggaaatttaaaattatt

SEQ ID NO: 89896 - DNA, 1049 bp, Homo sapiens
taacagacccggacatacatgtgctattctttgatgtggaagcgttgattattcaactcctgactgaagaagcctctaggccgaatactgctcttatttccccagagaatttgcaaaaagcatctggcagttcagacaaagggggctcttttttaactggaaaacgagcagcagttctcttccaacaagtgaaagaaacgatcaaagagaacatcaaggaacacctccttgatgatgaagaggaggatgaggagataatgaggcagagaagggaagaaagtgatcctgaatatcggtccagcaaatcaaagccattgaccctattagaatataatttaactatggacactgcaaagctgtttatgtcctgccttcacgcctggggtttgaatgaagtactggatgaagtttgcctggatcgccttggaatgctgaaaccccactgcaccgtatcgtttggcctcttgtcaagaggaggccatatgtcactgatgctgccgggttataatcagcctgcttgtaaactgtcacatgggaaaacagaagtaggaaggaagctgccagcgtctgagggagtaggaaagggaacttacggagtgtcccgtgccgtcaccacacagcatctcctgtctatcatttctttggcaaatactttaatgagtatgaccaatgcaacttttattggtgatcatatgaagaagggtcctaccaggtgtgaccatgatagtttgattttattcttaagtttcaaaaaaagaaacctgttttattttttcattgttgattactcttttttggctctacacaattttattatttcagtgtcatctcagttgtttcccttttacattttaaaacaccagtttcaaaatgcccgattaaaacataataaaattaaacaattttatgtatgattggcatacttagatgttttttaaaaatttggaatgagggagttggtcatatagactagctcttgtaaatataattataaaattgtatacgtacttgaagtttgccctaatattcaattcaaaatatatatttga

SEQ ID NO: 89897 - DNA, 1030 bp, Homo sapiens
atattgtgcaaggacagattaaacaaggtaaaattaaatcttattaagtaattgacatgacatttcagctctagaaactgaggaggcatagctaatgtataatcataatatttgtttgtcttggattgttaaaagagagaaaagttgttatattccagatgtaaatatggataattaagatgtcagttaaggataaatcagatttatttagaaagtgataaatgagcatatttcagataattttattatactgtctttggactaatttttatgcattggggcaccttaacttgacaacagtagtgttttaattgtgtgtttcttgagtttaaaagttatacctattttaaactacatttataaatgcttaagttcatagttccatactacaactaatctgccattttcccatagttcatgtgttgtgattcataagtggaaatccttgttaagctattctttttatcttttctttttatttgagtcattatataccttaactttcacctatagctttgtttttcattaggagatggaggagaagaaaggttgagtttctcttcctctactaataatttctacatattcctgagtataattaattaatatacttagatgtatctgcatatatcttttatattcctattaagactgacaaatgagctaatcaagagagttggggagttatgtctacttagagaacttcactttggacaaagagttaatactgactcttcacagaatgtgatagagaaaagtaaagaagtaagcaacagatgggttgatgcagcttctgcttataaatggtggcatactggcatttttcttccctacttttttttaagtttgaaagagtcaaacagtagttttacaaggtttgttaaacagtagacccccaactttatatctgtagttttcctcttccacaagacaagtacttttatctctcttagctgattatttgagacttactttaacatccttaaatggtgtgcttgattttcagcgttaggcactgtcagatggttct

SEQ ID NO: 89898 - DNA, 1054 bp, Homo sapiens
tctttcttctcttccttcttctctcccctcacccaccctccccataacatcgtgattaccatgaaatactttaaaaggactcatcattaaataattgtattctttttttagtattaagctttgaaaaaaacttacttttttaaacattgcatttttttgtactttaaaaatttttttctctgaaaaatgtattgaaaagggctacttgtgtttatgtgctaggaagataatgagatttagaccaatatgtatggagcacccgaagtatgttaactttctgtcctataaatattttaatatcacaataggagtagtttagaatcaaatttaaatggagtttagaatcaaatttcaattaaaaactcaaatattcctgttgagaagcagaatctagggatgttataatattggatatgtatgtgctatgtaaggggaggccagggcagatgtgtgcatatacacgttgtcacacacgtttatttatcttcacctgtcttttcttatgagagtaagcagttgaagcggctcagataaaataatggaactgtgttaattttgtcactatgttgaagctgtgctacagctgttttcccaatccttaataagagaagcaaattgataggtgacatagcagcttttctgttaagaaatcaaatgcttgattatgttttatggtgtaaatctttcatattcagtgccccatgcaacttcagatttattatttattaaatcttgagctttttatcttggaagtaattttttctgctaattgctgatttttcttatgtagatagttgtgaaagctgtagcagagtttaatttcctgatgaattttgaaagtgctgtagattttgccatttcagttgtgaggtagtgtgaatgaagtattttttggtggtgatgcagagatttttaaagcatagtaaatctgattctttgatttctattacaatatttttcttgatttttagtgcccataaaatttattaaaggatgagtgtaaatgcctttttttctaaatgaaatgtcatttaaatatgacttcaaaaataca

SEQ ID NO: 89899 - DNA, 1126 bp, Homo sapiens
tttttcatgatggctctagttgttttagagctatgttttgcattagtcaatacattcatcagaatattagattttgactctaagatgaatttgaactatattgtgattactgttcaataaaatatatcatttttctgctgtaatctttaatgatcatgcctttctgatgaaaacatcgtttcagttctacattctctgttttgcctactttgtttttcattcttcactaatactaagctttttttcagaaactgctgtacttcaattctctcctctttacttcttctcttttcctctgcaagttgctgcacctgtcgtttccgctcggtctgatgctgatcactctggctctgaccctccttctgctcctgctttacatacctgtttcttagtaaatgaaggtatctctctcaacttctaacaactttctctcaatctgtgctttattctgacagacatgttctttttatctgagttacacattcatctgctttgttatgtatgagattctaaagttcccattttatgactttatttgctaatgtcaatgacaagaaccagttttaaaaatgtaatgttacctctggctggtataatccatgttttctataatctagactactgttaagtgcagagatgccaatctttgatgtaaagtcagtgataaaggtggattggtttttgtaatgatgtttgccatttgatctctggcattagagctaatgaatttattttatatgtatcattacttggtggcagacacactttgctgccttttcacaattgtgtatgccagttagagggagttgtgagggaatctcttaacattctcattggaaaagtcttcagattgattattggcaccagtgattatagactgataggaatttacctatttaccctctttactatttctgttttaagctcaggcaaaaattcattatttcagtatttaaggcgtagttgggctaccatgttatctctgtggagttacacaagtcgaaagtatttttggagccctgaaaatgggaatgggacctacaaacctttattccataagacctatctaggattatttgtactgcccagaagcttaatgaaacgtgagctctgagttacatccact

SEQ ID NO: 89900 - DNA, 1047 bp, Homo sapiens
aaatctgtattttcattatggctattagattctctagtgtaaagtccttgtgtttccctaccttcatttttattttctttgcctagaataactatcattcaaaaaagttaaatgaataaatttttcctcctgccttcgccatgctcagagaacagccctaccattctgtgttttaactgaaaactactcttgattttctctccattaagtactgtctttaaaaaaatatatagatcagtgattttcagacttttagaaaagcggtatcctttcttcaaatgaaaacttctgtaaaacatgtggacatgtgtgtgcatgcatgcatacacacaaccacatagaggtaaggatggggagggtagaggtctcccttctggcacttctaaggaagtactagggctcccagtagcacggttttacatcattggcctcattgctaccttcattcaccgagtccctccaagtcattctttacattgctacaggagagccctttctaaacacaaataaaattaagatattttctgtgcttaaatttatttaatgactccctcagtttacatataaactttttggaagctaagggtatgtctttgtacttttgtgtctctaatctctggtatagggcttgttgcataatagcctggaggctccttgagtgtttagtataatgagggaacattgcactgtttcctataccattgcacagttattatacctattgcacggttatgtttaccattttaatggcttgctttacttatattggcaatgccagcctctctgttactcagatctatcccacccttcatgcccaatacacatcttaacatcccctttttaaagccatcaacttcagcagccttcatcagtttccctttgatttccaaagcagcttgctgttataaataacaacaggtgtaaggtactgaatgtagtgagtgcactgtttttgtcaccacttgatgatgtaacctctgcctaggtgatcctagccaaaaaaaaaaaaaaaaaaaattcatgaaggatttcaaaggtaccttctta

SEQ ID NO: 89901 - DNA, 1034 bp, Homo sapiens
atgaaataatgatttttgattttgtatttgagcagtatctatttaggaatgtgatgtttaccttctcatctcctctctgtgattattttactgatagctatctttaataaagtaatattatttttctagtacatccccttctttatgttaaaattgatcatataaatctaacaaagtgcttctgtaagttaaacattgagtacagatggacacaaagaagggaacaacagacaccggggtgtacttgagggtggagagtggtaggatggtaaggactgaaaaactacttcttgggtactatgcttattacctgcgtaatgaaataatttgtacactaaacccccacgacgtgcaatttacctatatagcaaacctgcacatgtacccctgaacctaaaataaaagttaaaaattaaaaaaaaaaatgcttctgcaaagtggtgagtttgtcattttttattcatcagggatcattctttagcattattattattattatttaaagcaactctgaataagtagtggtaccaaaatggtgcgttttagtccacaagtttaaatccttagagcttggaactgcctactggtaggtccatttctggatctgttacggtggtttgtgactaaggttcttcctcttttggtgcctttggttaaccggaggtagcaaggctgaatttcacataaatgtttaagttaataccccttgttagaaaagaagtccttgaactaaagaagtgtttggtctttaaaatatttaaatggattctatgtaggcagttattgatatccttttaagatgatttggttagaaagtttaactcctagagtagcttctaatggggaaatttttatattatcatgattgagaaataccttttgataaccatgtgaaaaatatcgatgcaccctagtatctgttgtgaaattgagaaataatgtgacagatgcaagatgacaacaaatatgtatcatcaaagatgaaatgatagatatgtaaggaaaagacatttgtgtgagctggcaaattctca

SEQ ID NO: 89902 - DNA, 1023 bp, Homo sapiens
gccaaatcagcggtgttaagtatgtacacattgttgttcagccatcaccaccaatcgttctccgaaactttttcatcttctcaaagtgaaaccttatacccattgaatgctaacttcccattctttcctgcctccatcctctgtcaaccactgttctgctttctgtctctatgaatttggctaatgtaggtagttcatataagtggaatcaaataagtgtctggcttatttcacttagcatagtggctttaaggtttatccatgttagagcttgtgtcaggagcttacaattgtgttgatccattcaacagagtggatctgtcattctacagacacttgggtttcttctatcttttggcgactgtgaataatgctgctatgaatattgatatagaactatctgttcaagtccctgctttcagttattttaggtacacaggattggatttgttgtaatacatggtcattctatctttaatattttgaggaactgtcatactgttttctacagtggctgtaccattttacattcctactagcggtgcattatagtctcagtttctccacatcctcatcaacactcgatattttcttttttctttcttttttttttttttttgttttttgagatggagtctcgctgtgttgcccaggttggagtgcagtggtacaatcttggttcactgcaacgtctgcctcccaggttcaagcaattgtcctgcctcagcctcctgagtagctgggattataggcatacaccaccacgcctggctaatttttgtatttttagtagagatggggcttcaccatgttggtcaggctggtctcgaaatcttgaccttgtgatctgcctgcctcgtcctcccaaagtgctaggattacaggcatgagccaccacactcaatctatttttttttttttaaataatagcaatcctaatgagcgtgaagtgtgaagttatataggtatctcattgtgattttgatttgaatttccctaatgattagtgatgctgaggcaaaa

SEQ ID NO: 89903 - DNA, 1037 bp, Homo sapiens
tctgtttactaataatgtagtttacggggagtagaaatacagcgtttttcatggaatcctaacattccatcactgttacatttagcagatatattaaaattatggtttaaattatttagttggtaatttccaatttaaaatggacaaaactcattttcttgtgaatcctatctacattccattgctgttgtatttagcagctctattaaaatcatgattcaaattattagctggtaatctccaatttaaaatggattagcttcattttcatgtgtcttcatgtatttataattcagtattagatataagtttctttctaaaaaactgcatatatgtactttaaaacaagaatcgacaaagaaacaattgttttattattagtcctactaaaattgaaatttgcttgaaaaaatgttattatgctatgtttttaaaagttggtaacctgaaataattaaataagattatgtatttaatagcctgccctcaacacttacgcatttttagtgaacattgctttttataaaaatataaaatgttctcttcccacgttctttattgagagactagtttgtgccaggtactgtggagcatacaaatagacatgaaatcattgatatattgtgacaaggcagaatattgactaacaaaaatacttttattttctaaagagattatgtgataaggtttggatatttgtctcctccaaatctcatgttgaaatgtgaccctccattgttggaggtgggcctactgggaggtgtttgggtcatggggatggatcccttattaatggtggtatggtttggctgtgtccccactcaaatctcaacttgaattgtatctcccagaattcccacataatgtgggaaggacccagggggaggtaattggatcaggggtgccagtctttccctactatcctcatggtagtgaataagtctcacgagatcccatgggtttatcaggggttcccacttttgctttttccttatttttcacttgctgccaccatgtaaaaagtccctttcacttcc

SEQ ID NO: 89904 - DNA, 1149 bp, Homo sapiens
aagggatttaattttttgtccttttctaagcttccttgtgtccaaccacttgtgattactgattgctactaaatctttagcccagttctggggtcatcaattcccattgtctctttctgctttcaaaataatcacctaattctacattttccacttttcttcaactccaggattaccatcctagttgacatcactttgatttgtagtctctgatgttcttgtggctgctcttgtcttcctatagaccatttgctacacagagtgattctttaaaaacgtaaatcagatcattcaaatcatgtcactttctgcttaaaactttccaatagcttttttaaaacaaaacaaaacaaaacaaaacaaaaaacaagatgaagtctcactgtgttgcctaggctgacctcaaactcctgggcctgagtagctgggactacaggtgcatgccattatgcctggccctgtaactttttatcccacctgagactaagacttggacttgctactattgacgacatggtcttatgtatgatctgctcctgtgtgcctccatcccttcacattcaccatgacacagacacatttgccttttttttgtttcatgaatgtggccttcatgaatgtggccaagtctgttccagttttaggagcttgacactgtttcctctttcccagaacttcacaaggctggctgatgattgagtctgagctcaggtgccagttctttcacatagccttcccagattgcccaatctaaagtaccccttccccttctagtcactttctctggtacataattcagttttattttccttataaaatgtgtaacagtctaaaattattttttttatttatttgtttacttctttatgttctggatgtaaatgctgtaaagcaggaccaggtttcattgttgatcatggctgtgtaaccccattccatatagcagcacctgaaaactggtaggtgttcaataaatattggttagatgattgaataaattgatattccagttgcctatttgccatgtatacgtagattattctaaaatgcagtgttttgaaaactgaactgaccttcattatttatttatgtttctatatttatttatttatagagatagaatctccctcttttacccaggctagagta

SEQ ID NO: 89905 - DNA, 1036 bp, Homo sapiens
aattatgtatatagaaaaaggtctatgaaaaaaatttgccaaataacaactaggtaccacaaaggtgtgggcattaatttccaagatactatgttgcccctaactatgctcctttatttctacttaacatctcacttacagtaaagaaagcagaagaaaaaataacgtaaaataaggtgatcatttttcaaagctagagatcctttagaggttctaatttactccaaacgaacctttaaaaaatggtcacttttagtcacatgtcattgttttattattgcgatataatttaaaaaaatgaatactacagatactccttataaatgaacagatgtacttgttaatggctcagaagtagagcaaggcctttttcatctcagttttatatcactgagttggtaatgacccaggtgaaaatatgttttaagtgaatccagtaaatgatttgtcattttataaataaaaatgaccttaggtttatttatttcttactatgctgaaatgcacagatataaaatcttcataggaggtattctaccagtccaccaaatgttgtctcatgttttctatttgatcttttacagaaacgtaccatgtctaccccgctatttttataagtaaatctcattgccagagtttctttttctaagtagtaactgtatgagaaaatatctgagaatgatatgctgtgttttcagatttgtataattttacaagtcactacccactgtgtttctgaaatattccttttctcatggaaatgcgaataatggtctcagtgttacaatttgtagtttcttaaatttgccatgtgtatcagattcacctttgaaaggtcaattgaagcaaaaaagttagacgtttttggagatagtttttacctataagacttctgattacttagctgccttagatacttgggattactaaaatctcaatttcctttcaaactgagaatgtttgccctaatagtaaaggcaaagaaaaaaattaacttgttattcaggtagagaataaagggaaatataagatgatg

SEQ ID NO: 89906 - DNA, 1053 bp, Homo sapiens
aaagttaaaactttcataaacaatgttgcatttgctaagtataactataaattatatatatacataatttaataattatatagcatataattattatagcatgaaggggtatttttagagccaaagtgtagtaacgttatgtttatttttctttcaaagctgttttaagcttggttctcaaaatgcttatagattgaggtacatcttgttaaaaaaggtttaatctccatgcggtcgttagaaatagtatttaaatctgttgaagataattgtttttgtagaaaacagaacaaccagttattcatagttatataacatttttctttttaagacaagttcaatgatattctatttttgctcatttttatgaatacattgtagtagaaagcttcattttagactacagctttcctgagagcaatggcattacctgctatgcaaatgtatttcagcacgtgattgtactctatgagccttcgcatatctttttctgtatttacaatagaccttgtatcctatctctttattttgcagtttctgattcatgcatcccaaaatttaaaaacataaacacaaattttaaaaaaattatactgtagcatacctgtttacagatgcatattttcttgtgatggggtttggcaaattagaatacagccgtgttttaacattatgccgtgtgtttggtttatggtcttcttcttaagaattgtatatattaaatcttatgcacaattaattgattttaagaatacaggtagttgttatttttccagttgactattttcaatgggaatgtctaagcgaaaatgtacttttgcctgtcacttcctggaggtgatgaggaagcagttttattagggcttattttactgaattttaacagtgctccttatagcaccagccactggcatgtaaagaagcttcctggagttaacatgaaagtgctcaatgtttaaaggatctgtttttcccctctgctggaagcctacctcctccacaagccatatactcaatccctaaaaccaccttagtctgctgcatatgcacttt

SEQ ID NO: 89907 - DNA, 1027 bp, Homo sapiens
ataatcattaattgtaatacaaacccagtatttcctttatctgatgatgtatgtgtgtttagttctccatggatgtttccatctgtctaggagttccttttatgtaaattcactgggcattgccatttagcattgttctttccaaaccaggtgacatatcagaatcatgtaggaaatttcaaaatagactcctccttcctcagacgtcctgaggtctttaattcagaatctttaatgcagggacacaggtatctacgtttctatagcatgcccgcatgtaattctaaggcaggctggatttggaaactctgagtttacggaataaaataacatactgtatgaggaacaaataatgtgtgaattaatatttcagtccccaaggcctataaaatcaaataatttaaaaataaggaaaaatcatttgcttgagatctagaatcacataggctgaaatggaactttaagatgagtggaatttgatttttttattattattgaaaaggcaatgtagcaacagccttgaagaaaggtttacagggggaaaacctatgatattgccgcaaacaatgatttttgcctatatatgggttattaatatgtataagtatagatatttgcagtctatatactcctatatttgctttgaaatattacctaaaatcataacattttagttaatagggttttagttattcctttctacccataaatttctctcactgtcctgagcttagttagggctaggatccctagatttctgtgttatatttgagaattttcctgtgacattatgctaaaccacccagccagaattttaagtccctactgttgaagacacatacagcctccttttctctcaaccagtgccctttttgatgtcttttcagttcttcaaattacaacaggagggagcctctatctgataaaatcgctaatagaaaatgtgcttaaggaagtcaccaatatcttgttaaccctttgtagctttgctccgaacagggacattttctccaattactcagatcaa

SEQ ID NO: 89908 - DNA, 1049 bp, Homo sapiens
tccttttcatattagcaaaggtatcagaattgactcccacaattgttagaggctttttcttcatttttggtgaggggtgtagattcagttttggaattttcatcaaggaaaattttcgtcaaggaaatacaagaaggctcatgagcttgagctattttcacatggtttaggcatctcactgaaagaagagcttcttttctaatttttcacctttttccatgaagcagatagagagctgtttactacagcctttgtctgggtttggcattgattttaaatcacctggattgatcatgtggttatgggacttaaaaaaatcccaccaaataccaaagcctctaaacacaattagaattgaggggtttttaatctgctagcattatgtccataggagtacattctaaattattcttaacttctgctcatgttaggtgaaaataaagcaccatgataatgtgtagtgtctgaggttcagcagatgctctctaaacatgtagaaatgttcctagttttcaaaatgaggaagcatctaaaatctatgtctgtcttggagtatttcactgccttggcagtttcctcagccaataagagaaaaataggcaaatcaaccagctgtcatgtcacacactcctcagctgcaggacaacagcaggatttaggcaagctgatctcaaccagatttgacaaagaggtggaaggtctaaaattaaataggtcaacacaaattatctaataataggtaggtgtgaagggacaacaaggggtcccagaggagaattgctttttaaagactgtgtatactcttgcttttcatttcggacttgtcattgttagcagcatctgagtctgaaccgtcttatttgataatgaaaaggttcctattttttactaaatacctttagattgttagtaaaagtggcgttttcatgaagtaaatatttacaaagcttcaaactactttaagaagccacctttcctattttcaaggcagtaatttttctgtggcttgctatagtactcagttttgttgtcatggtgactagataata

SEQ ID NO: 89909 - DNA, 1064 bp, Homo sapiens
aacaaagctattatcaatttaagactaatgctatgtttgaaatagaaattatactaaaaaaatacaaaaaaggacattttgcttttagatctgcctcaattcaaaggaaatgttgttactttttgaacaacatttaaaaagcactctttttaaagtcctttaaaaagtcctttaaaaagcactctctaattactcagagagagtgatctagttattcaccattttgttactcaaaactcaaacacactttctaaatatagaatgaacaaaaccatgttgttactcaggtttttgatctccataaatagcaaaatgttcagggattaatctagtattaaatagctgtcttttcaaagttaaattagatgcaaaatgtaatgatttggatcacacgaatctttcagtaaatattttttaaaatattatgattgttggatttaataatccttacgttaaatatgtgttcacagtgcatattcacagaaaatcacggggccctttatggtctgtcttcagactaatttgccaactatgcttatctgactccacttcattccttgcactgtaaatattgatcattctggagggctttttgtttgtttgtttttccccaacaagctatactctccttcctttaggcttttgaatatagtattccctccgcatggagggtgtgtgttatacccttcacattatatgtatgttatatcataccctccgcattatattataccctccacatgtgtgtatgtgtgtgtgcgcgcacacacacaccctagcctttgtaatcattcatacccagaaaatctccaaggtttctcacctggcctacacagtaatcccataatttaacttctacctgaggttatgggtgtaggaggaggtaaatgaatgtctccctgattttagcttagagctttggatgaatctaatatctaggagctccagataggtaatctcatacttccctctgacatcccacacataccaccctggcctagtaccacacatatattcctcctgtatatccagagatgttagaagttatatgtctctggtgtcta

SEQ ID NO: 89910 - DNA, 1036 bp, Homo sapiens
ctacagagagttttgtgcttgtaattgtccttttaatgaactaagctcacaattgtgtgaccattgaggtgatcatccctctttaatcaaaacttacatttttgtagcagcagaacgatgaatattgaatgctcaaaaagcattcagacttcctgcttctgtacaccttttggctacagattgttttgttttgttttgttttgtttttttgagtggttacattgttttgtgctaacatctcagaatttggttttgcaattcatgttgattctgccataatggcattgtaaatcctggatcctccttcacattcagttcaatcctttgcatgagaaaagagttcttgtacctagaacttaattttttttctagtttcccaagtccctttaagcaaattacttatgaagatattctaattaatgtctctctgagtgagaggtttatgcacctctaggaagatggtaaacaattcattcttaccagcaagattagagccattcattctgtagacaaatacctccatcaagtggatatagattctttgctttcctactgataagaaaactaagaagccagtggtgcccatacctgccagacaagctcagaaggacaaaggagtcttaagtatctaaagtacatcatcaggcctgctgtaaacatgtgctaattaaagagtattaaaaatatagtgaaaatatagcttctatttatatacctgcttactcattaataaatcccgttctattctgaggtgatagatcaggctggaaatttttattttgttttgtttcaaaaagagaacgcagccagccaaacctcctcaatattctgagatttcccagagaaggccaggagtctagcactgctcgaattgtaggggtatgaagtaaatatgtgctgcatttgtgaaatccattgtattgcacctgtcaaatgctcagaagagtggcacacaggaagcactcaatagatgtaagctaatatttttaggagacaggagtcctaattgagcatggataaacaagatgacctgtgt

SEQ ID NO: 89911 - DNA, 1106 bp, Homo sapiens
aaatgaaatgagggagctgtagtcaaggaggggaggaagccgaggacggcaaggcctctcaatcatcgcttaccagggacagagggatggctgccattatcccttctcaccacgacaaatgaaagacgatgatacctaagaaactgccgcagccacacagagcggcaggaggcgagggtttgcctggtgaaagccaaacggcagccctgctcttttgcagcctcctatgggacatcatggcgagcagtgacggatggagaaaatgcagcatccctgccgggcaggacagcagcctcaggccagggctctggaggatggacaggcagaccccacggcccaggatccaggaaggccctctgccaggctgtggctccaggaaggccctctgccaggctgtggctgagagtggcctggcctggggcatggctgcagatgccgccccacccgccagccgcagggctgggggccggcacagattacattttaaggtgatagtcatctttgacctttgggacctccagggccactggtcatccatcttagagccgctgaccagcaacctctgggctatttttatggccggcaaacattgcccattgattgaattgattgaaatctgcatctggttcttggggaaaggacactggcctcacagccgcaatatgcagcttcgttttctgttgttgtctttgactctttcctttccatttgtcttcccacccccagcatgaaatgagtttggagacagggcgcacacaccaagacacacacggcctgaatacacacacacactaaacacacacgtcccgcattcttttccagcagatttcttactgtggcgctcatttttctgtcagaatttcaagggttcctcaaaggaattccgctgagaaaagcagaggtatgttcaatccaaggggagtccacacacacacacacacacacacacacacacacacacacacacctgtttaaaaatacacaagagcctgaactataaaaccaaaccacaaccatatatggaattttaaaatctggtgattttgcaatttgtcaacttctaagctgaatagcagtttctataattccctttccggcttcgtgca

SEQ ID NO: 89912 - DNA, 1049 bp, Homo sapiens
ggctgttgtgttcattattaattgcatataaccaagtgtccaataccgttatgtggcccaagagaaatagattttgaagatgcagaaacaggttccactttatttccaaacctgaagttaacctgcaagaaaagtatctagaactagatcacaacagggtaaaatatctatttgtttcagttcctcaaatcaattcaaaccccgttaatacttaatttaattcactggcttttttaacaaagaacattaacagatatgttattaagctgtggggtcattcataattggtcatctctctgtgaattaaattttaaaaaggaaaagtaaaatcaaagaataatcagatttcctatttatgcagggcaactaagttaaattatatttactttctaaaaatagattattttcttaagaaacaaacatttattttgatctcaagtgatctcaatatatcttatatagagttaacaaatacattccaggtaatagtattatagacttaatagatttagcatgcatttaatgatgtttgagtgtagagcactgagctgagacctgaaggaaaacaaagatagattgaacaccgcctcttccctaaaaaggagcctggaaacaatagaagggtgtaagcctcgagggatgggctgagctaagctgacgatggaacttatgcttcaagatatcaagtactgaggcattttgaagtcttggtctagtggcatgtctaatggtggagaggcctcttgggtctgcagagaaagcaggatgtgggataaaaggccactttaaaaccacactttccttattaattgccagcagtgatgggaacctcgagtgtgcccctatcgccagctgccataaacaatactgtggtgagcatgtgatgactctcaatccaatgactagtgttcttataaagagagaagaggacacagaggtgtgaagacagaggcaggtgatgaattgctaggagccgccaaaagctggaagacgcagggaagatttcttcctaacatgtaaacagcaccaaagggatggtgctaaaccat

SEQ ID NO: 89913 - DNA, 1034 bp, Homo sapiens
gctaactcaccctgtggggccctatcaccccctcttatcacccaggctttttccctaaccaacctctgtgcctttgggggaaaggctttttgatttcccagtctcattcaaggcaatggctgaaaaatgtgcataggtttttctaggggcaggtggggaaaaggtagggacgtggattgtgtgacccagcccatctaatgcctgacatggtgcagatgggcaagacttggaggcaggctgtgggctgtgcagatagagatagcctcacttcgggagcaggattcctagaagctgtggacgtttattatgaaaaactgtcccacacaaattgtcccaaagggcagggaggctctgcattccacctcggcacctctttcaccatttgaggacccattactcttctgtagaaagcagactttgtttgggttggaagcacacctccaatgtaatttaatcagcattggactttggctcttgtaatcaaatatacatatactttctcctgcaagaagaaaaataatttctctgtaactggtattgacttgaagtcatgtaatctctggaaagcatcacatttttaaagggaaaggtaaaattaaggggaaaagaacccgcagtgttagtggtttgctttgtcatactaagaagagccagttaccacttaagaaagggcagaagaagcattcctagagcataaatacttgtgctgctccaattgtagatatttcatttacagttttctctgtgcaatcagccttggagatggttaaggataggaaactaggttgactggctcaccaaattctagaatgtgggctttattacttatgttgcattgacatccttgaaggaacctgtttgacggctcatttttctgccgtatttggagaggccacaggcagcagcagctccttgagttccagcaggatctgggtgggtagcaagcctttccttttaagggtgattggcagccattggcagcttgcttcccactccaccccagtgcccttgagcatgaagctgtgccctactgc

SEQ ID NO: 89914 - DNA, 1059 bp, Homo sapiens
caacgggatgttttagatttaggatttcctttcaagtgttactgtctgcctgcccccacgccccaccccccaggtatacacaaacggatgcttttgtttccccagatgcatgctcctgatttttgaaagcatgacttttattatattaaacaatattctcacattatagcagcagtaatgtcacaaggagaaccaactgtggagcatcaccaccttcgataaatctagaaactggatttgatttcttgagagtctagtgatgaggctctttttaatgaaaaccttgccactgcttctgtccctgaccccctacgaagggccagagatgttgagtgacttcctccaggccacacagtggagtcatatggcactggccagggtgagaactgacagtaggcactgacccctgactctggcctttttcaatcagttgctttgctttatttctggttttattccagagaaaagagataggagagtccttttggtcaatgattgagcacaactcacatctctttgggtttcgagtaaaatggtccttgacttcccaaagctaattaaaatgtaaaactcttgctttatttcaaataactttagttcagacctaatttattgctaaggtggttctcagggaggtagagcattggaatagacaagtgtgtctcctttaaaagtcaagggtatgataaatgagaattttttttcccctgtgacaatttatcttcaagttccaggtggccctttgtgtaaaaggagggaaaatccatcccaaaacaaaacaaacctggtagagcattcaaatttgatgttgaaaaaaattgtttctgtgtgtctaaatgcccaaaattttgttctaaaaatgagcaggaacatatctgaatcagatataaaaatgggtgttaaatgtattttgtaagctttgactaaagaagtttcttccagctgtgtagtcttcgaatctgtggacgtgcctttctcaggagttgttgggttccactgtcaaaaccttttccagtaaaacatggatttggcaacagtaagtgtagcctttttggccta

SEQ ID NO: 89915 - DNA, 1035 bp, Homo sapiens
ccttggaggttttggagttaggttgattggaagtaaccagctaataccttttctagtggagaaaaagacattgctaccagcttgttcatcccatagaagtcttccactctgctccatttttagcagcaagcatttcatgtagcataaaccttggcagataagtgtgcctaaggtttatacagtctgtccgcttggatgtatacaaatttagatacatattttaacatgtgttctcatagatgactttataacaacacacattacctataggtgtctagactgtgtacatacaagtgtgtacagacaagcttcatacgtatatactgtaatccgttacaacaaataaattttaaatcatcgtttaacatgtatgtggtacttctacagtgtacattgttttcattatttattgtaacattgaaaaccacagtgcagggaaaacaaaagtatcccagcatcttcatcctgtacacttggaattaatttcatttgggcatatccaagataaactcaactttcaagaaatcttgtatattatttaatcatctgtgttaggatgacacctatgattgatgacttcggttgaatagctttattctggatttttcataactaaagctaaatccaaagacctgaaaaaggacaaaaagaaaaaaaaaaaaagaaaaaacaaagaaaaagaagaaaaaataataaagtcaagcgcaaactgatggggagacagtgggctctggtttccaggattgagacaatggtactgcggtcttggggagactgcgttagctagtggggagtggtgatttttttcatgcttgtcacatctaaatggtctttaacatgagaaagttttagaggttataatttcctgctttgtttttatttagactatcaaatgaagttatacatgttgtcagtcaaaaaatgaagacaccctctgccccaccccacagaatgctttttatcttgtctctttgggttatgacccaacaagctaagtaccattaatgtaattaacttatttaaattagttcctag

SEQ ID NO: 89916 - DNA, 1021 bp, Homo sapiens
ttgagggacaatctgtgtcataggggaggtgacatctgttctacagaatgtggccttctttgtggggccagccttttacctgtatggcaagtcctcatcttccttatctggctgcctgccctatggactttctgcctgtctctgaggatggttctggtggccagggaggaagctcttggccttcagttgctctcccatgtctgtccatggtagacttagcacagggcaaacctttggaaaggaaaatgctggatttccctgtggtgctgtggtattgaccagcgtgtgtgtgagtgtgtgtttgtgtgtagactgggtgggaggaggggaggaaacaaatgtataaatcacattttgcaaatccttccattcttagccagctgtaaactcatgtctttgcttttctcaagctttgatttatgtattgggatcatggggtttgtgtcccttcttctggctgtaagtttggatttagcagggtgctccataaaaatgttatgtgatttgcatgctctgggctgattgagttgcattctttataggatcattttttagatggatggtctctgtgggcctccattcttttgttttctggggttcaaaggtcacatcaaaaacctcccggcctgctgcctgatgtgacctttgaactccaaagggcacaagatcatgaggccataaaataaggcacaaacactaaaggtgtcattctgattgtcctcaaaggacaggagtttaaggcttggccacatgattcagggtagaggaaatactgagagagcaaaatgcagggagcatcaaacaatgaaatctcaaaccatagccaggaaggatgtaaaatcgcctctggggctggacactgggctaattgctaacaatgtcagccacatgtttctacagcgatttctggtaagacagccccagaaagctcaaacatgctgactgccaggttattttttttcattgcatcaccatcagtgggtccctgtttctgtacactgcctgccctggcccgcgtaag

SEQ ID NO: 89917 - DNA, 1020 bp, Homo sapiens
tctcctttgactccatgtctcacctccaggtcacgctgatgcaagaggtgggctaatctttctagtaaattccatatttaattcaagaaaccataacttaaggcatgtaaaagagatcctttgctcaatgtgatgccattgtgcttatccaaagtatattattattacccacaaagggtgagagattaggctgcagccataccccaagtggagtgagcagcaagacctgccccctgctcagagtgtagatgactgggggcacctgcattcctaggggctctgccgtatgagctcctgtcgatgcggcaaaggaccaccttgcccaacgacagcgggaaggcagaatttaaagctggcagctgtaagcgaacgtctatgtgtgcgcacgggggcacgtgaaggcacaggtgcatcagccaagaacctccaattcacctcttaaccttctcacctcacctgaaaccccttctgccagaatcctgaaggtggcccaggaacagggctcctaacgttaggtggaaatgggaaattcattgagatgtcacaagctggaataagaaaattctgagctcacccggaaactaatgccctaaattaagattattcagcttctcaatttttaatagcaaaatggagacctgagtgtggataacttttagtatctgtgggggatcctggaaccaattccctgccaatatagaaggacaactgtctacagtacttgaagtattattaactacattcgccatgctgtatgttagatccccagaacatatttatcctgcatatctaaaattttgatcattttacaaactttctattttttttgtcaattttctccagctagacacttgtgcaatacggctattatctgatctttgccttaaatgttgtgcttcttttccatatgcacgtattttgcaaaatataaagtgtgtagagctatatagcactcagccaagtggtgggtacctgcaggtgcttcagagaagtaaattgatgctgctaatatttgttgaa

SEQ ID NO: 89918 - DNA, 1958 bp, Homo sapiens
agaaactcttgcagaatattggtttttctcacatattagaacatttggagttccaattaattacaaaaataaaatcgaattccttatctgctcagtcttttttccttcagatagccccaattttctgatttctacccacctataactatgtctgatttaaaacctgctttccagagaaaaggcctagtgggtagggtaagaggttttcatctcctgaaatctctgttttaactttctgtaagctgaggattctcaggaaaggaagatgctgtagaatttggttcaaagggctcaccactcggatgaaaagaaaccccaagccagagcgctgacctgggcagctggaggagggggcatggcagacgagcagaccctgtgcttctcatgcgtctttgcctcttgtctatcttccaggccctggccgacttggtgcattcacacatccagtcaaacgagctgtgttccaagcagctgaccctgagctgtccgctctgtgtcaatcctgtctgcagggagactaaatccttcttcaccagccagcagctgtgacccccgccggtggaccccgtggcgttaggcaaatgcccaacctccagatacctccgatgtggagagggtgttatttagagatcaaggaaggaagtcatccttccttgatatatatacagcctttgggtacaaattgtgtggtttcttgaggattggactcttgatggatttctatttttatataactatacagtaagcatttgtattttctctctctaggtataagttactagtttggaatgtccatcaggacctttaataaatgagttaaaaatttgtcttatgagacacacctatttaagtacagattttggctttattgcccaaaaccctcctgaaagggtacggagagtcccctctgtgggctggcagtgtgaatgagatctgtttagtctcgtgcatatagttgctgttttttaaatgaacacagttgagtatttgaagtgaatttgaaaaagaaatgttacttaatctttccctaagcccatgggttacagaatgctagggaggcaatttggttacctgcaatggctgcttttgccagcgaggccaccattcattggtcatcttggtatttgtgtgtgaatctcactttcctcaatgtaaaaaggaatcaagtatggatttcagaggtgctcttagattccccatacacccaagggtaataaacgtgtacaagtacagtgttcatgatacgtgccttggtgggagtccgtggtgccacagggaaggggctcccactgcttctggtctccagggacagtgctgctggaaaggctagtgatgagcttcaccctggagctcctcccgggaccttgcaagcctctccatccagcatcttctctatcttagttgaatgccttctttctgaacatttgttttaagaattattttataaagtcaacaatactttgcttgaattctttcttaatttacgattttttattataaaaatgtatagtgatacaatgggacatgtgaagaatacagaaaagtaaccactttaatgcaataactgttatcataatattgtatttcgtggtagtcctttcctgtagatatttttaatgccatttaatgccattgtcaccttggatttatgagtgaaaagtgtttctaaaaatatagaaataatgtcagatcagagtctgatcttctatgtttgtatttaaatggattaaaagatccccggtggttccatgaagaatttgtaaagatcactttctctttcctccaagccctgaaactttgttcttcaaaagagcgtttctttttttttttttttttagccagtttataaagtggaagtattaggagattcataaatcttctatattgagaattggctatgttaataaatattacaacatcattaaggttttagctaagtttgattcatgctgtctgtt

SEQ ID NO: 89919 - DNA, 1747 bp, Homo sapiens
ccagttccactcttgcccctgcaaacagctatctatcccttggccaccattcaggtcaagacttgatccactgatggcacaacctccctcaggaggatggatctgaaaaaatgcctgcacagaccctgggagtgggtgtggagcttgggggacagggaatcctggggcgctgggagcctggtctggcacgtgggatgtggactcctggggtggcatgtctccttggtggtagagactgcataccccgtggggtggggtgcagtgggaggagggccagaacaggccctgggaagcagaggccccttgtcaaggttcaagggcagtactgggttctcagcacgagtgctttccgaagaaggcttggaggcagaaaggagaactgcagctatttggaaactggcccactcgccactcccgaaatcggcggcttttcacttttctgcagccccttctccttccacaggagcagcacgctactgtcagtcatgttggtctcgtgcaggggttcttgtgagggattgtatcaaaatctgcagccgaggtggggagaggaggtgtgtgtagtttctaaaatgcttctctgcaggctctcatcggccatcctaggggagcgatcctccaccccatccccttggagagggcttaagttcctttacctgcctgcagagaaatgctaggaaaatcatttctgccatgggatctctttaaattttaaagtcaggaattatgctctgaggacctcttcagaagaaattactttctagctagatttcatgcgagcactttaattttgtcacagtggcatccagcagctggagggtctgtcagccatggaggtggaagtcaggtgcagctgcagcggccgtcaccacagaaacagcccagcatgcccagggtgcaaaacctcaagttcaaccgcagaagaggtatgagtctaacatcaggtacaaataagaatttctctttatcgatgcagacaccaatagacacaagctgcctgggaggaaaggtgctgggaaaagccagtgtggaaggagctattttcttggcttcctttcaatagctgttaaaccatagattttacaccctccttccccactggatccttccctgcaacagggctattgttaaaagacacagagttgagtacaaacagtctgcaaattgtgttaagaatttggttctggaatatgtcacataacacaaattatatatgctggaaatgtatttacgaacctaacataattatgcctatgaaatgtatgttctgtacaggataacgaataactggtctaccaagaatttctataggaagctagagtattgtttttcatcccttaacacagtgaacgtaattataaaagaagtaacaggatttatcatctattaaagaagtgaagtacacgtttcatacctcacctcttctgttgctggtggctggcagcaggcatggcattgttgcaagggtcctctttagtaacaggagtcacaaccgctcccaagtcttcctctgtacagaggcaacagaagactctataaagggaagttatcgagatgagtacatagaaacagcaccctttaacatcaggcagagtgagagaaagtagctgggacctatttaactccatgacctttctgctagatcacacattgtttgatgaaaattatacaggtatgaatatatacacacacacacacacacacacacatatatacacacacacatatatatatatatctttttttt

SEQ ID NO: 89920 - DNA, 1054 bp, Homo sapiens
tccttcctttttttaggtttgaaggaggaaatgtcattttattacaggttgagtaccccttatcctgaatgcttgggaccagaggtgttttggacagattttttttaggttttggaatatacttacttacagattgagcattccaaatctgaaaatctaaaattcaaaatgctccaatgagcattttctttgagtgtcatgtcagtgctcaaaaagtttcaggttttggagcattttggattttggattttcacatttgggatgctaaacttgtaccagcagtcaaactgtggaatgccaaggtttcattctcatgccccatggaatccgatacaatctcactcataaggaattagggccattgcagcatgattaggaacctggttaaatcccacgatgaagttcagaattaaacttagtaaaaaaggagatgtgagttggtttgagccttggaattgaatttttttttttttaaaacaccaactcaaaccagatggaattgaacttctttatggaatctttgcacttccactttgagttggtaaagattattcagcataagctgacatgattggctgtgctaggaatgtgtacaatctgggtggttggaaatctaatggcctggagatataattctcttatattttacagacatgctaggtgataaaatcagagcaggtatagttcccgtcctctagaaactgacaattgaaactaacaccagtactaatcacatggtggacactgcagaacgcttcactcctctgctctactcctttcaagaatccctgtagcaaggtgtcattttacaggtggggaaactcaggctcaggaagacctggccccaggtcacattgctagtaagtggcagagctgaattcagagtcagagctgcttaacccacagcctgaattcctcctcagggcacctttgcctcttaggaggaggagggcagaaggagactgatcgcaagctggtttctaaccggctggtttgagaatggggaagaggtcatgtgcatagcaccaggcaccacagtaaccaccgtctcaca

SEQ ID NO: 89921 - DNA, 1032 bp, Homo sapiens
cagcctccaaagtgctaggattacaggtgtgagccactgggcctggccttctccataccatttgctcccctgccatcttcacttccattgccactctgctccacacctcaatcctcacctgtggccactctgtccagcttggtctccttgcctggcccctattacgtcctatgacccacaccctgtttgctcagtattctctgccacagcagctgctcacctccctgactgtcatggctcttgatgcctctgctggcctatgaagggccaagccctcagtgcattcgggctgggaccccagccttttctcctagtcctcgccataccctgtgctatggccaagtgaaggtcttgctcctggttctcatgtgctcttccaccttcttgctgtctctgcacattcagcctatctcagtcctcttattgtaagttcagacacctcctcgatggaaagcattccttcatcttcttagcctgaaaccctctctcacttttatcagggaaacttctgctcacctcttgttaccgcattataaacagatttactagatacatctatttgccctcaaaatcctaggtgagaaaggaacatctctgggtatcagaattggaggggaggggctagagagaatctcaaagtcagagctgttaggttaggaatgggggctccagggagaattgagcccagccagtgcccagccagataaaggcaccaaggggccccttaaaaaaaaaagtttcattaaagtataacatttatacagaaaaaggcatacatcataagcatgcaactccatgagttttcacagtgaacacatcatgtgcccagctcctagaatgcccatgcagccataggaaggtggagctagaaccagacccctccatgaagcagggccgcagaggcccggcacttctgtgaaaagtaatccagaaaattggctctctagcccagagaagcacaaggaagcctgccatcttcccagggctctggggaatgcctactccctggctgtgaatttatacaactgcagg

SEQ ID NO: 89922 - DNA, 1038 bp, Homo sapiens
tggtacctgcgactgccagtcctgagccccctagtgtaatctggatggtttttgtttaatacggatggccagcttaggattcagttttctcaggtctgctaaaacattaagtatttattcatctgctgccactttaaaaattccatggtggttccctttttcttttttcccattcttttaggtttgtgcttaaaaacaaaaaataccaccgtcatgaacaaaacctctaccatcatttcagtgtggtttttgggagagagtgaaactataccctagtgttcaagccccatctttacccagaggtcattactctgtatttgaagaccaatcaaaagggagtgggcataaacaaaagggaagaaatgatccgttattagctattaggaaggaaaaaatagcaaggagaatgatgaattctctgtaaatgggaaaaaagcagtatgtaactctgaaaggttataagtgaaatttaactgggttatgggaatgggtagatacctattattctctggctatgtctgttaaaaaagaatttccttcgtgcattcaggttcacgcacaaatttgaattcataattcagtgcctctaacaaatccgtgacattggtgacaggaacacctgggtgagtggtgagaactccataggcgctctctgacccctgcttgccttcttttttttgtttgagacagagtcttgctttgttgcccaggctggagtgcagtggtgtgatctcggctcactacaacctctgcctcctgggttcaagtgattctcctgcctcagcctccctagtagctgggattataggcatacaccaccacaccaggctaatttttgtatttttagtagaaatggggttttgccacattggccaggctagtcttggactcctgacctcaagcctgcctcggcctctcaaaggctgggattacaggtgtgtgcctcggcctctcaaagtgctgggattacaggtgtgagccaccatgcctggcctgacccctgctttctgtcacctttttctcttgtgagatgcaccc

SEQ ID NO: 89923 - DNA, 3913 bp, Homo sapiens
actaccggagctaaatgcctaggcaggacaatggcagggggagcctgtcagcatttactatacattgctactgttccacacacatgaggacactagagtggatacatgaccctcaggctttggggggtatgaaataagacctgttttcccctaactaaatcttatgcagaaccccgctgtgtaaagcagatgcaagctgagagactagagctctcccactcatctcctgttacctctcggcgtctccgaggacgcaagggctccagagcctggagcttgaaaacaggtgtgctaggtgattgctacctccatttcacttcttcattaaacaaatctatgagtcttctccagttctctcaatccatttttactgggacgagagttgtcagttttaacttctgtgttaactttaatttatgtgtggtatagaaggatgttttgagagagaaactgatgcgcttaagtcatcatctaacattgtttgggtaactattccaggtgtgcttacacttaccagtttgacattggttatttgtcttatgattgtgtctgtcatcgaaggcataactgattgattacaacaggaaagaagggtagataacaggagagtttaaagataagtgtcattagtaatatactctgtgtgtagatcaatgatgttctggagcattcatgattaccgtatgccttacgggactaagtggacctcatttgcttcagagctagacaaaacgggccactgagaaaaatactgagctgtgtctagtcacagcttggggctggcttttgtttttgtttttttttttattttccttcatcaaacagcatggtgcttgagatatgctgtaaagggagacagatcttttatgcttcattaaataactgagttttaagaatatgtttatttctttttgaaagaaattattctttacacaaatgtgtatgggttaagggtaggtgtgtatcctctactctgttgaattgataggaggaaggactggtacagggtgaaggagctgcttctgtcttgttgcgatccaagttgtaaatgttaatgaagtcttgtttgacctcaggatatcccagaagctcctgagagactgatgacagacaccattaatgaaccaatcttgctgtgtcgatttcctgtggagatcaagtccttctacatgcagcgatgtcctgaggattcccgtcttactgaatctgtcagtttctgtttcaaagagtattaataattttgctttttaagggggtggggactgtcatctggaatcaggtacagctcatgccaaatatttcattctctatctagaataacaatatttaaagacgttgggttttttcaccctcccctgattgaagttgacatgctttgttaaattagagaaatgtaaacatttgaatattacatgatcatagtggctcctttagcccttggagcttaattgtaattttcatttaaactctagggcagtgctgtgtctgatcgcttgatagtaattgtgtatcttctttcacttatatttaaaggtcgacgtgttgatgcccaatgttggtgagattgtgggaggctcaatgcgtatctttgatagtgaagaaatactggcaggttataaaagggaagggattgaccccactccctattactggtatacggatcaggtaaaaccaattttttaagtactcaacatttttttccactgtaatcgttctgtatatattgaaatttttaaaaggggagaattcagggtagtactttggtatttgaatgagctatattcagtttgcaggttataatgtggtgtgtgaatattgccagctttgttttggccaagttatatgttaatttcatttgaaaacctgtttaacggccggcttgttgattgcaactgagttttaaaaaattgatcctaccagtatctagtacccttcttcattttcctcttataaatagacattgacttattttaaaagtttttaaaaatctcttctttccagggtagtacttattccctggttgattttttcataccaaattatttctttatgcatggttcatgaaggcatagagattaagtgctgggattacaggcacgagccactgaatctggccatagttgaattcttaaccacagtgagctaactcctttcatggtggaaaattttaactgtcttagatgaaagttttaacttaagtatttactcctctttctttctttctttttttaaacagagaaaatacggtacatgtccccatggaggatatggcttgggcttggaacgattcttaacgtggattctgaataggtatcacatccgagacgtgtgcttataccctcgatttgtccagcgttgcacgccataaccattttctccagaagcgtggaggaaagattatgaaaggaacaggctctttaaaaaagaaaacaaaaagccagaatcttcctttttttgtttcattggggtttctctttctgtttttctttctactaccataaaaactatctcaaatcacctgaacatcaagtgatattaaggttgtcatcttaagaaaaaatatccatttttttcttaagttcgggaaacaaagttcggggaaaatacctggcatgaaactgtagttagggatacatttcagcattttactcactttatccaagttattcattttattcaagttatatgtatgtataattcaacaattttagattatggtgtaagatactccagtaacttatctttctgtccttttaagtgtaccttgaattctttgatttattttattgcatcaatgaattaaaacaaaaatcttgggggaagaaattggcaatatcgtataaaaatctgctcatattagaacacagtataattcagcagtaaacactagaatcaaatgaatagccttttgtatcagttattaatcttttctaactctgcttagctgctaataatcctgaggcatagaaattgaagaatttgtaaaaatagaattgccttaaaggatttgaagtaagaacataattttggggagagttttttagtgattcacagtatccctcttagcattaatttaaggtaaagaggcagattgattttccctctttcctggtaattcctaagtaattaagaataaataagttccaaaagaaattgtagctggaatcttaataacaattgtgagtggctgtttgagttgcccccaccatgtccttagatctaatctgtgctaccttattaactcacagcaggcttactgaatggcttcatttcagatttagttgatttctccaccaaatgcatgtcatgtattctcaataggctgtattcccagcagtcaataaatgaacacccgtaaaaactctttgctggcttaattttcttaaagctaaacatctctttgtcacattcgttcatgcttttgcaattattttatcttttttatgatgtatatatgtgaaattaagtactactaaatttagtagatattgctaacgttatatggtaatgagaacgaatgattttttaacgttagatatgtgggtcatggttaaatcttttttgtaatcttttttgtgttactgttggacacattagattttatcctgttttgcaattaagtgaaatgacaggtcaaaatgaggcatttaggctgggtgcagtggctcacacctgtaatccctccactttgggagaccaaggcgggcagatcatctgaagtcaggagttcaagaccagcctgagcaacatggtaaaaccccatctctacaaaaataaaaaagttagccaggcatgatggcaggtgcctgtaatcccagctacccaggaggctgaggcaagagaattgcttgaaccccggaggcagaggttgcagtgagccaagattgcaccattgcactccagcctgggctat

SEQ ID NO: 89924 - DNA, 2966 bp, Homo sapiens
ccagcactttgggaggccgaggcgggcggatcacgaggtcaggagatcgagaccagttttgccaacatggtgaaaccccgtctctactaaatatacaaaaattagccagacgtggtggtgggcgcctgtaatcccagctgctcgggaggctgaggtaggagaatcgcttgaacccaggaggcggaggttgctgtgagccaagattgcgtcactgcactccagcctgggcgacagagtgagactccgtctcaaaaaaaaaaaaaaaagatatttgtgtgtatgtgagtgtgtatttatccagaaagaacattggtaaaaatatcaatataaaactaaactaaagctgagaattaggaggttcttaaaaatctcagcttaccaaaactttgacataaattaaaatcctcaatactgttaattttttatttccttttccctctttctctggaccccacttttaaaaaatgcaggctccaggtggccatgagctgagttgtgacttctgggaactaattgggttggcccctgctggaggagctgacaacctgatcaatgaggagtctgacgttgatgtccagctcaacaacagacacatgatgatccgaggagaaaacatgtccaaaatcctaaaagcacgatccatggtcaccaggtgctttagagatcacttctttgatagggggtactatgaagtaagtatgcattcgtcagcttttgcaaagaatatgttttttgccgttttgaaacttgaatagtggtgctcacgatagcattgatttattccttctttgcatttgaacaggttactcctccaacattagtgcaaacacaagtagaaggtggtgccacactcttcaagcttgactattttggggaagaggcatttttgactcaatcctctcagttgtacttggagacctgcctcccagccctgggagatgttttttgtattgctcagtcataccgggcagagcagtccagaacacgaaggcacctggctgagtatgaagttgtctttttgttttatttctttctaggtaatatctttagagaagaaatcttagtgtaggtaaattatgtttatgttttaaaaaaaaccaactgatatattaagtggttaatggaagaacatataacaaagttttgccaccttagatcgtagctaagttctcttttttcactttgacttgatcttttatatataaaggagcaaacaagaaattgctactcagtggagaagaggggagtccacagctaatttgcaaagttgggaattggtagcattgttggcattttatggacagcttcccaatgttaaaagccttgctggataaaaaaccagtgcaggagaaaagcagtgctgagctattgtctcgttcttcaggtacactcacgtggaagctgagtgtcctttcctgacttttgacgacctcctgaaccggttggaggacttggtttgtgatgtggtagatcgaatattgaagtcacctgcagggagcatagtgcatgagctcaacccggtaggtgcagtgtttatggaaagaaaaagtcacagtccttttttggaagacaatgaagtcttcaccctcagtttttgtagatttgatggcttggtgagctgaaataagtgactaattattttgaagactagaatttgatgttagtcactgtcaataattttataatgttttcagttatataacaggctcatgttttccattttaggaatgtctacatagttttctagtctgaagttatatatatatatatatatatatatattttttttttgagacagagtctcactctgtcgccaggctgaagtacagtggcgcgatctctgctcactgcaacctctgcctcccagcttcaagcgattctgcctcagcctcctgagtagctgggactacaggagcccaccaccacccccagctaattgttgtatttttagtagagatggggttttaccgtgttggccaggctggtcccaaactcctgacctcaagtgatctgcccacctcagcctcccaaaatgctgggattacaggcatgagccaccacacctcactgaagtaatactttataatagttttttaatggaaattttagtgttaatgtttatatttatgtatatatacacattatatttttcctttcttctgtagaactttcagccccccaaacggcctttcaaacggatgaactattcagatgctatcgtttggctaaaagaacatgatgtaaagaaagaagatggaactttctatgaatttggagaagtatgtatccctttctctcattgtttccaaggtgggattgggctccaattctcttcttctggttaatgaactagtaacatgggtggcatctgcctgtcctcaaataaatggtaacagcaggacctgcttcttgggttgcctgcagattcgctgagttaacagagtcagccttaggacagtgcctgttctgtaccacccagtaagcgtaagtgagtttctttttttttcttttttttttttttttttgagacggagtctcgctctgtcgcctacggagtgcagtggcatgatctcagatctcggctcactgcaacctccgcctcctggattcaagcgattctcctgcctcagcctcccgagtagctgggactacaggcgcacaccaccatgcccagctaatttttttatttttagtagagacagggtttcaccatgttggccaggatggtctcgatctcttgacctcgtgatctgcccacctcagcctcccaaagtgctgggattataggcgtgagccaccgcttctggccaagtgtgagtttctaagctgccttcatgtctcatgctttgcctcttccctcttccttcattgttcttccttggccacagcttataagctctctttatcattctctaggctggtaggagtgctttagaaggttgtgaagcctttgaaatcacatgcaa

SEQ ID NO: 89925 - DNA, 1019 bp, Homo sapiens
gaaagggagtttttaaggagaattggctcacaagatcacaagatgaagtcccacgataggccatctgcaagctgtggagcaaggaagccagtagtggctgagtccaagttcaaaagcctcaaaagtagggaagccgacagggcagccttcagtctgtggccaaaggcccaggagcccctgtcaaagaactggtgtaagtccaagagtccaaaagctgaggaacttggagtctgatgttcaatgacaggaagcatccagcaccggaggaagatgaaggctggaagacctagcaagtctgctcttccaccttcttcctcttgctttttctagccaggctggtagctgattgggtggtgcccacccacattgagggtgggtctgcctctcccagaccactgacttaaatgttaatcttctctggcaacacccagatacacccagaaaatactttgtatccttcattccaatcaggttgactcttaatattaaccatcacagcatataaatacaataaatgtgaagtacatgtcaaattcactatgccttttccagtgaaatatgtacattgtacaactcaggtgataaaaagaatacaatgatttccagccttacggaattcctgaatcatcctcatgggctataatatagccactgtgctgtagatatatgaattacttttcagccagatggaaataaaaacttaacaacccacctaaatatgttcagagaatttcttattagaatttgagcctgtttttattgtttttttttttttttttttttgagacggagtttcgctcttgttgcgcaggctggaatgcagtggtgcgatctccactcaccacaacctctgcctcccaggttcaagcgattctcctgagtagctgggactataggcgtgcgccaccatgcctggctaatattttgtatttttagtagagatggggtttcaccttgttggccaggatggtcttgatttcctgacctcgttatccacccgcctcagtgagccaccgtgc

SEQ ID NO: 89926 - DNA, 1036 bp, Homo sapiens
caaatctttcattgaaaagtgggacaggccaggtgcggtggctcacgcctataatcccagtacttcgggaggccaaggcgggtggatcgcctgaggtcaggagttcaagaccagcctggccaacatggtgaaacctcttctctaataaaaatacaaaaattagctgggtgtggttgtgagcacctgtaatcccagctactctagaggctgaggcaggagaagcacttgaacctgggaggcagaggttgcagtgagccgagatcatgccattgcactctagcctgggcgacaaaagtgaaactccatctgaaaaaaaagcgacggtggaggggacaaaaatacaaatgaaatgttttaagcggatttcagtaattggacctttaggacataaataagaaaaagtgattttgttcaagaacatttatgtatcaccgagtgcacagtactaccccaggcattgcaggggactcaagggtagataaggcataatcccttaactcatgttgccttctgtcctgctttcccctggttgtgtggatcttggggatcatgtaggatttgaaagtccaatacattgaaaataaaatattttacaaatactgagtagtggtattaccagtgggtacttcaggggcagggagccatgtgggaggtctgaacttgaatgtttaaccttggagtttcctttagataagattaagtcatggctgggtgcagtggctcacacctgtaatatcagcgctttgggaggctgaggtaggaggattgcttgagcccaggagcttgagaccagtctgggcaactcagtgagacccttgtcactacaaaataattagccaggtgtggtggcatgtgcctgtagtcccagctatctgggagggtaaggtgagaggtttgcttgagcccaggaggtagaggctgcagcgagctgtgattgtgccactgcactctagcctgggtgacgaagtgagaccctatctttaaaattatatatatatataaaatttaatgccttgagaacagtctgcctaaatta

SEQ ID NO: 89927 - DNA, 1016 bp, Homo sapiens
gatggagctggggttttttggccacatgcaacagccccttcctctactcatctcctctctccttcatcccccaaacaaaagctagccttttaagtaccatgttctggaaggtattgaagaactgtggggtcatggaaaaggcttcatgtggactgggattgttgctgttgtgggaagcaagtgctccacttatgacaaaggaattcatttattaattaattttatctagcaatatctgaaattcttctgggtgtttctcattatcagttttacattaagaaagaagacttggatttttttttgttttgttttaaaccatgccaatacagtgaaatgcgtttggttctgagctgcagtagaggggctgtctccagttttgcaccatttgtgatttttaacacttactaccgtctgcctaatattagtgaaaaagttggtgtgtataaatgacattattgaacaaatgttgtttatttcaatttgacaggtgaagattggtgcgttagaaggatatagaggccaaagagtaaaggtgtttggctgggtccacaggctgcgcaggcaaggtaaatggcaaagcttttccttctttttaatgtttaaatatccctgctcttagatgaagaaaaacatacaaagatttgcaggggtttttttctctccccctttttttcttagacacagtctcactttgttgcccaggctggagtgcagtggtgctatctcggctcactgcaacctccgcctctcaggttcaagcaattctcctgcctcagcctcctgagtagctgttatcacaggtacctgccaccacacctggctgatttttgtaattttagtagagacggtgtttcaccatgttggcccgtctgctctggaactcctggcctcaggtgatccactgtcttggcctcccaaagtgctgggattacaggtatgagccgctgcgcccggccctctttttttttttggtatgctggctagacttgaactccccccagccatcctcctgcctc

SEQ ID NO: 89928 - DNA, 1946 bp, Homo sapiens
acacagcaatgcttgatatgtcccattggggaaaagaggtattctacatgggggagtttttcagattaaatgagtttagctttttgtgctcttttttttttttttttttttttttttttgagacagagtctctctctgtcgcccaggctggagtgcagtggtgccatctcagctcactgcaagctctacaggcgcccgccaccacacccggctaattttttgtatttttagtagagacagggtttcactgtgttagccaggatggtctcgatctcctgacctggtgatcctccctcctcggccccccagaatgctgggattacaggcctgagccactgcacccggccgctttttgtgttcttaaccattgttttgttgaaagtttcaaaaatgtctgacacttctctgatttctcacagagaactaaccttttagatgtcacttgcagttgagttttgctgtcaggtgtctcttctgttgtccttgtacctgtgctggttgctacagccacttaagatctgttgcttatagtctgcttttcctggggaactgtatcgtgtatacccgaacttgctgtaattgtttgtgagaggacctcagagcttcagctttaaccagtgtgcttctttttttttttttttttctcttgagacagagtctcgctctgttgcccaggctggagtgcagtggcacgatcttggctcactgcaagctccgcctcccaggttcacgccattctcctgcctcagcctcccgagtagctgggactacaggtgcctgccaccacacctggctaatttttttgtatttttagtagagacggggtttcaccatgttagccaggatggtctcgatctcctgacctcacccacctcggccttccaaagtgctgggattacaggcgtgagccaccgcgcccagccaaccagtgtgcttcttaaatgttcaaccagtcactgtgccaatatcagcttttggctgttggggtctttatgcttagattgttccagttgccttatacttgagatgttattttgattttaagtattgtacaatgttcaagaactgtcttttctctcctccctacccaaggctttgatgacagtagggaaagaaccatttcctaccatttacgtagattcacaaaaagaaaatgagaggtggaatgttatttctaaatcacagttgaagaacattaaaaagatgtggcatagggaacaaatgaagagtgaatcccgggaaaagaaagaggtgagtcctgaccttgccatcgtgaacgttgttaaagttagaactctggcaaccatgttaacaaactgcttcatcattaaaattaggcagaagatagtttacgaagagaaaagaacctggaagaagcaaagaagattaccattaaaaatgatccaagtctcccagagccaaaatgtgtaagtttgtttatcttttcaaataccgtggacttggctacatcagatcattatttctgtgtatgaggggcatgtcacatggtttgttcctttacattttgtttttactttccatttatttatttatttatttatttttgagacggagtcttgctctgtcgcccaggctggagtgcagtggttcaatctcagctcactgcaagctccgcctcccgggttcacgccattctcctgcctcagcctcccgagtagctgggactacaggcgcccgccaccacgcccggctaatgttttgtatttttggtagagacggggtttcaccgtgttagccaggatggtcttgatctcccgatctcgtgatctgcccacctcgacctcccaaagtgctgggattacaggcgtgagccactgcgcccggcctactttccttttattttttatttcttaattttaaattttaatttatttattttgagacagggtcttgctctgttgctcaggctggagtgcagtggtgca

SEQ ID NO: 89929 - DNA, 2081 bp, Homo sapiens
tcgcagctggcgcggtgtttgctggtgacatgaactcaaccagcctccaccatctggggatcggggcgacatccttggtctggtttgcaagaggacccgcacgcctccagctggggcggaattggaagattcagaaaggaaagttggggaggcggggaaggaagggtgcaaaagtgacactgtgccagggtctccagggccgcggagctccgggacaggcagcgccttccgagctgcacaaacgcgtggggcggggcgtctctggatccggaagttgcctctgccctcaccaaagatggcggccccggcgccgctcgcccacctctcgtaaccaatggaaccgcggcgctcggccgattctcgcaggcgccctcagatctacgctctctgatgcaacgccggaatcgcggaaaccgccggtgcacgttggagtcataagacggcgtcggtgttgcagtctgtgtccttggaggtgaccagggccactgcaggcatggtgctaggtgggtgagactcagtgtatggcgcggtgttccctgcctggggcaggaactctgctccagtcgggtttcggcgctttccttagtgcctaccagagtgggcgccccgcgaatgtttggggaccgattgcagggagggagggagggagggtgctggcctttgctgggcccgggacttgaagggccaggccgggcttccccgagtccgtcgttcccccgggctgcgatggcggtggctccgggcccttcccctgccccgctgcgaaacctcccgattgcgctgagactcaggcgctgggacgggttcagacacagggtagcccctactcctgcagttcttcaaagtgatcgtcaggaaggggctttaggattctagttgtttttctcccaccctcatttttttattgaggtttccggggagaccatactgtgcagtaggaaaaaaaaaaaaaaaaagagagagacctggatggatgttaactgttcagacctactagttgtgaggccttctgaaattttctaacctcagagcttctgtttcctttaaagtccagagggagctggtgtttatttgccatctctacaaaaactggcactgggatatctgatttgtatgtgttattttatttcatcctcagcacagcctttcaagatggggattgtttttcctattttataggtaaagaaataagctcagaaaggttaagtaaattctccagagtcaccctgccttttaaggtacaaaatccaacattccagcgtatgtctgatcaacttcaaagcccatattttatttttgggtgcccaattagatagaataaatatcacaaattaaaatgatcagagttcattttgaaaacctggattattaactaatgtttttatgagatggatgttattgaaatggagtggggaaataactaggatattaattacttatggacctcaatttttattaatcgatgcttgttctgtttacaaagataaggaatgaataaagtagtaaggtgactaatagttaatggccagaccataacttaccctcattttgtcaaacagcagagctgtacgtctctgaccgagagggaagcgatgccacgggagatggaaccaaggagaaaccatttaaaacaggtctaaaggtagagtctcttctcattaggaaaatgagactgcatttattaatgagttatgtcaattttcttgtgacttgccaagaacttaatttcaaacactaggttccaaagagaattttcagaaaagggaaagtaaggaatgcatacagatatgtgactttaagattgttagatgatcaaagtctaaacttactttttaacattttgaaaaaaggtctcttctttcttaccacatggcattgcttcttggaatttttctctccattgagtcagattgctgggttttcaattcttgtaaagataaaagttacctttcctcagttacagtgagctcatgaccagggggctcctgagagggcttttggtgaatttaccacaatccagagtgtgatcctgagatttgactccaagaccaccaagaatggattcatttgtcagagctgac

SEQ ID NO: 89930 - DNA, 1040 bp, Homo sapiens
ggggtctcgctctgtcatgcaggctggaatgcagtggtgcgatctcagctctctgcaacctctgcctcctgggttcaagtgattctcctgcctcagcctcctgagtagctgggattacaggcatggccaccaggcttggctaatttttgtatttttagtagagacagggtttcaccatgttggccaggctgatcttgaactcctgacctcaagtgatctgcccaccttagcctcccaaagtgttgggattacaggtgtgagccactgcgcctgactttttttttttaaatgtaaaatatacataacattgaccatcttgatcctttttcagtgcacagttcagtggcattaggtacattcacattgttgtgcaaccatcaccaccatccaccttcagaactttttatcatctcaaatagaaactatgcccatgaaagagtaactacccccttcttcctatttcctggtccctgtaacctctattctgctttctccatgaatttgactattctacagtacctcaggttaagtggaatcatgcaatatttgcccttttatgactagcttatttcactagtgtaatgtccttaaggttcatctatgttgtagcacaagtcagaatttccttccttttttagggctgaataatattccattgtatgcacataccacattttgtttacccattcatctgtgatagatatttgggtagttttcacctctggctactgtaattttttcaattaaaaaaattttttttaagacaaggtctcactctgttgcccaggctggagtgcagtggtgtgatcatagcttactgcagctttgaactcctgggctcaagccatcctcccgcttcagcctcccaaatgtctgggactacagacactcaccaccacacccagctaataaaagaaaaaaaaaatgtgtgtgtgtgtgtctgtgtgtctcgatatgtcgcccaggctgaactccagggctcaagctagcctcctgccttggcctcctagtgttgagatgacaggtgtgagtcaccatgc

SEQ ID NO: 89931 - DNA, 1083 bp, Homo sapiens
gacttcacatttcattggtatttgtttttcatgggcagtttcatgctgtcacgttgcccttcagagaatcagggaatgccttcgtagaatattaacgacaaattgttgaatttgcacagcttgttttgtctccctgaattagtatgtgtaagaaaaaccaatggaagattttagcaggctctgaaagtagaatgcccgctgaagcaaacggcagggttgttcttccaaggcgtattaaatatgggtacacttagtttgcagacttggtgtgctgcagaatatcacatatgaagatattttgaccgctatttagaagagtgacctcataaatcttttagcaaagtagacacacatacctaccacatttcttaaaagtagattcgtattttgatttgagattgttgaaaagcatggtatgtttggagtgcacttagttatgtcccatctcataaagactgttgagctctctgcactgctgatgatgaagcattgcatgaacccagaaaacggggatgccaaagcacagggcttaggtgctgttccttgcgtcatcagcagaggtctgtccactttgtagaaggtaaggggttgagatgtgggctttgcttgtgtgaatgtatgtgctgtttaattttttctgtgtgtttcgggcggaggtttctctggtgagttataattcatatttaccctgatttaagtcatgtcactttaggtagccagattcaaaaccatcagatgaaggacttttggtgttagagggattagcagtttaacaaaacttctgattcatggcccaagatcagatttggtttggaatcagaacactttggactagtttctgcatctggcttgagtccttgtggatttcttgttttatttctttatttttggcaatctgtagtgcattttggcatagtttacttatgaatgttaccgctaactttctgaaatcttttattccattttagaaaggtatcatttattgaaaagatttttctactgaacaaaatactgggattgaatggcagcttcttatcacattagatatgacattaagtaatttcgttagtagttaaaatgaag

SEQ ID NO: 89932 - DNA, 1016 bp, Homo sapiens
cagatgactgtagtttctttaccattacagaatgcaattcaaatgaaaaccattgcatggtactcaggcatttcttcaatgcagtgtgtgcccacatcaccaggaagcttacttgggaaagtttgttttgggattctggagtacctcaatatatctggtatattttcccaagaaaagtgaataatcttggggggccgaggtggacagattgcttgagcccaggagtttgacaccagcctgggcaatgtggtgaaaccccacctctacaaaaaatacaaaaacttagttgcgtgttgtggcacgcacctgtggtcctggctgctggggaggctgaggtgggaggatggcttgagcctgggaggttgaggctgcagtgagccatgatcatgccactgcactccagcctgggtgacagagcaagacactgtctcagaaaacaaaggcaaacaaacaaagatcaccccaaagaagaactcccaacatattaaaagtcattgagttttgtacccttcaaatggatgaattgtgttgtgtatgaattacatctgaataaaactgtttaaaaatattaagaatgattgagtgtgacattattgcagcagtacattggagtttctgctaaattacttttgcattcatttcaaaaggaagcaactatgcccattgctaatttaataacctgtttgcttgtgcggtgtttaaaatggcatcatgaaaacatggcaatgtgtgatagattaagagccaattaaattttttattttgagttacaagatctgcattaaacagattttattgttgcccttgaatttccagtcttagatgagtagcagcagtgaaaaaaagagatcctaacttaagagttttcaagctttttgatgttgcaggtatttgaataagtgggtctgtcttactgaaatatttgttaattagcgataaagcaaactatatgttgatcttttggtagtccatgctaaggaggattagaataatatataaataatataatggtaata

SEQ ID NO: 89933 - DNA, 1108 bp, Homo sapiens
gtgacttcttggcaggcagacatctaccaagagattttgtattctttttatacctcctattcaccaaaagaaaagggccattcaaaagtgagtttttctttttttttttttttaagtttaaaaagctatgatgtggccacccatggtggctcatgcctataatcctagcactttgggaggccagggcaggcagatcacttcaggccaggagttcaagaccagcctgaccaacatggcaaaaccccgtttctactaaaaatacaaaaattagctgggcgtcgtggcgtgcccctgtaatcccagctacttgggaggctgaagcaggagaatcgcttgaacctgggagatggaggttgtggtgagctgagattgcaactctgcactccaccctgggtgacagagtgagactttgtctcaaaaaaaagctgtgatgtgaaacctgttctgtgaaggtggaacttggaaaggcttgtaaggatggtggtcccatgaagaggatgaacaaaccaagggaactgtcctcttgctggtttgggtgatgtcccatcacctgtcactttgtttgtttgggctgcagtggaccaatggtttcccaggcacactgaagtgacatgtagatggattgcttgagtggctccggcatgtttccatctcctgtctaccaggcagagaccgtgttccctgttttgaggggatccagaagtgcagtgacaagggcctgatttgcatctccagctcctggtcttgcctgtgttaacaattttttttttttctttccagatggagtctcactctgtcgcccaggctggagtgcagtggtgcaatctcggctcactgcaagctctgcctcccgggttcacgccattcgcctgcctcagcctcccaagtagctgggactacaggtgcccaccaccacgcccggctaatttttttgtatttttagtagagacggggtttcaccatgttaggcaggatggtctcgaactcctgaccttgtgatccacctgcctcggcctcccaaagtgctgggattacaggcatgagccaccgtgcccggccaacaatttttacattctaattaatttccagtttccaacctgactcaagg

SEQ ID NO: 89934 - DNA, 1830 bp, Homo sapiens
ggaatgcgctgagtaatgattgcaccaccgcactcgagtctgggcaacagaatgagacctcatttcaaaagaaaaagaaaaagcaagactgaatcatttcactttgtattctcctccttgctctcattccttttgtgcttcatgcattgtgtgtgacaattggatgcagccgtaattattgtcagtaacttggtttttaagcttcagactgtatttcctcctcacttgttaacaccagaagataaatgaatgtggctcttggattgaactacatctacagggagctgaacttcccatgttgacgttgaattctagagtatgcttatgctgattcttgagaaattggtatgtgccgtgcctttggaattgataccttaattttcagtgaatattattggtattattattaaagagaacactttaagccaggagtaagagcttttcctccttttgagaagtgaggtacagaagagtatactgcagctgtgggagtgatgggtggggtggggcagtgttgaagaatatttaataccacgaagatgtcaccagtataatattaaatagaaaaagtaggttataagacagtggatccagtagaatcctattgtggttaagtgtttatatgtagagaaaatgactaggggctaggcacagtggctcacgcctgtaatctgaaccactttgggagatagaggtgggaggatcacttgaacccaggagttcaagaccagcctgggcaacatagtgagactctgtctctataaaacaagaaaaaagaaaaactaactagggatatattccagcatgttagtggaggttatctttgagcaaaggggattataggtaattttttattgtcttgtgttttgcttacatgtgttttctatatttctacaataaacctttttttcttaatataaaagtaagtttaaaagtgagtttaaaaatccctgaaaggcatgtacttcaagcttcaagtgaaagttatagtacttgttcagcacaaatactgatatagtgtttgttcagtggaacacttatttagggtctgccttgtgttttgtgtctaaggattaccaggtcattttcatattaggagctcaccactacgttgggagttggagagatagagcaaggactattttaaggaaaaaatgactggtaaattgtatttctttttccccacttgcagtttgcaaaatagatgtttcatttctctccactgtggacacttaaagtttgaatttccatccttctgtgcactccagttgcgtgaaagtaatttacattgctagtagtggtttgggttctctgaaattttttgtgtgtgctatggaaattgtctcctgtgatcagactcaaatccatttctccttattattgttttcttaggttttgagttagagaccttttcatgaccgtataaggtgttgaataggtttagatatcaaagtgatagctatgcatagctatactcacctgtgagcggtcagctcttcagtgtttctttcaactgacttgtaatatccagccactgttgggtgtgacctaaagtgtatctcttcccaaacagaagggaggagttgacaaacaccatgttacttttaatcagagacttgtccttgtcccccttcccccagccttttaataattctgaattcatgttgcagtcgatatgtgtttaaagtgttggtaggtttcttgtactcacaccatcctcctccactcctctcacccccaaaaagtgacagctgacagttgatggcatcttagaattgtgaggcttgagttggtctgtctcaattcgtgttttatggtggcccataaatt

SEQ ID NO: 89935 - DNA, 1055 bp, Homo sapiens
atggtggctccagactagaggaggcaggaaggaaggtggttatttatagtcagctgtgcataggatcgatttttttcaatcctgaaggacttgcagcaggtagttcaaagaaacctcctttagacgttgactttcccttgcagttgtaaatatgggaacatttaccatcttttgctttaaaatatactgttataattaaggtaaaatgtaaaacttataacttaaaaactttactccctgtgcatatgaactatggcaagcttctcaaattaattactatccctttgggataaattaaaatattttgatttgctagaggtaaggagcccttttgagaattagtttgttttagttgagaatgattagagggctagaatgatatatagctctaaataggaaggtttctgattcttttggctactctccacttttactggttattttccagttctgggaagattctgcatgtatgtagcagcctcccttggctatccatggtattagagctctagggacagagttctcctagttgaactcttcataatatctcattattggtattttcaaagttatatgtgtattttaagatagtctttggatgatgttccaaagaaggctgctttgttgagattgagatagttgttttgcagttgtgatttctctttgtaaaaagaagtctttgtgtcggtcccaggtcttattttttgcttgatcacccagtacgtgggtgcacttgggctgttgggaccatctggtgagtgtgaggtctctgtacttcacctgtggagtctgttgtcctgaaaggtgccggctcaggtggtggtgctttgaggggagcttgtttgctgcaccttccagtctgctagaaaatagatgcttagaggggcatttcggggtggaatctgatcatggagtttggtgagcaaacagggcctcaagttttatgttgtgagaaataaatactgagtttatgttttaattatggcacagattaatacaaaatctggtgaaaaatggagaaaaggagagcttaaaacttagctgtttgttgctgt

SEQ ID NO: 89936 - DNA, 1676 bp, Homo sapiens
ccaaaacatcttgtgcatttcttgctttttagtcatgcacagaccttgtctttactttcaaagacagtttggtactgaaaattgctctggtaaattaacacaatttatttaatccctgctctttccaatctttagcaacgtttttttcattgtcaccatcagatgaccttgctgagcttccaagtggcaattgcttttgttgtattgtttaaaggcaaacaaaaatcaattattattggctctagagtgcctggcgaggtggagctcagttctttgtgcattgcgcactatgctgctggtgtctcagctgccatgcttatggttgcattactttcctgtctagctttggtattcttgcctttaaaaatttctttttccatttgcttttcttagccagtgatgacagtaaaataaggaacgacctatttattgttttaagagatacgctggatggtgcccaggcagatgagcattgccattcaaggtggcttcttggtagactgcatttactcttaatcgggtgcctgtgggtcagtgcatttcttggtcatccttactctgtcaaagctgccttgttagccaggttactagccatactagtctcattaccttacgataacacctcattcaaatggccttaacgaagttgaacacttatcttagtcactatggttggctttgaaccttttctagaagttaagtttattccctgggaaaaaacgtgtttgccaccacacagagtgctgggtgtactgggaacccggcttcaaaggcaactactccagtagggaaggttgaggagggtattgaatgatagctcactgcttaaataagtgtttagagtcccaaggtatatgtaatggcatatgaaatgcctagtgtttaaagaatattcagaaataatcagtcatactctttaatattcatatctcatagagttagcatcaggaaggaaacttggtagattaaataaaatagcagaaattactgctggatttttgtacagtagaaatgtatgcacatttttctcccctagtagtcacttaagttgcatatccatttcctgttacatctcatgacatgttttgggtaaaccgtttttggaagcgtccatttgtgtagaagttaggtggttctgagtttaactttgtacacatttctaggcacaaggaaattaaataactggctgagtgagagtgatctcgttgaatgctgaggcttgtttgggaattgggtttattttggtgaaatgtaaatttagatccactctgtattagtttttttttttttttttttttttaacggagtctctctctttcacccaggctgaagtgcagtggcatgatctcagcttactgccaccatgccaggctaacttttgtatttttagtagagacggggtttcaaccatgttggccaggctggtcttgaacgcctgacctcgtgttccactcaccttggcctcccaaactgctaggattacaagcatgagccatcgcgcccggccaagtccgtttttacactcctataacgacatacatgagactgcgtaatttataaagaaaagaggtttaattggctcacgattctgcaggttgtacaggcttctgcttctggggaggcctcaggaaacttacagtcataagggaaggtgaagaggaagcaagcatgtctta

SEQ ID NO: 89937 - DNA, 1420 bp, Homo sapiens
cctgaagcctctctccttggcttgcagatggccacctggccaccttctcactatatcttgtggggtttttgtgtgtgtgtgtgtgtgtgtgtgtgtgtgtgtgtgtgtttgagacagggtcttcctctgtcacctaggctggaatgcagtggtatgatcatggctcattgcagcctcaacttcctgggctcaagagatcctcccaccccagcctccagagtagctgggactacaggtgtgtgccgcaatgcccagctaagtttcgtaattttggtagagactgggtcttcctatgttgcccagcctggtcttgaattcctgggctcaagtgatcctcccacctcagccccccaacatgctaggattgcaggtgtgagccactgcgcccagcctggtcttgtctttgggcacaaatatccgctagtgtctcattgcgtgtccacatttcctcatcagctctactggattagagcccagcgtaatggcctcattttaacttaatcacttctttaaagtcccagtctccaaatacagtcccattctgaggtagtgaaggttaaggctccaatgtgaattctgggggaacatggttcaacccaatgagaacaatggttatctgttgggagtgaggactgatatgagtggagatgcatcggtaaagatgcgcggaccacagatgtgacgcagcaggtgtgcacagaggtatgggatggggtcagtgtggagggccgtgtgccaggcagcagtgtggacttggtcctctacccagcgtaggggggtcattctgggggctgaaccgagggtgacactgtaaaaccatgcttcaggaaaattcatctctgcgccctggaggatggactgaggagggaagaggctgagggaaatgagtgtgcaagataatgaggcgatcccaagggaagtaaaaggattggaggccttgcaaaagcaaagcgaacccaagcttcagaacggaggcatctgagatgatgtcacagttttgaaccttatttatagaagaaagagggtgaaatggggaattaggtaaatgaaaatataggtcccattgttggtaagatacatggagtgtcattgattcagtatttagtgtgcttttccttattttaaacagctttcatagctcacttccaaactgtatttttgcaaccaactctttttctctctctattaaaaggagaatcttttattttacactaattaacagctgattctcctaagagagttttcaggaacctaaacctcagagttagatggagacaagtgtctttgttaatcatttatgtgaggtcagattgtacaatttgtaacagattttacagctggttcctttattaagggatgggtaggattcctactaattattattttgagttttactttgtttttaaccattgaaacttgg

SEQ ID NO: 89938 - DNA, 1128 bp, Homo sapiens
ggagaaaataagacgagattttcatatttgcttgtagatccataagaaacttgggaagaattcctaagaaactagcagtagtggttccctgcagggtgggggctctggatgtgggtgtggcaggggatgggagagactggcaggttgaggagcagggtgagagggatgtttttatgatgtacattctcatatatttattttgaactatttgaatgtattactcatgtaggaagacaaacctttactttccaaaaatattagggaaaaactttcaagtctctcatttttagcctttttgttgttctgatatttccacacaggacagacggtaacatgcccgatacattttaagtacaaacaaggctgtaagttgccttacttgactttcttcactattttctattcaaaaaagtatttttgaatccaagggaattagaggaataatcttgaaatgattatgttttgggggaaaagtatattattaatatgatagttatctaatgttgtgtaacaaattgcctccaaatttagcatatgaaaacaataagcattcattgtgtcacacattcattctttcttttcagtgaaagttaacctgtttccatctgaatagatttctcactctgtatcctgccagtaatcattttgtactgtttctgtgcctttcaatccaagagtccaacctgatgaggttctgctggtgtaattcttttaaaagcattgtggatgtcctgtgaatctcactggagttcactttttaaacattagacttctgtggagactgctgaaggacaacacccttacttcttagggcctttggtttgccagaattgttctctgagccattgccttggattttttcctgacttcttaacaaaggattttataggtgggaccttcaacactctggaaattgccttagctacattcagccatctccttaggtacattttccatctcccacattgtagcaggcaatggcgttgctaaactttccatcaggaaataacaaagatctccttttccagtttccagtaacattttcctctctacaccatcatccacagtctcctgaaaggccctccaggttctagcttttccagggctcttcaggggttttcgaactct

SEQ ID NO: 89939 - DNA, 1687 bp, Homo sapiens
cttcctgggggtcagggatcccagagtgtctccgctgtgtcagtatgtctcagggtttcctgaggctgcagtcattatgcccgctagggcttgggtgggactgaagcacctgcttccaagttgcctcactcacatacctggcaagttggtgccgttgctggcaggaagcctgcttttcttgccaggtggacttctctgaggggtgcgtgaatgccttcactacagggcagctgacttccctcaggacacatgattcaggagaccaggggaaagctgcagtgtcattttatcacataatcccagaagtaacactctgtcatttctgcaatatcctgtgggttacacgtcagcattattcattgtgagaggtgactacatgagggtgagtccaggaggcaagaattattgggggctatcatggaggtttgataacataattggtaagaaattcagatacacctcagacttgattgtggcataccagtgtgttgtaaaacttgtgagaatggcttgccttagaaagacaagtagtccatccagtgtcttattcttatgttaagttgggattgctattttgttacccttgggcctctatatacaaagcctctcatagtaatagatctaattgggttgaagtttagtattatgtatatgccctctgcttttattagtagattttactttcgtgaaaggaacatataaacttcattattgcatttttgtataaatgcagctggggacatggttttattacccaatgtccattttgtaaatatttagagaactttttttttgcatcataaatcagtataaatagaagcttggtttccattgttgccctggctatgaggaagctgagagtgaaatttgtcgttcaagtgtggcagttatgttactgactggcgtatttatattctcctttatttgatattttgctatgagatgttccagtttacttgtgggaaaaaaagccaggtgttcttgaactcaacaaatatttattgaattccacttgctggccagacagcattccatgtgccccagatatggcactggacagatagataaggtccccactcgcctacagcttccaacctggtcgtaagaaaataccttagcttttgctccataatgtggaagaattggcctcagagaaaacctaattcatatgtaccacgtttctacccattcaagttttatttcataatttttttttttttttttttttttttgagatggagtcttgctctgtcacccaggctggagtacagtggcacaatctcagttcagtgcaacctttgcctcctgggttcaagcgattctcctgcctcagcctcccgagtaggtgggattacaggtgcatgccaccatgcctgactaatcttttgtatttttagtagagatgggctttcaccatattggccagcctggtcttgaactcctgacctcaggtgatccacctgcctcagacttccaaagagctgggattacaggcgtgaaccacgatgcctggccgtatttcataattctatctttccatagaaagaattggctggggcacgtataactaatgtgagttactgatttcagaggaagcttttggaagtggttgataggcactgaatgggatggggtggtgagtggtttaaaataacacttgaacctttggattcaaatggttttaaat

SEQ ID NO: 89940 - DNA, 1124 bp, Homo sapiens
ctcatctgccaccttcctgcctttgtgatttctcctcctgggactcctgcacccccttttttttttttaatttttcttttcttttttttgagatagggtctccatctgttgcccaggctggagtgtggtggcgcgatcatagcttattgcaggcttgacctcctgggctcatatgatcctcttgccacagcctcccagatagctgggaccacaggcacatgccaccccgcctggctaattttttgtatttttttatagagacgggatttctccatgttgcccaggctggtctcgagctcccgggctcaagcgatctgcccgcctcagcctcctacagtgttgggattacagacgtgagccactgcacccagccactcctgcacccttaccttttcgccgccctggccggctggacgactgcacccatttcacccggcattcttgtgcctgactgtgctctggccatttcctgtgtctggaatacccccattctcccatgctcagccccgtggactgtgtttattcgtaatcacacctcagagcccttccccttctccatggactccacccctgctgtgtagatggccccaacatcattttgctgagtggagtgccactgcaaggcatggcatggaggagcctgactgcataggtggcggcaccttgagggccttacagacctggcagttgaaggtatgggctagaagacagatgattccaaattacggctaagaaataggtaggctgtaaggcttgattgccgtgaatgcctctagaaagagcacttaaaaaaaaaaaaaaaaaagaagggatttccctgttcatggcctatgagtttaaaaacaagcaccccatgtcattagccctttgctcaccacagagttgctgacacattagacgatctagatatgtgtctgagattttggatgcctattgattgtgtattcacttagactttggtgcttttctagatgtttcacaagttaagatgttgttaagaggttctcattgttttattcctatgttctttccttccactcccaactcactccgatgtcactcatctgggttcttctgctcctgcctgggctgcttagtatttattgagctacacactgtgcttg

SEQ ID NO: 89941 - DNA, 1085 bp, Homo sapiens
gtttgggttctcatgcacatgacccacatttgtcgaatgtctgctgtgtaccagccagcagctttcttcctttagtgctatttcctgttagagtgggatagtggtatttcagtccacctgatgaccatttaggccaatcacatgttaatgggaattgaatgcatgcattaaacacaacaccagcgggtgctgtccacattaaaaccaggaggtctgcttcattggttcttgactatattgaaagagttggaaatctgacctgggcatttgaggtagactctaaggggtgtaagacggccctttgttttagagacttaggattggtgtgagtgactggcagggactgctttagtgcccagacctttagtagcacagacacaatataggaaaactcttcaaggaaaaccagccccaaataagagagtaggtaatgttctgcttctcttgctttatattctgcttgctttacagaataatctgagatagctaataatcaaagtgcaggtcccccaaaatgaaagtgatcatcatagaaccagaaaagaagggataaaatactgatttcaaggactcctgaagccaatggcagctctgagtttcctggcagccaagacaaagacagaagcatgctgggatgatgcatcctcgggctcggtaaaggaagcacaggacctgcctgctgctgtgggctcagggaagtgagtactattttccctgtctggagtggggaggagcacttgtctgtggtagggtgaggaggaccacttccttgggctatcagtcattaaggccccttaacatcatggccgattctgaaattacctctgaaagttgagatttatgttagactgtagctctcaagccagttcccttagaggccagagtaatgacagtgtaatttacttgccacctgcttgagagagacaattggtggttaagggactttcccaaggtgataaattgttttagcaaacagatccagaggacagctcctttcccctggtctatgtatgccttttgaacgccaagaccttatcctaaactcaagtttcacgaataggattaaaataccctttggggacctt

SEQ ID NO: 89942 - DNA, 1965 bp, Homo sapiens
agatgcatttgtaaacctctttggatggttgttctgcctttgtcagttacttcatagcaaatgtcaactgtaaaccaagagagagaatgagccaggatggagaacttttttttgtttaattgtgtcatgttgggtgctttttggaaagtgggtgaattattcatgatgacatgaatgggggtattattttaaattagtatagaagcaaatggttcacaacccatttattaagaccctaatgttgatgtggctaccaagaagctttaccagcaagggccagtgtgttgccttccttggttggttagtttttctacatccacttaactcctagcctaattttatcttttttttcctctgtttttctttccctgaatgtttatttaagctctgataaatcattttgaattaaggtcgggtatgtatttcctttcttctcatcttcttccccctccatgactgcctgcatttgaatacatttccattgtgtgagaggcagtaatggtacagaggggtggggggtggtgactgcttggtgagctgtggctcacatgtctccagagacacagggcctaggaagactgattaaaaatcaacttttaactactataacggctcactttcctgaaacttgttatgctgtaaccccacctattgaagacataatcagaaccagaaagtgaacaaaattgaccctggaaatatgtggcaaaaattctgtgcaataagtatgataacacttttctttcagtgaattctctctcagggcccactcacagaaccaattttgacatcaaattttcttccttttaaaaatacagttaacccccacccccatctgcaggttctccctctgcagattcaaccaactgcagattgaagatattcagaaatttagaaaaatgaaaaataacaatataacaaaaagtaatgcaaataacgcagtatcacatctatttatgtagcacttgtgttgtattaggtattatatgtaatctagagatgatttaaagtatatgagagggtgtgtgtaggttatatgcaaatcctataccattttatgtcagagacttgaggatctgtgaattttagtatcctcaggtgtcctggaactactccaccatcaatgctgagggacaactgtatataatataaaataaataaaatatgtactgtaaaattgtaatcttgaaagtttgatcctgtggcagctgctattttcaggcagctcagcctttgtttgcatgctcaaaaccagcttgtgatttggtttctaagatcacggctggcttattatctgtgctggcttatcatgacagtggctcggtgttatggacacagtgagcatttggtgtcgatactcccagaatgaactgagtagaatggacaggagactgacctttgtctatttgtctatgtagcagtaatgccactaacttgttgcagtgctctttatcctcaaactatttgctatatatagtaatgcttaaattacatatattatatatattacatatacatattatatatgtggatatattatatattataattatatataatatatataattatatattatatagatggttctgactttgcacagttctgatatgcatgagttgcaattaccatgatttaaataataccagttccccaacaactctagtcaaatctcagttacccccgtgtgttaattgagtaattgcatgaagtacacaagcttgctgctagtgcttcagtatacaactcaccatgtaaataacagatgcatgtcagaatccgtggccaatcacagcacttctttcaaagcccatgggtgattggtcagtgcacatgttccttagttcatgcacagacagcagagtgtgtagttctgtggccttcttggctattggggataaaccagtgtgacattttacaaaaataccaaaaatcgagagggaattggtgaacgaagataaaagt

SEQ ID NO: 89943 - DNA, 1202 bp, Homo sapiens
ctgcttcatggagtctatggtctagttggggaaatatacctttattgaatcaaggcagatgtgattacagattgaacaatggctgtagaaggaaagggatttccaagagagaattagaggggcttctcaaattgagtttgactttctctttggtgggggttgagtcaggaagaacctttttgaagcaggaaaaatctttagctgagacctaaaggaaggggaggagcttgcctgggaaggacactgtggtggctggagggggtttcccaggcagggacactctggcaggttagagtaactgaaataaagtctgtattggagtgcagagactgccagaagaggggctcatagaggccaaagtgggacggccttacggacgagctgataatttgggcattattcaaggtggggtgctatgtcattgaagggttttagcagaggggaggcattatccaagttaaagaacaaaacaaaacaaaacaaaacccactctagttgctgtgtggcagatggattgggattgggggtgtggggttggtggcaagaatagatgcagggggacaagttatgaactgagactgggacctcatgggtcttcctgcccaagaccgagatggctgggggtgggggctgcggctagggacatggggcctcagtgcccacgttttctgtcctctgtcccctgtgagggtatgtgcgctctcataccagccgcagggcactttggctcgcttgtgttgctgggagagatctcctttaatgtttttttgtgtttttaaaatatgaacgtaggccctggcagagacaaggcagaaaccacttttgagtttttagggctgtgcattcttaaacaactctgagtgacccttccatcattacaatttatcaactaaattagaaaacgtgctttcacagatttctagtacttgggcaaatttgttatttacgctcaagatgaagtgttgcttctagtgacagttttgctgttgggcagcatttgtagggtaaaggtgtttttgcttttggaatccattgggagatttaaaaaaaatatatatatatatacacacacacacacacatacacacatataaagtaaaaagcaggaagtctatgtgtgtgccaggggatcccaaactcttggcctccagcagtcaagagattttttaaaacctttatcttttaccgtcttgctttttaaa

SEQ ID NO: 89944 - DNA, 1079 bp, Homo sapiens
cgctcagaattgcgtttcttacttccagtcttcttgccctgtaagcattttctgtgagtcaccaaatcaaccacaaaatcatttaattttatggaagtggaaaatcagacttattaaaatactgtgtttttgttttaaagctcagaggtatagagatccatgaatttttttccatgccttctcataatgtggttttggtttagctgcggttcttccaggcgcagatgtcagccctctgcagatctgctgcatcagagtttatggcctgggtcttaggaatttgcaatttaaaataaccccttcaggtgcatctaatgcagcctaaatttggggccagctcatgggttgtaaactgtactgccctatacaatagtagcacagttctaagctcaagggactcaagggggtccagtaagtacagttcaccagagaaataacaaaagcatttgcagagggagaccagagcatcacctttgttagggcaaaggcttaacatagaggaatgtggcttctatgtccaggccagtgggcttcctaacacagaacatggaattaggcagacttaacatcccccatgcccaccctggtgagtgccagcatgggcttgagctgctcttcacactgatggtccatcctttggactgatctccttgtgaaggatacaatacagcaaggagcgggggcttggcttggcacagccagttctttacccaaactcctgccaacgctggcccttctttcttaccctggttggagtgtgtgagggtgggagaggcaggaggaatatgctggacagagcttcttccatctagaagggaatttcaggagtaagaaagcggcagctcttaacatacctgggagaaagcaagtgcttagtaaacagttgaggaatgaactaagaattttcagacagattttcctcttctggagcatttgcagaaccgcctctttgctcaagtgctttgttttttacagattcatttaaggtcatggttccagacactaatgtaaatcagcacatatattattgaagaagtagaatacctccaggcccagttgccttggagcaggaaaaacag

SEQ ID NO: 89945 - DNA, 1049 bp, Homo sapiens
aagaaagtacatcagggaagattgttcaccctgagccgagaaagtggagtttcaagtaagaaccctgctccgcatcctgccactgagttgagatcatctatttgatttagctactgataaagtgtttttaattacaaattgtctgcttgcttggggactgacacaaacacttgttttgttttcaaagtgccttctctccccagtgttgggtttggagtagagcaagagtaacacagaggttgcagtcagtgtcttccagcgattttcattttgtttgatatgcggggaacctgatgctgatgaaagggaggaacccaggagctactgactgtgactacagtggatattcacaaaagaaggacctcagtacagttccaagtagtgagaggttgatggattaggacagatttaagtaaaacttaacaggtttaaggtcaaagaaaagtgaagcaacattccagaaggacccagaaaagccgagcaagtcaggcactgagatcttgggattgagaggagttgctggttcagacccagcactgttctggaactttcttttgggtactctttttttgtttcatcgattcctttaaaaggtacaatccagaactgaacatgtcattccacaagtggcccaaccagtgttgtatacactgactggacaggttttgccactaaaatggaataatagtctggttttcctaattccaggaaaggaaaatcaaggaatagatacattttttaaaaaagcatttaaagaatttctcctgtagacattatcttaaacttttggtccctgccattgtatgtgtatcttgaatccaagggtaatacgatacgcagtctggcaaaagcagtcattttaaatgattgagcaatatttagtgactttcaaagagcagagagcacaacttggctaccatagaagctccaccatgatgggcgcagggtttcctctaggctggaagttgtgttctggttatcttgtgagagaaatgcatcctgtgtgatttatgtggattcatttattcttagaggaaatcagacaaaaa

SEQ ID NO: 89946 - DNA, 1035 bp, Homo sapiens
tatagaagccctctgtttgtcccacaaagggccactagcacaaggaaatacataatgtgttcccttgtcattttataaaaatgtagactggtgctgcctgctgtgaaaatgccagtcaggttgcttccttcatagtaatcagtggattcttttgtccatttctgagtggaggattagccctctgtttgccccacaaagggccaccagcacgaggaaatacatagtgtgtccccttgtcattttataaaaatgtagactggtgctgcctgctgtgaaaatgccaatcaggttgcttcctttatagtaatgagtggattcttttgtccatttctgagtggaggattcctttccataacgtggtgtatttgcagtgtttctctcagaggaggagtgcctttctggtgtcatctgtcctgttggtggcagagttctgctgctgaattaaacctttgtgtcggccttggccactcttatggctctgctggaggtaaagccagtggagtggccttgtggcatttgctccgagttgttgctcatttttctgagattatcagaggccttagagggaagcattgaggatttcattatgctccgataactatcacgttgtcaataatatggttctgataagagtgatgggggatggtggggttttgtgagttgacagacgtgggtttgagacccagctctccagtcagaagccagcgccaggcctgtttctcttctctgagttttagtgtcctcaggtggaggggaggataatattaataacaccttcctgatgtggctccactgggctggccacgccatgggcacccagcacggggtggctgccctggttcgtgttaaccatcagcagggttggagagctccctccttactggtgttggaggtcattacctggcgggggatgtggtagataaagcaccttttattgtccctacacaaggcaactatggggtaacacaatataagttattcagattagagaaaatatgaactcttgctacagtgttactgcagacaggcacatat

SEQ ID NO: 89947 - DNA, 1036 bp, Homo sapiens
ttctgtaagcactttgggacgccctttgctatagtagggtattgtcttagttatccctgacttgcctggtgttactttacatcccttaatcctttcatgaagactggcaaacacattcagtcctgccaaccttgaaagtaggccatgtttgaaagaacattggcacaaacgagttgcgaacatcttctttaccatattcatgttctttaccgtattatgaggacactgtgcttgccacatgggcagtcttgttttggggatacgtggttggatggacggttgggtggatggaagactcctggaatgtgaagtatctcaaggatgtgtgtccattgcatgaatgtatgtttgatctatgcagctaattgacaaagatccaccatcctgtaccctccatgttttatttttgccctgccattgttctcttcgacattctataatcatcaaggttttcttgccctcacctaggtcttgactaaacatgttgggtaaatgaatttcatattactactttcttgcgccgtcagccattgtgttcttggggactccatcctgagccttttttttttttttgagaccgagtctcaaaaacaatgaaggcaggtgactggtgaggagagttccagccactggattctccctcagtcccctgtgctgtggcccttggtgacccctagatttcagtgcccctgcctgacactggagtccctctgtaaagaagcccctttctagctagctagctgttccatcccgcacacccccacagaagccttttgctgccattagtaagcacgcctctattttctcacctgtgattgatcatgcatgattgagttttgtctattaaagcaattgataagttactaaaatggcaccaaaagaaattagaaaaaaattgttgcaaatgtcagtgaaatcttttaaaaaactgttgtactttagaagtgcctcaagtgactaatggaggcttaggactctgagtggtgtcgcaaggaaccttatgcacagggacactgacattagcctgtactgtcac

SEQ ID NO: 89948 - DNA, 1046 bp, Homo sapiens
tcggcctcccaaagtgctgggattacaggcataagccaccatgcctggcccctgggccattttttattcttactcttaggctaggtttctgcagaccttggttataactgcaggctctacattgataactgctgagtctctaagtcagaccagacgtttctccccatttagtgatacatgttttccatccaattgcttcatagacaccttggacacagtgctctatttcaatttatgttgacagttcatgacccaaactggaaacctgagttatcctggacttctgcctaccaccttctcctaagccatctcacctgtcctaaatgtcgtagcccttatctagttctctaagctgtcatagggtcctgtactgctgggctgcttgttgccttcaatagagcctggagcatattcatgtcggtatttcaaggccccgggcataagagcttcttaggaaatattggaatgaatgaagaaatgatgaataaatgaacaaatgaacagttgattgatttccaagacactttggggtggtttccatttagaatggtttttatttctttttactggaactaaggaattatttttgcttgttgatgccaacattttaaaagcactataattttgaaatgttttaccacattaaattcttttctattgcaggtcacatacaaatatgtcaacttcaaaggaggaattatttgttatatttatgcaaacttgtggcacttggacatttatctagatggttttttgtgtatgattgtgttcttggtacagctggaaaagctaactttaaatggcaggagtaattgatcttaatgacttactttgaattaaacttgtgcttaattaacttggatgttctaagtttctagagtcacagacttttagagctggaatattgctttttgaacttcagtgtaaggaagaattgcttatgctcgaattgatttgttctgtatcccaatactggactgagtagaaatcaattactttaatattggatgagagagtgattgattgaagatcaggtttttaacctc

SEQ ID NO: 89949 - DNA, 1050 bp, Homo sapiens
ccagtacattttcctttgtggcatggtggcctgaaaatactgtgaggtttaacaatgaaggcaggtgactggtgaggagagttccagccactggattctccctcagtcccctgtgctgtggcccttggtgacccctagatttcagtgcccctgcctgacactggagtccctctataaagaagcccctttctagctagctagctgttccatcccgcacacccccacagaagccttttgctgccattagtaagcacgcctctattttctcacctgtgattgatcatgcatgattgagttttgtctattaaagcaattgttaagttactaaaatggcaccaaaagaaattagaaaaaaattgttgcaaatgtcagtgaaatcttttaaaaaactgttgtacttagaagtgcctcaagtgactaatggaggcttaggactctgaatggtgtcacaaggaaccttatgcacagggacactgacatcagcctgtactgctggtaatgtcagagtgaagcaaatcccacctgaaggcactctcttgcttgaccgtgaagtcacactgagtggttcaccatgtgcctgcactcatgcaaggataagccaggtctctaggcatgggcagaaggatccctgcttcccttctcttccctttcagagcaacactttcagccatttccatgagtctgggctcttgttacccagctgaaatactgtttcctgaaactcacaaatttgctctctaccaaagcccaccttatgccctgcctttccatgaagcctgtcaagaaaattccaagaaagaaaatttgatattcctatatcaaagcgtgtgtctttcctctcctaatccctcttagctgccacagtaggtgcaatgtcattttagcttttgcagatgcattacctggtggtttcctagtatttctttcacttgcctcgattgctagattagaaatttactggggacagacatctttttaatatctttctcctactacttaacatatagagcatcaagggaaaaaaaaacaaaaattatcttttaaaaatgt

SEQ ID NO: 89950 - DNA, 1892 bp, Homo sapiens
tgtttacatgggagctcgttgggtcctcccagcaaagtcctatgtagcaggcactgttgttctttttgcagataaagaaactgaggcaagaaaggtttagtaagttgtagagctaggtattgaaccagggcctaacctcttaacagaagttagttagaggctgttacttgagtgctcacaggttggctggcaatgtgtttggaacccaatgtaatgtcattagattctgcctaaatcttgtgaagaggggatttccatttgataggtaagaaaattgagaagttatcatcagcccgagatcaaacaagggtatagggagtggtgggacctattaagttcagatttatgtgacttctgatgctatgctcagtgatagatctcttcttgaggataaaagtttgagaattagggttcctcgaaaaccctgagatttctttttttgaggggtacctttttgtgttagcagatttaaagagctggccattgtatttgatggtagctgagtaagccttttgaattggagtatcatcaactattactagatttagaataggtatattttgctaagtaagatcttaaagtttttcctttaaacttaggatagctgttcaaatttcaaactcttcttttttcagtaagctggagacatttaaccttttgtcataggcttaaagcagtcattaaacagggtcatttcaatgcaactttttaaacctaactcccctccctttttctctttaattatgatcagtggcttcatttgagcttacctaggatgcatttgagactataaagctgctttcttaaaacttagcaatgttggctgagacaaaccaactgtagaatctcatgctttcataaagaaggttgcaagacattcattcacagttgctcctttattgtgtgtgatgagccattggcatcaaacctgcttgggttgctatcagtttttcttttgagagctggtgacttgcaatttaaaacacacatgggctcaagggtattggagggacatggcagaaagtccttctgctgcctagtgattgagagtgatggggtcctaactctgtgtgaggatagctctttgacacagctcacctcagtcccctttacctaggtttaagttgttagcattttgctgtatttgctccatctctttttttccctgaagtattcagaagtgaattacagacatcatgacgtttagttcctaaatacttcagcccaaacctctaaaaaacaagaacatatttctatataactgtagtactgttctcacaaaattaagactaattgcctaatggactctattacctgatccattatctgaacttccccagctgaccttaaaatgccttttacagctggactgtttaaaccaggattcaattgagaattctgtattgcatttaatcggtgggtctattaagactctcttaacctagaatagtgataaaagctttttactcttggtctctttgcaaactggggacccccagccagcaacaccccacctgggtctcactctaccatgctggggtgccctagctcacctgtgttatagcttgtacctgtgttcagtggttcccgagttcttgcatggcacccaagaagaatgaggatatgctggacattgagggtgaggagggcagagtagaattttactgagcaatggaatagctctcggtggagaggggctgcagtcaggtgcttctctccttcccgtgtggctgggcccagggctttttatgggctcagaataggggaggggcaggctgcaggtagtattggaaaaggcaacatttgattcattaaaaggcattgttcagaaagaatcaatcaggaaagggtgggcagacaggaacagaagttctcgctctggttcgtgggtt

SEQ ID NO: 89951 - DNA, 1056 bp, Homo sapiens
tttcttgtacgtactgtgtattagaagttggactaaaggcttgatcaaatttgaggcaggaatgggtgaggctacgtgcgactggagggacacaatgactggttctgtcataatcagtgattgaaattgatccctgggtaaatgtgggggcagtctcatccctccactatcaaaaattaacattttttttccccaggtgaccagcaagtaacgaggggaggggctgttttggtactgtatacctgcaaattttaaatattgatttactttacttccaaaggattggaaattttgtttttttctttctttgcccttctttgaaaacattgtacaaagtaaatctccttattttactaatggagaagcttctgaaagaggctgaacatacattgaagtacctttgctcagctgtaagcccttctggatcagaggtcagaccaaagtttgcagacagttggtccctgtggaccagactgaatccacacatgagtttatttggcctgtggagcactgaaacaaaaaaatgcaaatcctgagccaacgtttgggagatcccatattataatacaaatcgagatttccaggtttctggaaggtcttggcaatctagccacactgggcctgcatctgtgcaaggctgcatggctagaggtgtgtgctgggcacacccattaggtgggactgcgcctttctggccactagggaccgtacacctcctgttgttttcatgggggctggtttcccttgctgacacgtggccatgaggtccctcgaggtacaggccggcatttggacttgtcctctgcactgtttctttgttagcatttagaactgacttctcctcttcctcccccattgaggagcagcaccttactctgtgcagagtctgtctgtgatctgcaggctctttgcagagctacatttctctctggaggccttgctgagcagcctccgctgtctagggcattgctgagaatcacaacatcaacactaatggcccttgggccaaaaagtgtttgtcttaaaatccctgcaccaaatagcttgtgcaattac

SEQ ID NO: 89952 - DNA, 1051 bp, Homo sapiens
caggaaaacaagctcggggctcctactgattctatattatgaagagttgtataattatttcatcatctattacaatgtaataataatagaaataaagtgcaccataaatgtaatgcccttgaatcatctccaaaccatccaccccactcctccaacccccaaaccagcctggagaaaaattgtcttccacaaaaccagtccctggtgccaaaaaagttggggaccgttggtgtagaggactcctcaagcagcgtccatatctgccctattctctctattcctccacctaggtatagaattctatctctaagacacagacagaccatgttcctgcctgggcaaacacttcggtgactgtgcattgccctgggtgaacgggggcacagaggtctttgtgacgccctgcaacgcatccctctccgagccgcggtgcgctcttcctcctctgtgccttgccggtgcccagaaccacccccttctccctctttgcacaagtgccttgctctctcctttctcaggccagtgctgctgatctgtctgtgtgacccgggtgcacagtccttggctctgtgcctggccctgtgcaggtctctgtggtggcacttagcacatggcgctaagattctccctgataggccttcagcgccgcaagggccagcaccgagtcctgcacatcctgctctagtcccacatcggcccaggggcgttgagctgaggacagctccctaccccctttctgtgcttggccgactccagcgcccgttcttctgcccctccttggctctgcctccccaccccttggctgaatctctcctcctttcgtgcttgttctccaggtgacttattcaggtccatattttcattacccttgcatttcattaattttctcatttattttattctgtaggtttaggacattctttaaaacatgcaggttctgaattttaataatataaaagtcctctgtgagtgcccatcacattgcttttctgtcctccctacattaaagttagcactgatgcctttatgtttaaggaaagcctcctgcaga

SEQ ID NO: 89953 - DNA, 1001 bp, Homo sapiens
gtattttgagggctaaaagaaaggagtttgaacaaaagcaggacagtgttccgaatgtggaagcaaagagtccttccaaggggatgtgcggccaacgcctctgttcagcgatagtccagctgagaccaggacctgtgcctgatgcccaggccaccccacaggacggtcctccagcacctcatttctcctttcatcagacacctcttcactggcctactgggagaaaacggagatgagtgaaaatgtgcatacagaacatagggctcaaagggaccctagcaccagtggtgctcaagcctgtcccagcattagcgtcacctgggagctccaaaaacatattgttgccaagactcagtccaaagcaagtgacttccttggcctggagtgagatgtgggtggccagggtcaggaaccaccgagtgggtccacctctgcagactgggaaacagagtctgggaggctgcttgttccctcaaggacctgaagtgacatggggaggcaggactagccttggggctcctaattctgtcctggcctgtattccagtgtgccgtggggcacgtccaatttgaatctggccccagtacactctcaagccctgtgttgctctggtcccacagcttctgcccttgactttccatataacagcacattggtggccagggctttgcactaacctacctgcctccaacattgtttttgaataatggaagctaagcagatgcatattaatgcctgcattatggagaagactgtctcttcacaagtaatctgtagttgttagtcttgaaagtgggttaattcattgtctttctagagaaaatgattgcatggcctaatagtcttccagttagtctgtgtggcaaggtagaagccaggagtggattcttagctcctgttgagtgctgctgtcctgaatcagagatcttctctcccgggccactttgtcatgagcaggattttgaaccaagaccttttcttcacctgtctcgggggccctc

SEQ ID NO: 89954 - DNA, 1051 bp, Homo sapiens
aaagactacccatgttatgtgccattaaaaaagatgtagaaattaatctgtctttttctttgacctaatcttactagcagggatattggggctctacttttctgttctctctctctctttttttttttttttttttttttttttaacatcagccacaggtaatactctccggtaaacatataacttgaggaaaattgaattaggttaatgctggaatagaaaaccagggcagtgcctgctctttttggataattctgtataaacaatgagaaagtctcaggctgccttagacaaaggctgagacgggagctcctgatgatttttatgagggggaagaggagatggtgaggaggagggcaccgagcatgtgcagcaacttgaagcatgtcagaaagaacatttgccagaaatcttcaaaaccgtggcggtcggtaatgtgtgaaattgaacttctgaccctgtttgcttgatggcgacttctcgttgtgcttgagaattgtgtggcattgggtccctggatgtgggaggaacagcaaagtggtttagtgaatagagagggaagtgccttcctttttgggtgggacttgccatgatagagcctgggccgtcaccttaaaaggagatgtttctgttgagagatggaaaattggcaagacaaacgccataaaccttaacctgtttataattccttacctgtaagctgctttgcacgcaaggtgatggttctacctcataagggacaaggaagaacagcacataaacctgactgaatggagtgtggctgtgggtgggagcagctttacaagaaggaaacggggccccctcctgagacacccccgtttgcttctgctccttccttgccattgacgtgcccttctcctgaaactacccacacctgtgtttggcaacaagcggctgccccttgatccagatgcatttttcaacttgcgaactctcacctcttgccaagggacccaagtacctggttaatgatctttaatgtaaatgatcctttgccttgattaacattgagctgggttagtatgcacag

SEQ ID NO: 89955 - DNA, 1073 bp, Homo sapiens
ttttgaagataagcacctagaaatggaagttaagtatttctttcacaatagcagcagataacctaggaagacattgaactaatacctgtaaccttcttagtgaagaatgtgaaatataatctagagaaattaaaacatgtaatgcctgaatgtatcttattacaaaattaataagtaaatttcttgtgattccggttagaatttccaaagtggtgggttttctctttaattgaataaaataatcctgaagtctttatagaagaataaatacgtactacctgagaggagccaagacaaatatggaaaagaaaaccggtgagggcagatttggcttacaagtaatgacaacatgctaagaataagaagtcttcgtgatcaaagcaatgtggtattgatccagaattacataaatagttcagtggaacagactagagaatctaggactgtgtctcattaagagagtgaatgtataacaagatgatagttcagtactgttgaggttggtactggcataaccagttctttatctggagagggggttgggggaacagcacagacctctatctaatatcataatcagtaataagtcccggaatcttcaaacacttaaatgtaaacaagcaattcaacttttacaagaaaatataagaacctattttgtataatcttggagtgagggagaatggttaagcaaaatttgatacgcacaagctataaaaagagacacactttgaacatatattttatttttatttgtttattttttgagacggtctcactctgtcaggctggagtgcagtggcgcgatcagggctcactgcagccttgacctcccagactcaggtgattctcccacctcagcctcccatgtagctgagactacaggcaagactcactgtattagttctcatactgctaataaagacatacctgagacggggcaatttagaaaggaaagaggtttcacagtttcacatggctggggaggactcacgatcacgggtgaaggtgaatgaggagcaaagtcccatcttacatggtggcaggcaacagagtgtatgcaggggaactcc

SEQ ID NO: 89956 - DNA, 1030 bp, Homo sapiens
tatgatacctccctggaaatgggattcctaaattaaagaatattaggatttaaatacttttggtatagattaccaatttgctttcctaacgtgtggtactagtttatgttgcaatcagcacaaagactcactgtgccatttatcatcagcagagaagagagcagccctgaagatttgggggaggagtgttcgtagagaggcacgtgaaagtgagtttgagaggtttgagaagtagccaggtcagtggggctggggaagggagagagttcatgggggagggctggagatgaaggtaaaggagccatggttctttagggctgtgtgggtgctggggaatttgcatttcctgcttaaggttgtagtaagtcagcctggagagttgcaagaaaggagtggcttggtgtgatttattgtagcaagtgagagtgacccagaggccagttaggaggctgttgcagaggcctgagtgagagaggatggtttaaacaccaaaatggtaacattcagaatggagaggaggagatggtgggagattaaatttggggatggagcccttaggatctgttgattgactggatgtgtaagagagaaagggaagagcagaactgaggaaatgtcctcttgaactggctgggggccactgagatgggacagatgcgctggggagcagtgcagaggtggaatcactgctccttttaggtctaaggcatcccttagatctccaagtggatgtgtgaagatggtggtagaggagaatggagctcaaaagaggggccagagtcatttccatttagatggtctttacagcctaaggaactggcagatttcactaaggttgaggtctttctttcctgtgaaaatgtgatcaggatcctaagtaacagccctaaaaattaaacattaggaatacaaggtttcataaattaggaactgtctgtagctgccagattctaaatgttttgaggatacaaatcttggggtcttttcaaatgctttgagcagaagaggtacatcgtattgtgtttactga

SEQ ID NO: 89957 - DNA, 1045 bp, Homo sapiens
tttagagatattgccattaaaagttgatcttgagcatgacacagaactgaaagctttgatgacaaagccagcatctcagtttagcaataaccaggttagggaaaaaaccccagaaactcaacagtgagattcagctcagcaatgtgggcggggaacccactgtcccgccttgggcagggagcagccccagccgcttcatctgcctgatgctgggttttatccgcttcacaattaaatttcctttttgttatgcttgcgcacatctatatttggctttgcttcttattttttaagaaaggggagaagtgtgggcaaggtaaaatacagcttgcaagctcccaaatggcaaatgcaccagttagagtctaagtggcctcccaaccttaaggtgaaattcatttattcagcaaatatgtaccaagcccatcagggaccactgctcgagataccagtgcaaatagaagaggccaagggcacattattaggtccggagccagtggcctgcacagccatctgtgaccacctacctctctgcttgcagggaacttcagcctggtggaggagacccataatagccaagtcaactgataatagaattagtagtagtgttgagggacataaagaaatcagggtaaggccatcacaattacatgggtggatgatcttttataaaacagcacagttttgttttcttctgccatggtatctcctaacattttccagtgtgtctacttgcagttaatatggaagttgcggctgacactaggttagtggttaaaagaaaacaagaaaaccaacctttagaaatctttagaaacatcattatcatagaaagctataaactcttatgtatagaagggtaagtggccattgatcttggagcagaatgaatggatatttcctggaaaaaaatatttccactcatcaaagatactcaagtctcttctcatctaatcaatattggaaactaggaatatccacgcctatggaatatcctcagagagaattaattattctgccctctaagaggtatagtagtttagac

SEQ ID NO: 89958 - DNA, 1042 bp, Homo sapiens
ataggacctatttaccttttagaactttttcagaattatggactgcagaatatatacagtgtcaatgtcattagcaattcattagtgatatttggctagaatacatagttgtttccacacaaatgccatttcttacattgagatggcacatgtctggttaggacttgggctcatttgtaaggagccacgctgcaggtaggcatgctcccgggacattagttgctcaggtttcaaactgctgccccagcatagcagatggcacggtaacaaagtccctgtgcactctcacattgcctgcggtgatctatcacacattttgtcccctaataacctagctgggggggagctcatgtctctgtttgtgctaatgctcgctgtatccccaagtggcagtacttaatataattgtcattgctctttaatattatctcattccacgtcagctgcacaaaaatttgaggttaatcacaatgaatgttttctcaatccttgttattgagagctgtttaatagtttattttgtatgtgaagattcatatctagattgaggcttatacaacttcatttaaagacagctttttcggctgggcgcggtggctcatgcctgtaagcccaacactttgggaggccgaggcgggcggatcgtgaggtcaggagatcaagactatcctggccaatatggtgaaaccccgtctctactaaaaatacaaaaattagctgggcgtggtggcgggcacctgtagtcccagctactcggaggctgaggcaagagaatcccttgaacccaggaggcggaggttgcagtgagccgagatcgtgccactgcattccagcctgggcgacagagtgagactctgtctcaaaaaaacaaaacaaacaaacaaaaaaggaaagctttttcaggttggaaaaatatcaacagcagacatgaaaaagcatgaaaaatgacgctaagaatgtaagcaactggaaacaaaaattataatggtgcatagtgagctgaagatctatatttaaatgtgaactcccctttcagtttata

SEQ ID NO: 89959 - DNA, 1966 bp, Homo sapiens
cttctttgggattaatccttagaaataaatttgatgaatcaaagggcatcaaccctttgaatgcttctgatacttctgccatgttgtttcccagaaaagatataataattattccttccagtagtagagtattaaatgtctgcctctctttagaaagtattaccttttttcaatctttgacaatttgttagataaaaacttcagtttcaatattattgcatgtattcatggatatttttcttctcacacattctagattttttctatattgtttataaatgttttataagtgttattactttattgaggatagaaattattatgtaacacttgatggtaacagtaaaagtggaaaagaatgaggaaaccttcaacaaaacaagttgtcattaacaaaacgggttttgcaatgcaactttctgtgggttagctaaatctttagtgtgtcaggtagtcgaaagaaatttgctgtatagtgctgtgaaatatgctgcatccatgagccctctgctctttgcccatagggagcaaagacacaatctttttgcaagctgtcccagtgccatattgaccatcttccttttacagcaaaaagttattgcttcctttggttaaggttgggacacccctctggaggcacacttgaaaaatgaagacctttctcgttgttcttctgttatccaagtatcttggaagaacacctctatagcaggtagacaaggcagggtgtcattgcaatctggctgcagactgaatgtaatcccccttgacattttgccccttggaggcaactcctgccctcccctctccccttacgaccctgcccccttaaaatatgtggagctcagcaaagactatttattctgataaaaatgagcaaataataggtgtgaaagaacatggaacacttcagtgaatcaaatggagaggattaagcattaccccaataatgattggtcaggacgactgtccctgtggagtgtgtcccagaagggttgagcaatggagcaaacccagaaaatctcattctcaactctccctgacagatgacctcgtctgcgctgtcttttgcttcatggtgatgaaggtggaacaagacccttgaataagatttccatctctgaattctttaaacccatttgagatcagtgcaggcctgcagtctctctattagaactggagcagaggcccagaagagagaactgaattttcagcactggattctatgttgagaatgaaagagacaataattgaaaagcttttctcttggaaattttgcaaaatccgagtggatttttgaccaggatttcttggtgacctctcctgagagagcaggtgcctgaggatttcctgctgagtatcttggcatctgtcagactccttatgacttcattttagttcagggagtctgtttcctagccattgatttcatgcacaattcctggcatgtctcatatctctaaggtgatgtcacccttgtatttttttttcagatgtaatcttttatgtgacagtgaggtgtcttacttgtgagtgaacagctagaacctcccaagtggtttttcttttggattttgtttactcagtgaaaaatactgaggaacctgagatccttcagggtgcattttggtgtctgcccaaccttgacgtggatttggaggccaggctcaatgctcgaacttcttgttggagtggcactaaatcattaggatccctgaggacagacagttcaggccatcattatttggtaggcccttgcacacttacacacaaatgcatcattatgaacatggagcagaagattctagggccccgtgtgtaatggcacaatttgtcaagaggcctgagacctggagttggcatggattccctctcctcctgacccacctacctgctacattcagttggccaccctgttcttttgagtccacctttggatgagtagtcagtcctttctgatttttgc

SEQ ID NO: 89960 - DNA, 1087 bp, Homo sapiens
agggtctgacctgctggcctcctaagtcccagcccagtgatagtttgggaatgtattgaatctcatatgattagtattattctccaaaagagaaaactaacagattttggcctaccatcctagtatcttttccattaaagtatgggatgttgggtgatgaacagtcgtacagtgtaactaaaccacttttgttgtatgcatcaaagtactttcttgtgaaattggatgagagattctgctgagggtgcagttcttgtctctccatctctcatccagtgaggaccaagtgagttaagcagtattgagtagtataacagtacgttcctggagacatgggtgtgtctgtagactaatccttattctccaattattgagtataatatctcttgtttaacatgaggaaagggtcaaatttgaggaaaaatggcctcttgtttgatgtgttttagttcattattctcttctattaagagaaattcactgttaaaaaattgtttcccatttccgtatctgaaataatgactgtagttgaggtgatcttgccctgggtctgaaatcatacttccaaaccaaaaaggactttgaatacaaaacttttaagaaatcttgtatgaatacaagctatatctgaaaaattgtgttttataatattgatgcctagttttgccccaggccatctgcagtgtggttactatgcaaagaatgctggtgttgctgtttttttttttttctttgttggctattaacccagcggagacaatatgtggctatggtagtacttggaagttctagcattacacagactagcttccatttctctcatagaggtcatttttggcatttaaaacacatacttttagaaaacagatttggatgtatgtaaacacagggttaatccaccacactctggatgctagagctgttgacaaagtcatgctttgcagattttaaaataaactttttgttactcttacagcttggtattttcccctcctattttttttacctcctctaaataaacctctttgttaaataattgatgtttctggatcatagaaaatagtaagtttaaaatacagaatatttc

SEQ ID NO: 89961 - DNA, 1034 bp, Homo sapiens
ccgcttgccctagccctcctggcccccctggtcaccatggcccatcggcttcggtttcattttggctctggtcgcagcaacacagcccccgaatcagacatcctagaccaggagagagaagacgacttcttcatggcattccacaccctaccgcggagaagcagcccgcaccccttcgcccagaacggaggggaggacggcggcggaggcctgcagggaggcgtgggtgcgcttaagcggagctcgtccatgttcatcccgcagctcttgaccagcatcgacgcccgccccacgtgcagctcctccgtgcagatctccctgcagcgcaaggccacggacggggccacggacgggtgcgggccgcccgagggcgccgacgatgggcctccatgcgcaacgcccgaccccagggaccaggcctccgccactgccaccacgagggcctcgccccagagtggctcccgggagccctcgccgagggacacccccgggagctcccctccgagggcagcccgggacccagggctccaggtcaacggcacgtgcggccgccgcgtgcggtgctccggccccgtggactgcgcggaggaggctgccccgggcctgcgcatccagcaccgcgcctccagcgccgacgtgcgccaggtgaggctgctgcccctgggccccgatggccagggcggcccggccgcggcagagcccaggcgctggtccctgcagcacgttccagatgcttctggaagctctgggaagcggtgttttgtcttccagttgcagcagccccaacaaggcgcttcggggccaggcagcgacctcaactttggcttcacgggcacaaagggggacaggttggtgaggtatcctcgcattcggctggagaggagcacctcgtaccccacgcagccccgaagcgagcgagggagccccacggaagatcggggagccctggaggcatcgcctcgagctggcaggatggctcctgaaatccgcaggacgaactccgcggagaggactccgcagggccaggggtgcac

SEQ ID NO: 89962 - DNA, 1840 bp, Homo sapiens
agtttccctgcttcaggccagtggatctgaatgtttggccgagttctggcacgatgatttgtggtccagtgtttggtgcgcaaaacaccatttctgcaaatgtcttctgtaggtcctcaaagtcaaagaactttgtctgtttgggaaatccaagcagaataccttccccctgcttttatttttctgaatagaagaatttcgaataaaatttgttactttaatctgccaaaaaacaagtcagtgccccaacgtgctgatgttggaattgcatttaaaaagctgcttgcaagtatagcctgtgacaatactttaaaaataatcagttctcggaaaggggaggatattgcaaaggacctcagtttcgtctcttaatagttaaaataggtgaacgtaaagtttagtggaatttgattatctgtcatggcctgtttgctgcaggaggtcaggtcagtcgttgttatataatttgctttgttttttgtcccattaagtaatactgaacgagagtagtgtcgcttgtgggatagtgacattactatcccacaagtgacactgctaagatactaacagatgcgtttttaaagcacattgggttatggcccaaggctaggggaaactgatggggactcgttaatggtcagatggcgtggcgtgcaatttaacactgcacacttgagtgtccaagccgaggatgctgtatatagaatagtaagtaccctgtctccagctgtggagaaatagacgccttagaacagattctggccttcctgtttctctgttcctgatcgctccctttcagtgaaatggagtacagagagacagctgcacgctccatcgaccaggcatatgatgactctgcagctttcgtggtttagagtggaatgaaaagtttaatcagtttggtttcttttactagtaatcactagccagtgagtgctttctcctaaagaacaagctccttatattttgaattggatattttttctcctgaatttcatgtgactgccagtttgaggatatgattagtaaatgtctaggggacttttctttggatttcacttatgaattgtgattttgaaaagtgagcgtctgagtattactctagaattgtattgtcttttattgctttgtgttcagaaataagtttcgtctttcaagtaaactttatcactcctccatcattggttttcatcattttgaagatacaatcagatgcttaatgaaaatttatttttcttcttctctttccttccatgtatctcctttctttcattatctcaaactcttctattgggaaatggctaagtgctttgtcttggtctgaacctataccatgtattacacaatggtacaaattttgacagtgttttgatattatagtagcctttaacgcccacccccaacaaattaccatcatgacagttgtaggctttgttcggcaacacaattccatgctgaacttggaccacttaccgcatgaagattgacaaaaatatatttcctaaagtttgataactattcaattatattaccaaaaactgaaatcactttgcagttctgatgtggaagacaaagggattcatacaattaaactcaaaaaagttcaaactcatttggtttgaactttcaaatgtaattagaaaacaaatcgaataaactaaaacttatgtgtaccttgcttaaaagggctattctaacttgcaaggcctatgtagtgaaaaacaagtttctacacatttggagaatataaattctggaataaagagcttttcttggagagtaagttccaactagtgaacagtagtttgcattttcatatgtatgtatttttgtacacata

SEQ ID NO: 89963 - DNA, 1055 bp, Homo sapiens
gtgccaatagaaaatacaatatatcaaattggagaacttgtggttgaaaataatatacgcagattgctggtggcagtattcatggatgtgactttggagtgatttttaaacacttaagtatttttaaatgataagaccaattataggtactaagagtcttgtgttttgaagtgttggagttaatccagataaagttacaaatctaagcagacaccttattaagagatcattattctctgcttttaaagtggacttgctttctatatagttatgaagaacagatagaaatgttttaagattactggctactattaaaataatctggtgactgcagttatatctgggtctaaggcattagactttttggaaaatggatgcttttaatctttccttccgtatatttgtcacccagaattttaaaatttggaaatttcattcattcagtccagatagagaattgatcaattggcaattttattatttttcgctcatgaaaaactctagggttacaagaatatgctcctgaagttaacatagttacttttaaaatgtctcaattctaatggttaggtattagtcctctgagttccggttgccccttaacttggatcttaatttacagtttacagaaaattgttcatatttcatattttaagatcatgtactctaaaaccctattatacttgaaatgaagacctgttatgttatactagaatctctcatgaaaatgtaacagttcccaaggaactttgtttctgtctccatggaccacactggctactgtactggatggagggcaaggcgggagctgagaggcctttgcagaagtgcatgtcgccttagtatgtggcagatcctggtccctggcctgtgctgtttccctccacaccctttgatttctccgaataccaggaaagatcatggattgtctcgggagttagtctcccccttagtacttagcctgtcattttcatgttgcaatgcctagaaaatgggaggtttttcttctccttaaggaagtgttatttcaagatgctttctgctgcctgtgtcat

SEQ ID NO: 89964 - DNA, 1097 bp, Homo sapiens
aaagcaagaggaggctgggttagatcagctcactgtataatttttgcaaaggcggttttattgaaacctgttcttttttgaaagctggctctttctaacattcaaatgcttttgatcaacctattttatggaagcagaatattgaaattaaagtaaatattagatgaactttatagccagttgttttcctcattcttcaactctttaccctacaaatcttatttaaacaacatgttcagcaagctgttatcttgcttacgcaatgaatagaacattatgttctaaggtacagtttgctcacctatgaaaagaatttaacctcttttctaagtagctatacacaattgtcataccttaagttcttatttagatgcatttcagaatattagagcattttgcaagtagatgcacgttcttacccagtgtcagtgtttatagacagacactcaccatgggtatatttaagtctagggtggtaaagaatataaatgtcatttattaaaacctgaacatagccaactatgaattatttgtgttaatgtaaacgtcgaatgagcactgcaaacatttgatgtttgaatatttgcctgtagaagtgcagtactatgttctatagaatataagtagatgccaccccagtcctcaaggtttcagtgaggtcatcattgtatcaataaaggtgccaatttaagatgctaactggacattggaaaaaatttgttgtcctattctgaaggatgagtcttatataaagtgtttttaaaatactttattgaaactgccatgttcttttcaattttggtagctcccctgcatttaatttagtcataagcgtctgtattaatgggtgtgttcaatatgaaggcatcctgtgaagacaataaattatattatacttatctagtctgcactctttatcatgttgataaaatggcccttaccagtaaaaaaactgtttcagaatgtgtaagagtaagtctgtctcagctgactgagggcttcatcatgttcatgataatcccagcagcttgaaatgtcaaactggtagctgatccatagcacacagtagtgctaattgagataggttggtgtggata

SEQ ID NO: 89965 - DNA, 1069 bp, Homo sapiens
acacatgcttcgaggtgatgtacttcttggagatagtgctttcctcatctcttctaccttgtagtcgtcagtagagggcatgcagtgcaacagaagtggatttcaggactgagactagggtgaggcaagagaggcatcagaatgcaaaagtgaagtagacacctgccgtcagcactgggcagccctgctcctggggccttacttgactcatcctggtgggttttccaaatggcagaggtgcacaaccacttcttgcaagcatgggcacttgaattgtagcccatgtacacagtgattcttggaaaaagtcatgagtaatgaatggaacttttctctcccaggttgatcttgtgttttgagacataaagagtcaaaggttggtgcctaggatgctcattcttattgtttttggtagtttgattgttgaaggcttttgacacgacattgaagtgaatatttggggcattttgctcctctgggcttttctctaaagcaccctcacatttcctctctcatgttcctgggctttcctggctttgatgctagccccactgtgtgttcccattaatagccctatgtagcctggctccttattctggaaactgtgtaacttttgctcttgatcttaaacacaactcagtcttgcaaggagctccgcctttggtctcagcttcttggggatttccctggcagccacatagtgaactatgtcacactctctgttttacccgttaataaggaaatactctggtacatggagctttgcttgctgatctttttctaagtactctgggggcaaaaggaaaagcagctagaggataaggatgtaactttcttcaaattaagccatcctgacccgtggtagagattagccactaagaaatagtggaaacaaataactgtttcactcttgagtgttagcatggaagagattctggttgaaatcctagtcctgccactttctggttacagaaacttacattacttttcttttgatgtttcaaggagataggagttaaagaaaaatgaacaccagattactagaacattcttatagagttgcccaaag

SEQ ID NO: 89966 - DNA, 1004 bp, Homo sapiens
agcccttacttcctttaatacttttcttctgcacagtcaggtgctctccctttgagcttccgtgtgaagttcactgtgcacccagctctgctaccaccgcctctgtcttgaaaggaatagggtggggtggtcattggtgtatagtaagattcgaatcacatccttcaagtacagttctaccctaaagataagagtccctgtggtttttgttgttgttgttgttgttgttgtttgaatggatgtgttctttgagaaattgagtcttgagtattttgtgaggacatctaagcctggcgtccacgtcagtgctgacagatttgacctagtgtgcactcccatctggggaaatgcccataggctataatctctttcactggagcgattataatagcccccgggcttcaggtcccagtggcatccacccttggtggcagcatacccctctgcatgaacagggcgcccacttgtcccctccttcttacttagtagtgatttttaaatgggagggtggcagtcctgaatgtagttcatcagtatttaccgcacaagctctaaaggacacagtgttttatttgtgtatttatttaacttttccaatatcggaatatgaatttttgtttcacctgataggacacgtttcaggggctccattctacattgtcatttcacaggaaaaatatttgatggctcattagaagggaacatctattattttgttactgaaaggcacattttcaaccttgagaattggatggcaggtaatggcatggaaattgacagcattttaccacttaaaaataaccacaagaaataccaatgttcaccgaatgagttgaagttaatttggttttgtaggctattgtagttaacttgatgcttgatggaaataattttgtattggaaatcattaaaaattgatttgattaatgcttttataatgttggtatgaggtgttgcactgtggtggtgatgacctaagggtgctgtgatggcctcaaacgttg

SEQ ID NO: 89967 - DNA, 1045 bp, Homo sapiens
tcccgggtgggaagaaaaagtggacaatttaggccgaacttactatgtcaaccacaacaaccggaccactcagtggcacagaccaagcctgatgtgagtaccgtgtgatggtcaggaacacgtgcacgtgcactgcacagctagggacaaatatggcggccctttgggacaaggctgggaaataaatcatatgtctataagagcagatggtggtgtggtacgagattcctctccatttacgtaaagcatgcaagagcagtcagaacttgtatattgtaagcgattgcctttgagtcacatgctgctgttttcaatatgagctgatttattttctatgtcttcttttatgtcgattcctgaaatacaaagcagaggttgtttttcttagacttattttacatttgttgattatattgttttcttcttcacctttctctcccaactgacccagaacagaaccggcaagcaaattggctttgcaattttctgttttctctaagtttttggatgtttactctcttcaatgcattgatttggaaacctcaaaaatttttttttctttaaggaaatttgagccccttaatataatcagaaacacatgggagagttgcaaaatcagaattagtaattactgtgtattttaatccctcaccagcctcagggatgcagtaaaccaattcctgttttgttccctcagcaatttgtggtttgattgatagcaaataaacactggttaaaactcatggactttaaaaatggttttgtagcagcttgtttttaaatcattttatacagcaagatctaagtctattgataatacatcgaagggcaaaaagaaagtcttaaggaaaaggaattttatcctagaaattatgagctgcctagcagccaagacaaggaggaaattatcaatgaactatacaactttcagtatgtaataaaagcaagtctactgggtagtataattttcttgtctactcgaactctgaaagaaagtggctaatgatacattttagacaacaagcagtatgaggtatcatgttct

SEQ ID NO: 89968 - DNA, 1138 bp, Homo sapiens
aatcattcctgtctttactacttgaagtccacttagaagctaaaattggctgagcatggaggctcacacctgtaatcccagtactttgggaggccgaggtgggtgaatcatctgaggtcaggaggtcgagaccagcctgaccaatatggtgaaaccccatctctactaaaaatacaaaaaattagccaagtgtggtggggggggcttgtagtcccagctactcaggaggctgagacaggagaatcactggaacctgggaggcagaggttgcagtgaactgagatcatgccactgcactccagcctgagcaatagaacaagactctatatttaaaaaaaaaaaaaaaaagcagctaaaattataaataccagatctttcagaagtaggccaagatgatgtctgagctcctctgaatataggatgcaactgactctttttcaattgtagtaatcaataaatgttgggtagccacatatcactatttcttccgtctattcacatcacattaaaatttaccctgagggtgcatcttagagcaaactacaagactgctagcttctttctgtttgtaaagcagcattagagtgttgcagagtcctgttgagtctcctttctgaaagttttggtctcctcttacttttgccactaattctaaggaccaatcaaaattccagtctgcttaactgaaaattaaagtgaaagataactttttcaaggatgactgtccttgctctgaaaagatgtttcatttaattaccttctaatatcgaagagcggtgaatatggttgagtgatatgtttgttaaaccaatgaaagttgcttttaagaatatatttcttgatgcttcctgtcttttcctctccttccagcaaagagaaccctcctcaaggttgaggtcatgcagtgtcaccgacgcagttgcagaacagggccatctaccaccggtaacccatgctaatttccagtcatcagttgactttttgggctttcatttacaatcatctgggctgctgcaaaaagagtttttcctgtgtaaatttatttacaatataaatgagatgtttttaaatttcctggccaattgccctaggaaagtggatttccaatacagagaattgttactgccacccatctcta

SEQ ID NO: 89969 - DNA, 1493 bp, Homo sapiens
tgtttacccaggtcaaggatgagccaccttggggggcataggggtcacgcttcctttgtgctactggtcatcagcgactgctggctttgtctggatagggtgggtttcagggattctgatctcacgtcacctgccttacagcgctgccacagcagtgggccctgattcagacagcagggggtcatcccctaagtgcatttcactgatgtaaattatcattcacagcccagtgccccagctgggagagcgcgttcatcaactgtcacgggtggtgaggaaccaacggtaatgatccactttatcagacatcaatagcaagaggccgtgaggcagttttaatatttcgtgtagtggtgaatatacgctgtttttaaaaataagattagctcctttgtgctacagagctgcacacgtttcttattttaagcttctcatttggggattgtttaaaggtactgggtaaaatagaatgatttttttagtcccacataattttattaggaatactatcaggctttggttaagtgcatttaacttgaccatttagaagatatttttgacttttagtgtttgtactcctgataagtttttccatttcattagaatgcttggttaaagtaatttggttggaagatcatcaaagaagccacaggaattgcatgagactgtgtgtgtgattcctggatgtgcccagggcccttctcttttctgtatctcccctaccacatttttcacagggggttagacttttcttgtccccagaatgcaccatgaccctttctctgccaccaggggctctcctcacacaatgaacaagtttccgtaattccaagggaacataattaggatatataagtgatctagaaaaatttatgtttctctaagccaaccattcttattcattattttaaagaatgtatggtattcctgtctgtgggtgacttagatttgtattttaattgcctgttttctacttgatccctaaagttaggctagcttatagtttatgcttcgcactgcaatagctgtttaaagaatttcctggccgggcacggtggctcacgcctgtaatcccagcaccttgggaggctgaggcaggtggatcatgaggtcaggagatcgagaccatcctggctaacacagtgaaaccccgtctctactaaaagtacaaaaaattagccgggcgtggtggtgagcacctgtagtcccagctactcgggaggctgaggcaggagaatggcgtgaacccgggaggcagaggttgtggtgagctgagatcgcaccactgctctccaccctgggcgacagagcgagactccatctcaaaaaaaaaaaaagaatttccttattgtttcacctgtgttgtattttgctataactgctcattacttgtggataactttacgtatacaattgctgattttctaaagatgttgatgacttcaatttaatgctcagcattgtacagaggaaaatcaaactggcaacagtca

SEQ ID NO: 89970 - DNA, 1055 bp, Homo sapiens
cagagattgagtaactgcaaaaatatccttaaggtttccagagctaaggtttccggagctgagttttccaggggcggggccagggggagtggggagttatgggagggaaggggcctgggagagggggaagtggatcaccagaacggctgaaggggagggctctgggcggagggagctgagaatgtaacacattccatttagtatttcattgattgtataaacaatagtaggtcaaaacttgatagcacatactttgccagagatactaattgaccaggaacttaggttacaacttagctcagcaggggagtccattgaagtgcccggatccacgtagctctttgtgttggcatcgctgctagaggaggaggggaggaaggagcttcactcaggctgcatgctaattcatcgatgtttaatattcatgaaaggattaagtcagtgttgatgtttcttctgctcctgctgagtctccacacctggatccagaatgctccatgatccgagtctttgtgtctttataaactatctttagggagctttaggactttatctcgggaaatattaaggaaatggttttccttaatatcagcagaaagttttcttacacataatctaaaatcagctgcttcatgatcttacccaggtgatctttctctgaattgtgcttttaagcctgggaggttaacatactgcttctctgtggatggggttttcaaattacccggcagcatccttgttggtgctttctctaatttgagatcctggagtccaccagggaactccaggtgaccaccttcaccaagacacattgctggtagtgcagggaaaaggtggcataagcacaggaagaagttaggttcagaggaaatttgtatcctcagcctaatagcaagaaaacgacaactgctaaaatatctggaagtaaaagaagcagcttccttttgtaacctcacgtgagaggttattcctaaggcatgggctcctcctatacctttagattcccctaggagccgtggtatagctgtggtcggcttctggtttctgagcttttc

SEQ ID NO: 89971 - DNA, 1753 bp, Homo sapiens
gcagaagatggtgcgtccggatcagccacaaacagtaacaaccatctaatcgagcctcagatccgccggcctcgtagcctcagctcgccaacagtaactttatctgccccgctggaggtgagacggctacctcatctaactggactcactctgtcctgtgactcccattctttcttctctcttaactctgccttcagtttcgcagccacctcctctctctgatcagtcgttgtgttggtagtgaagggtgttcttgtgcagcctttctacctgcttctctgtctcgcccagttaacattcctggactctctcacctgattctcattctcatttggctaaggccgtggtgacttgtgctggacgtgggcactctcttttcaggacttccaccgttcttgttgtgtttcgcttctttttgcctgttacctcattagaattgcgtaatccctctttcaaataccaagtgctgatattgagtttttaaacatagctattgctttgatcatttgtttttctttcgactgtagggtctttcattctatgggcatacatgtttctgatgcatatttgcatctctgcatcatggctgggcatctgcttgtgctctctgtcgtgtttgtgttgttttggtgccatcctttaacatcacaaatgtcagagttagagaagccaaagagcaaatgtttgaggtcctaagcttgactgtgtcttagagacagctgtgggcttctccacgccctgggtccagatgctgataagtgggaatggatgctgtctcttccacactctgatatgaatgtcatgggtaacaactgtgagattccagatcgttgtatttattgatgtagcttttttcctttttgtgctctaaaacttgccaatctgttcttcattagactgtgagctcattaagagcaagggcacatttttctccactctgtaaaatctccatccataatgcttagtacagaacagtatttttggtacatactgagtagctaccaaaggatggtggttataagtacttaatattgttgtgtgtttatccaacagagaaaatgtaaagttagattgatttaaaagtaaatgaatgacagaaaacaggttttggggatcttccctcttgtccatctccaaagagaagccttctgcaatacccaggtacattttggcacattggaatcgcacatgctaaagagttctaatcctcattgttattctttagggtgccaaggactcacccgtacgtcgggctgtgaaagacaccctttccaacccacagtccccacagccatcaccttacaactcccccaaaccacaacacaaagtcacacagagcttcttgccacccggctgggaaatgaggatagcgccaaacggccggcccttcttcattgatcataacacaaagactacaacctgggtaaggctgctgcttttatttggctccattttcatcatgaagtctggcattaattccttgatttccttagtgtttgtagttcttgcagaggaattggattgactgtaaagggtgtctccagagggtctcctcagcctgcatctggcccctgcataaatgggcgggtgggagtgggtgggcacaggctggtagctgtctttggtattggtgctgggactgccttttctcctgggaagctctagtttagacagttcaccgtgctggatggaaaggtattgctctgtgctgttaagattttgttaattgatcccgtctcacaaagtaatctca

SEQ ID NO: 89972 - DNA, 1751 bp, Homo sapiens
attttttcttttgtcagtttcttcttgcactttcattggcattacccaccttcttttgatttgtcgctttagtttttaccgttcacatcagatcagtattcacacatctgaggtacattttcatgcccttgatcatggggtaggggatgtactgagtgactttggttgtagatctgatagctcctttttgtgatcattttgtcaaaattgatttttcttaccatgcaactctttcatgtactcctgaattgtacccaagaaagaatctgtacattgtattatcttgagcaaaatgagattaatcaaaggcaaatatgcatatctttgtatttctgtgtcagttctttatttctttagccgaatcggtggctttttcagtgtagtatatgattcttttaaaagtcagttggtattttcctgctatataatctctatacctgtaattacactgaaaccggttcccgtatttctggctatttttgatgctgcagatggtttttcttccggttatgtccccatcgaattgtctagctagagttaactcagagtttaacttggtcctactattatctgtgctacttgctcaaaactgatgttatgggaatgctggttgagttttggtgattgttattggccctagctcttcggtcttggaccaacaataaacatacaccattaattcccatttctagtgatggacattaagtgtgtccatttgatagaccagcagccttatattcaagaacaagccctgctcaaggggatttgggctgtcattttatgccttgcccattgtgtggtatcagttcagtccagcaggtctagagggcgtgctcctagaatcctttgaaccgtgggacattgtgtcttcaagggcattcttggcatttggggcagggacatttgtgccttcagttgcagactatttaacaaacttggcttctgctaccaggtgctaatggtcaccattacccccaccccaacatagtgatgaccagaaatgccctacacatttcaaaacagccctaagtgagaaccactctaagagctctttctattttgaagtaagggaatggcctgccaagagaatttctcatttagatctggtaacattcatttggtaaactgataactgcttctaaggcatataataacatgtaggtttgactcccctactagtctgaagataatgttacagatttgcaagcaagccaagagtaagagacgggcagctcgttggaaaatatagtaatggagttctttttttttatgtctttttacttattaccatggaacccctggctgtcctgccagtgttctcatttactatagcactgctgtaatttcaagtccttagccagaaacaggctccagaaataagggctaacgaatataaaagtagatggattagtgtaaggagccactgtggcttgccaacataagctatgattttagtaattttaactagcttggtaatcaaatcccctaaccttttcacagcctttcaagccacaacaacagtgtaattgcagctgggcagattgtattttaaattaaacagcactcgctttatttattgcttgcaacattgctgaatgaaacccatttttactttccagttgcgcctgtttacccagatacttgttattgactaatttactgatttaaaatcataatctgttagaacaacgttttgttgctgctgctagtgtgggaaatcctcaaggtaacaactggaaattccacaagct

SEQ ID NO: 89973 - DNA, 1001 bp, Homo sapiens
acccatctcacgctccaggcatggacagcctggttgccttgaaacaaacagctcaagaagaaaagcacccagtaactgcacacagatacttccacttagcatctactgtcttttacatttttcttgcaggaagatccacgtttgaaatttccagtacatatgcggtcaaagacatctttaaaccccaatgaccttggcccccttcctgtgagtacactggagacacatggaatggtctgaatatgtgtgttcctttatccgctcaatgttgatggagaggccctgtggaccttctctatctccaggctttgtggatctcattggtttgtgtttcttaacagaattgggtgtttagctgaattgtagtcatacattatagttcatgtgatatccagtacttatgaaagaggtttctgaattgctagcttctagcagaagatagaccttgtacacaggatgttcaagagacgttctctgcaggtgacaatttaagtggcactcattcattttgtaacttagcaaccactgagtttcagtcatattgctgattaagtcatcagaacaaaaataatgaaaatagtatgggagaagaaggcctaattaatcatagaaagtttctataagtcatttaacctgcagatttttaaagtttttttctcccttgttggtgacggctcagtaggagttgagctatatacttaaaattggattttgaatgaaaccttcacatacatcctcctcaacaactcactctcagtttgaaaaagccgtagggggtgacagggcagtggttggactccaaggctatttttaaatgggaatttttgttgttgttttccaagtgtaagaacctttttgttgcctggtatattagggcaacattggaggctgcgaaggttaaggttcaatcattattcattaggttatacaggtatcccacaccaaatctgtttggttcctgggttcaaatagaaagaaccagagagttagtttagaaaaca

SEQ ID NO: 89974 - DNA, 1083 bp, Homo sapiens
atgctctgtaatcttcctctgctgtatctaattctcttttttggactgcctaagctgctttgatttttgtgtgcatatgagtgacgcatgtaatagattattcatttgttcaatgcaggattcttaattgaaagcagtttttcaacaccataagtaaagagaaaagtatttgaaatgagaaaaaaaatcgtgtgtgtgtttgttagccttttgggaaactaagactttttaaatgctttttttcaactaaatgaaaatcaagatcaagttataaatccttaaaagaacaggggtttataattcccattttagcaagttatttgcccaaaacagtatgaatagatggtttatctttagttgtgcatttttgattgagtgtttttaactaaacagtatgtgaggggggttgccatatagactgtagttacctgctaactctgaaatactaatttgtctttagaacacagggtgggggactggacagcttttgaagaatccagaaatacttccttccaaaactttctttacatagaatagatttgaactaatgttctgattttttttttttttttttaacattttcagatagcaaaattactcagtgggaagacccaagactgcagaacccagctattactggtccggtcagtattttcaaattctgcctcttcagtataagattttggttacgtgtttacgtgtttcttgtgtattactgataacggtgatgtcaagggacaacggtgattgagtagttgactagaaacagagcactttgctgccatctccttactgaagtttccaggtgaggtacagctgcatgtgccttttcagatggatttcattataaaggaaaacagcttgataacgacagcagaattaaacatttttcttctcctttataaaagggtggactataagtatagtcaaaattccctcccttcctttttatatgaagcaaaaccaagccctatcttcataaagtgttatcatttctttaggccaggagtagtaaatgtatgccaaaagtttaaatcttttacaactttcaaaaatctgtagaagtttgggtgagattatagc

SEQ ID NO: 89975 - DNA, 1228 bp, Homo sapiens
acattttcaggagtagggggaactgtgatgtaacagtgatgtttggagaaccctcacgaatacaggaacaaacaaaaaatagttgctgggaatcacagactttcagaaatagaagagctgagtcacgtttgttcatccagtcaaattcttccacttaacagtgaagaaactccttagtagagaggatgtgatgcagagccagctgatgagagtctacccgagagtgcaggccttctaacgctggcaggagagagtggaaggaagtcacttttttagttcctatggggtcatttttttcctcatggcactaccacggtttattcattgatttcctattgcctgttgctctcaacagcttgtgagctccaggagggaactgggaaagctacctttggtttatgtactgttatttttctggcacctaaaatgccttgcacagagtaggtgctcaagaagtatcggttgaatggacgagaatgaacaccagaaagtgagaaataaactagagaggaaatcttagtttgtgacgggatgtactgttggtagagcagaaaacatgatctctttattggcttatgtcagaacattgtattctttttcttattttggtggttgtccaggtattaacaaatttataccttgcctagactcagaattgctatgtggtttcatcagactaaacactgcctaaaataaataggatgtgaggtcaaatctgttgttcagtggaaaatcaaagaagactggcttaaaaactaagaaaagaccataggcagtgtaaattgtctatagattgctcctaagctatataaagatgatgtattttttgctctggaattacagagcaaaacactgacgtgctcattttctggaagagtggttgtttgttttgtttcgggttttttatataaacatgtcttaaaactataaaagagggaagttcatgttcttcatttcttctgtttctggtcaagataagtatggtgaaagtgtaaggtttggagtctggagatactagactaaggatcagtatattttattaacttaggccgaaatgataacagcagaagtattctctgctgaaattcatactagtggctaaaaagcaatgagttgttttcgaggctgtcatagttaatgtctgtgtatatgcaaaacccaatcctttttgctcataaaaatatcgtaagctttttcagtagccaaaactcacggccctgactctaag

SEQ ID NO: 89976 - DNA, 1031 bp, Homo sapiens
ggaatgatttttatgggatataaaataattcagaaccctagtcacaaaatctgtggaagcctattcaattatgcgcagttatcatatttaattaacctggatcccggtaagaaaaatgttcaagtccttccttgtaaatgcaaaagcttagtttcaactacagtatttataatatagtgttatatttaattataataattggcagtattacgtccaaatgtaattttctacttataattatccctggcagtttaaaacctagaaactctaaaaatttttatgggcaacattttaaattataacattgcattttctaatgacacaccatccccaaattgttcaacattgcatcctctgttttactttccgattcctccttagcagttttctcttcaattttctccatcactatggttacacctctagggaggggagagaagcggctgcagctcagaccccctctggtggcctgggctccattgccatctctccctgcctcctcccctcagctggttcctcctgcccgggaacatctctggatggggcacaatgtctgctctcatttaggggttttggtctctgttccaaagtcctgattcaagagcttgcgggtaactgctattgaaatgattctttgccttcaaaactcaaatgatcactgaaaattccacagttttctttgtgagtcatgtcccctggtaatgatgatgactgtggtcatcacccagtctcactctatggctctcacatagcagtgtctgctacccggaaaccatctctgcacattcattcttacagccagaccaagcctggaccgcctctttgcaggaggcagttgccacaaccttggtcaagtgttttgttattttcatgtcagcgaaccatgctttgggctgctttccccacacttggcataatcaggatcccactccccatggcaacaaaatggacttgaggcagcgtggattatatctaccacctggcggccctgccacagttgagcatggataggcccaacctggccaggtggg

SEQ ID NO: 89977 - DNA, 1997 bp, Homo sapiens
ggaatttcacctggcctttcactgactccccactgccctcagagagcaccccaactctccagcaccccatgtgggctctgcactgccggccccttctctggcctgtctacccgccctggcaaacggctggcaagtccccagccttgttcctctgcttagtgtgcccttttctcccccaattcctacgcctgatttgcactgcggactctgcttgaccttgaagctcatctgtcacctcccagaggcctttctggccccactctgctgcgccatctctcttagcacagctgccctcctcatgccactctccccctgatctcgcctcctcgcttgtgcaatactgtagaaggcccttggttactccttcatggtttctcatttacattgaaagcaggttaatcttttctttcatgctctgatacatagcagtgtcaaagacctgaaactaaacccagtgtttaccgtgttttaggtttcttcattagaccattttacaagatgatgttgggaaagcagataaccctgaatgacatggaatctgtggtaagtaaatgcacgtcacacactggccatcaccgggcactcgtgtcttatgagaaggtattggagagccatatttgtagtctcagccacttttatgggtgttgcattccatgtgaacaacaggagacatttaattgcttgaaaagttcattgatctaattcttgtaataaatcattgttcacatttcctggaaccatggtacctagggtggatacatccaaatcccagttgcctctgcttacccggcataggacttgtgtgaacttactaaatccaagagacagctgaagatctatggtagcctgtgttttctataaaaactgctgctgctgaatgtttagagcttcatccgctctccctctgtttcctgacatcataaaaatggcagaggcaaaggtcaaaacaataggaagagtatcaggcagacgtcctagacatggatgagtgacgccacagctcaggcaagtgaacacttgagacgttctccaagtagtgatttgggttttcatgttgcatttaacattaattttacctagacagaccattttagagttggaaggattttattttttttttattttttttattttttgagatgatgtcttgctctttcacccaggctagagtgcagtggcgcgatcttggctcacttccgccttgcggattctagcaattcccctgcctcagcctctcagatagctgggattacaggcacacgccaccatgcctggctaattttttttttttttttttttttttgtattttagtagaaacgaggtttcgctatgttggccaggatggtctcgatctcctgacctcatgatcctcttgcctcatcctcccaaagtgctgggattacaggtgtgagccaccgcacccagcacggatttgctataaaacaaaaattgatgttctttttataatatacttctgcttctgtttttcttttaatgtacctataccccacatctacctccagagtgtatgggtgtttgcccacacgccagcacacacacagggccactgggaagcgcgtttgtccatttggggtatttgcagctcattcgtgtttgctcacttgagttaaaaagcccctgcatgatgtcacctgcctgtgataccaactgtattttgggcacggttgggtagatgagctgtgtcctcggccctgaccagcgctgactcagtgtttctgttgctcctcattgtatgaaaggagaggaagaggccagcagtgcccttgaacccactgctggtttgccagtcatggtgggttgggatgcacacctgtgattccggtctccactttgaccctgtgtttgtgctttctgctttcatcactgtatgatgaagcagctaggagcacaggaatttctcttaacgtctaactttataccacatgctgacagttagtgcctaaagtacagtgcgtgtattatttttaccctcttc

SEQ ID NO: 89978 - DNA, 1162 bp, Homo sapiens
taggtggagcaggaaacattgcattagtaacatatttcttgagcattctgcacagaattacattagaatgtaattaaagaagtcaaatgagtttgtattttggggaaaaaatgctgaattttcactcctgtgtcattctgtaggatagtgaatattacaactctttgaaatggatcctggagaatgaccctactgagctggacctcatgttctgcatagacgaagaaaactttggacaggtacatgtgggtaaccctgggaactcttctttagctttcaaggggcatttttcttcttgacgggctgtaacacaactttgctggaccatcagaaacaaccagcaggagctgcaggtgttaattttcatctcattgtagcagcacctttttgtcatgccaagacgccacactccaattacaaccatttctctcttccagcaaagttacagaaattccaagaggccttggggcatgaaccagcacctcttctaatccaaagcaaatgtgaatgtttcatttgtgcctcggttttagaatttaggtacttgaaaaaatagtgagattgttgacttagcgatgtaaatacatgaccaggagtgggtgatgttggaagggccattggtttttctctctgttttatggttctgttgtcatggcgacatttgtcttgtgaggctcagcatggcaggctccggtttttctaccattccctctgctttgcccccacgctgttattcaggctggactaatcctcaaagtcagtttcagactggtcagcagggatttggatgggccactgaaagtggatttcaaaggtaaagttgcctgcttggaataattctcatcatgctaaggatctatgcgatgtatttgtctcaattctgaagcctttgcttcatctgccactcagtaataatgatgcagcttgggaggtgttctcaatgtattctctgaccctggtacctgtccttccgcaaaagcccagaggtatttcccatccttcagactaaatctccacggctatgaaattaattagaccatagaactcattgtaatggttgccctctgaaaaatgaaatagacgtgttctttattgctagatgtcaaagattgctagagaatctttgagaaaagaagctgatgccactagaggatttaatgac

SEQ ID NO: 89979 - DNA, 1065 bp, Homo sapiens
agataaatctgtctcttcagcctggatccttaagcttctttcttgtctttaagtttctgtttgcatttttgaaagaaataccatgcatcctttttttatgactagaaaatataattttcagaaacagaatgcattagaatttggatttctggagtcttgatgggtgtaccctgttcttttctctgttaaacataattagtttcctgataaatgaatagcagaggaaaaaatgttgctcttcattattgctaatatatgaagaataattaaaagtcataaataaccataaaacaatttgcctttaatgatagcatctttaactgtgtaacatcctagcaaaaaagcctcattggacattctcttgtgcacagagcccatttgccgggaaatatttctgaatacatgttgtcttccctttatagtaagacattgtcactcaataataatatgcaagataacttcgtgatagtaattgttgttttgtctttgtaattacagacatatcaagtggatttgaagcccaatgggtcagaaataatggtcacaaatgaaaacaaaagggaatatatcgagtatgtatacacatatttactgccttttctttgaataattgaaatgcatgtttggtcactgtcccttgctgaaacagctcatgcatttattatgggcatgagtttattggtcagttttcaacaaggtaagttcttttctggcttgggctaatgggaagttgaatatgggatggaaagtctgtcttgtatcatgactccattgagctgccctataaaggagcagaggagggagaaaaggtctatattattgagtaatacggcaaatactcttttggaatatgtggatatcaactaagatttagaattgcaacggagaaccacggtgtcagtgaccagcagggcaaaattaggaaccaacaaagaaaaaatattttgtctctctcccaacttcttttccataatagaaatgtatagaaatagttaaaatggataggaagaattcagcatgtgcaaccctaaggaattctttctggtatttgtaatattcttaact

SEQ ID NO: 89980 - DNA, 1025 bp, Homo sapiens
gaattccccgtgatgaaagaggaggaaaggatactcgcattcattatgtgaatagtttgtcaccacccacccactcacttgtgatttattccatacagcaccaccgtggtccagatatatagcaggtgtatcatgtggaagaaagctgttgacttgaattctttctgttgctttcagttgcctagacctggagcagtgttctcttaaggtactggagcctgaaggaagccccagcctgtgtctgctgaagttaatgggtgaaaaaggttgcacagtcacagaattgagtgatttcctgcaggctatggaacacactgaagttcttcagcttctcagccccccaggtaggttttgttcttaggattattctccaggagttcatggagccaaacttagaagaaattatctcttttgaccaggtgaactgtgttaagtatttttggaaaatgtaaatgtgtagtgccttgtttgctttcccaggttgaagcaaatgcaatgcatgaatattggttggattgtggttgaagaaaccagctacatgagacatttttgagatagttggaaaaatttgaatgtaactacatatttgatatattaagtaattatcatatgataatgatactataggagaatgtcctttttttaaaaggagatgcattttaaagtatttagggagaagattcctatgacatacattggaatagtgcagccaaaaaaatgaacatatatttattcctatgtatttatatagatgaagtaaagcaagtatgacaaatgtttaagtttttttttgccgcagtgaggcttttgaatgttgattaactcaaccttgtactcttatgagtttttcctgaattaccgatattggatgaggctttgtacttcccacatcaggcgaggcttaggaaacagtccctcttctccattcagctgctctcctctcagctgcagatagagttggtctacagcagtggtggagggcaggagggacatgccattgaagttgcctggttgtggcagcactg

SEQ ID NO: 89981 - DNA, 1035 bp, Homo sapiens
ttcttattccacaggaagtctgatgattttcctctgtccttacagagagaagcctggtttgggttatgctgtgaactggcctttgaggtctaaatgcagggagatggggaaactttagatttattttgattaaacgagaaactatagtcttacgttgccatattctgttccaagtgacggtggaacaacagtcagaggtagctctgaaaggtaactgtaactgtcatgtggagtttctctgtcttttgagaaactgaccaagtttcttttctggatttgttttggtgcccagaaatagctagagcagtatccatgcatctctaactagagcagtttctgtgatgaggacccagcttcagcagtcactcagcatgtagtctgagtgtaaactcactctggaattataattttatatattttgtgaaggagcctcagaggatcgaggtttttactctctgttgctttctttcttgtcgagcatttccactgcacatgggttggccaacttgcccctcagtgtggtcttacttgaattatatgatagagaaatcgcttctagtttttatttgtggatggtgttcatcccattttccagcgctagtaaattgtttccctacttttattcctttgctcatctcagtgggaattgtagaagggggttaaatggatgtgttgaaagggttttgaaccaaaggtctgtaatgatttttttttttagatcttatttaagtttcaaagactgattccaaagcaaccaatattgacatctgtatagatagacttagatgtgtagttcaaggtgcttttgtttcttttgttgttgttgttgtttgtttgctttttgagtctcactctgtcacccaggctggagtgcagtggcgcgatcttggctcactgcaacctcatctcccaggttcaagcgattcttctgcctcagtctcctgagtagctgggattacaggcacgcgccaccacacccagctaatttttatatttttagtagcgacgaggtttcaccatgttggccaggctggt

SEQ ID NO: 89982 - DNA, 1599 bp, Homo sapiens
cttcagtggcatgtatttgaccagtagtacaaagttatctcccgacagtagtggacacacaactgatgaactacatctttccctacatggtgcttcaggtgcggggcgggattttattttatgtatactagagggtgaaagcatagaatccagaaggagactccctaagttagtatccagatttgctacttactagcttcataactttgggcaagtgactttaatctctctctgccttaatttccttatctatataatggggttaataatagtaggcacctcatagggtagagtgaggtttcattagatctgttatatataaagcatatagaacggtgccagctgaggcatcaggaaatggtaactactgctacttcctattgtgaacaccaccatcgtttttttccattcaagagtgtttttattaaaaatctgaagagtagaaactatattctgtaagtgatgctgctgatgttatatacttttcatgtatctttaactctggaaatataccatggatcttacatgttttgcttttttatctttgtatagataataaagagcaaacaactgaccagcctttgggtgagtagaactttaaaatgcattatcaaagtataattattgtgtataactccagaaggaatttaagacattttaatttggttttttaaagaaatgtgaataacattgggaccaaatgttttatttttttgtatctgtaaaagaaggtttagaagaggaggcttaaaaatgattacaaattcagtttctagggtcaagtcaacttctgtggagtgatttgtgtgtttctcacgatatgcaaacagacatgcgtacaaaaagaaacatgtacatgctgcatagttagcatagaggaggaagtggttagtgctgtctcttggtgagggatagaaatcacaaaggctgcagtagctttagcgtttgctcccctgtcttctccaatggaaagagaaaagaatttaggataaaatgtaaacgaacagttgcatttgaagaatgcctgggacaagaaaatgtaagggagaaaactttagcagataaaagtttagcagattaacatttaaagatggtaaaaatagctaacagcttgatgctggcagaagccagataaaatatgtctaaaatttgtccattggattcagctactgaagatgtgattggtggctttgagtggaatgttgaaagtgcctaatatgtgtcagttactgagttatgctgggaatttaaacatggatacaatgtataaaatagtggaaaaagaaagattcagaagtgaacaaatgaagacagtacatattaatttgttggaaagaaagagtggtttgaaattaactagatagggcatatattcaaagtgttttggtaggaggggaaaatgtgaggatatttacatttggaaaggaagtatctgttgagactgtgtagattagagtgatccatcaaagagaggacaatttatagagcaagttcctagaagagatgatagggatttgggccaaggtgaaaacaagagaaattggctttaatcagaatgttgaaacctcttttgagattaaaaagaaggagagattggtg

SEQ ID NO: 89983 - DNA, 1123 bp, Homo sapiens
actctgatgggattcttcctgtcccttttttagttatcttgtttttagcctcttccattctcagcaaaacagaacctaatttgatgggaacccaatttcaaatattccttgtttaaattttctccaaaagtctagttgaatattatatcccttttgttataatttaataaaagtaaactttaatattaattactgttatgtttcatatacagctaataaatatcctttgcctggctctcaaaagtgtgaatatgcttaatttcagtttgatgattttagcatctgtgttcctcagagaatattgatctgcttacataaatagttctaaaatgaaattaaataatgaaatcttatttgaaatgaaataatgcaatcttaaagcatactttttattataataccatctccataggttttgttttaatctttatatcttctttaaacaccccctttctttttttttcaaagcgaaggacaaggttgcccttttgataggaaatatgaattaccgggagcaccccaagctcaaagctcctttggtggatgtgtacgaattgactaacttactgagacagctggacttcaaagtggtttcactgttggatcttactgaatatgagatgcgtaatgctgtggatgagtttttactccttttagacaagggagtatatggtaagatatttataatgtttgtttttacaattatccattattcttttcattatacaagttaggttaagaattgaaaatcagataaagataaggtaaacatgttgttgaatggaagagttttatttttcttattaagatgatacatttgatcttcattccatctgaataactaattagcttcatgtctttacttttatgtttcctgttttgtcaaaacatatttttcttactagaattcttacctgtcttttgtgatttttttttaattgatagagccacagtataataaaacttgataaccacacagcaaaatttacattcatatgcgtaaaatattacagtatgtggggttttctttgaggggggtagcataaaaggttctagtagaatgtatattttgtatgtttccttttcctaactattgcatggtcttttctagtcttttagtgag

SEQ ID NO: 89984 - DNA, 1013 bp, Homo sapiens
cccgggaggtgaaggttgcagtaagccgagatcacaccactgcacttcagcctgggtgacagagcaagactccgtctcaaaaaaaaaaaaaatagaataaaataaaataaaaacacgaaaattagctgggcgtggtggtgcatgcctgtaatcccagctactcaagaggctgagacacaagaatcgcttgaacccaggaggcagaggttgcagtgaaccaagatcacaccactgtactgcagcctaggcgacagaatgagacttggaatcttggtctcaaaaaagaaaagaaaaacataaatgagtttcatgtttagacttgggtggcatccccaagataacctcattatgtatacgtaaatattccaaaatctggaaaaaaaaaatctgaaacacttctggtcccaagtctttcggataaaggatactcaacctgtattttcaatctggcatcaggggtgttgtttgtttttatattatacaattgatctcagcttttaaggtgcctacgtgacataaaaaggaaaaggcttccaaaacttcactagaagtgatgaggtgtaaggaaaaaatattgatcagtttaggtttctgtattggtgaagtatttaaagattgagggaatcatatgaagaattactaccttggttgtttattctcatttcttattgatattttcaccttggcttttaagccctttgtttgacttttaaaaccaaatcctgtggccagggcatggcggctcacacctgtaatcccagcactttgggaggccaaggcgggcagatcacctaaggtcaggagttcgagaccagcctggccaacatggtgaaaccccgtctctactaaaagtacaaaaattagcccagcgtgatggtgggcacctgtaatcccagctacttgggaagctgaggcaggagaatcacttgaacttgggagggggaggttgcagtgagccaagatcatgccactgcactccagcctgggcaacaaagcgagactccatctcaaaa

SEQ ID NO: 89985 - DNA, 1253 bp, Homo sapiens
atcactatagttattccctcaggaattaacaaaaccaacacccatggagttgggatctctgctcactagtcagtcctggtcttccagacatggaatgagtagccgaagcagatgtttggaggtttggatcccatttgtctgccattgcctttctaaggagtagaaccaatgactgttcctctagatttactatttttttgcttgctcagcatttaccaatcaaaatccaatgccagagttcaaatgcaactctagttttaaagctaacaaggagttagtgggttattttgggtagatatgtagctacctagatgaaaaattttgaatctataattttaaattatgtattctaaaaaactgttgtattttctcattatttatacccttttaagaatgctctttaacttttcatatttctatctgccctcctccgcctcccttaaatagaaatgactacgatgataccattccaatcttggatgcactaaaagtcaccgccaatattgtgtttggatatgccacgtaagaacatttgatgtttacgttgaagtttcctttattgtttgatgtctttttgtttttgctttttaggagcaggggtcttaactctgtcacccaggctggagtgcagaggcgccatcatagctcactgctcctgggctcaagcgatcctcctgcctcagccttctgagtcgctgggattacaggcatgtgccactgtgcctggcccctgagggttttttgattatagattagaggcctagaaaatacctatagacatgtaggcataaatttacctccttgatattctgcgtagaaaattttaaatgatcgactttagcattccatatcatggtatcttaattattaagcccaaattgggcatgtaattcctgcttaaagattaactctttaattatcaatgtcatgtgagaggcagaagagaaaatgaagcttattggtgtatacagaagtcccatgtggcaagtgtttgcttttctaacattttctttttaaaaaattatttttattggatattgacaagttataattgtatgtatttatgggatacaaagatatgctatgatgtacgtattcaatgtggaatgattgaatcaagataattcacatatcacctcaaatacttatcttttttcctaactgaaacattgtaccctgtgactaacagtccccacgctgtccccacccccccccagcctctggtaaccaccattctgctgggtgcttctctg

SEQ ID NO: 89986 - DNA, 1052 bp, Homo sapiens
acgtaatattctgttatgcaaacatactacagtttttttcaactactctcctgtgttggtgagcatttgagttagttgtaggtttttgctatgttaacagtgctatcattaacagtcttgtgtatgtctcctggaatatgtatgcatgaatttctttgcagtataattctacaacttggaattgctgggtcatagggtgtgacagtattccattttgagagagaatgccagacagttttgtaaagtggttgccgagtctacacttaaccctactccccacggccagcaagggataatgtgaatctgtactctctccatcacttgatagtcagacttttttatttttgccaaatgttaaatagtatctcatgtgatattgaacattgttcatatttttaatagctatatgtatatcttatgtgaaacatctttttatgtcatttgtgcattcttctgtgtgtgtgtgtgtgtgtgtgttttggcttattgatttagaggaatgttgtatgtgttcttgatataatactagcgaggaccgctaagacacaattgaataggtagttgtgggcatccttgtcttgtttctgactttaaaggaaatactgctaatgtcttcacatttagaataatattgtaagtttttttattaacactttatcaggttaaggaagttctcttaatttttttgaaaatttttattatgaataaatgaacaagattaaatggtttttctgcagctatgaagaagaaaataggatgtttcttttctttcaatttcttaatatggtgagttaaatttatagatagtctaacattaatccaacttgagataaatcactttcattgggatgtatatttttaatacactactagatttaatttgccatcattctgtttagaattttcatatctatattcatatgggaaatgggcctgtaattttactttcttatagtatttggtttaattttatgagaaaataaaattagtatttagtggtatcagtgttatcagtatcagtggcatacagagtatcagtgttatctgataga

SEQ ID NO: 89987 - DNA, 1446 bp, Homo sapiens
ccacgttggccagactggtcttgaactcctaacttcaagtgatccatctgcgtcatcctcccaaagtgctgggattataggcgtgagccaccacgccgggcccagatcattttttaattaaaagttaataccccatctctaataatagggaagggtaagtttcctaagctgcactgcttggaaaatgttttccctgttcatctagagtgtaagaaagatctctttgactttgactactaacagtagtaagaactagaaattctaaatgggttgtaagtattgcatgaaggaaaaggaagataatgatagctggcgtttctcagtttcagggagatataaaggatgccttgaggatttggaacctgggaaaggagagtgagtggatttttgggggtgggggtgtgtatgtgtgaatattttcagattgatatatattcactgttgatgccaataataaaccagatttttttccttttcaggaacatctagtcttcacagtatgtttatcatatcagtactcaggattggaagatactgtagaggacaagcaggaagtgaatgttgggaaacctctcattgctaaattagacatgcatcgaggtttgggaaggaagacttgctttcaaacttgtcttatgtctaatggtccttaccagagttctgcagccacctcaggaggagcagggcattatcactcattgcaagacccattccatggtgtttaccattcacatcctggtaatccaagtaatgttacaccagcagatagctgtcattgcagccggactccagatgcatttatttcaagtttcgctcaccatgcttcatgtcattttagtagaagtaatgtgccagtagagacaactgatgaaataccatttagtttctctgacaggctcagaatttctgaaaaatgacctccttgtttttgaaagttagcataattttagatgcctgtgaaatagtactgcacttacataaagtgagacattgtgaaaaggcaaatttgtatatgtagagaaagaatagtagtaactgtttcatagcaaacttcaggactttgagatgttgaaattacattatttaattacagacttcctctttctaagattttgtgaattggttgaatagttctatacaaatgaagtatggaggtgtgtatgtttatatgtatataacaaaatattttcattgtgaccactctgaagtaagagcaatgggaatggcattattgtagaataagtcattgtatttttaacaccagaaagaaccttgccgatcaccaggcataacctaattttatccatggaagaaacacagaaaggcatctaagttagagctggcaccagaactgagacctccagaaatctattccagtattttttccactacacaactgccttcctgacaggttctgagataagtgttatgtttgtagatagagtg

SEQ ID NO: 89988 - DNA, 2034 bp, Homo sapiens
gtagggacagagaaaagtgggtagtttctatgagccctcccttcaggagtcaaaggagagccagaagtacggggattgggatcctggtaaagattcatctgcagaaactgggccaaaggagaaatctgtagagaactttataagatttcctaaccctttgtaacttttttatattacatctgggcttccttaaaagaaacttgtgtttgggtttgttctctgctctctaagtcctagaggaggggaagagaaagaagaagaacctagggaggtatctgagaaaggaaaaggcttaatcctttgagggcctacctgaaggagaagggaacacacaggaaatggggacccagttcctcctgagaaggaatctcactggtctcctgcagtgcagacactaccctgagcactatgcatgcgctaatattgacttcatcttcccatcctgccctcatcatccctgccatcaccaccacttggcacaatgctttgtacatcccataactgacattaattatcagtgaactaaggaatggataatgaacccagaggcacctaaaagtaaatatgtccccaattaaacctaagctcttttgctattgtagtggatacagtagtgttttgtctaggttctctcttcagagtatacaccctcatcccctagctgctaagaatattggctgccgactactcacagctgactccctcactgcaaattgctttggccaccgtcttgtgacagttcttggaaactgtcttgcccaaggctacacccacttccaagaagcagccaacatctggctgatgtagagatagaaaaacttggccctcttgcctttatttgggccaactctgaagggccatcccagccccagagctccctgtaaattggctgaggcctcaatcaccatagcactgtgggtcaactcctcctttctaatcctgccttcctcagtccttcacaattatatctccaaagattattcagggtctgtttccagcaccgcagcccgagacacccacccacaccagattcatctccacagtacctgccctctcagaaaacgaccctcattccctctcatctgctccatcaccacaggctgggagggttccacctctcaagtgtctattgatcccaatcccttctctcggctgacatcacgcacacacaacctcaggcccatcatcccagtgtggaactggtcactgagtccttgcctccaacctggccaacgttcaatgcattctgcacactaaaccttgaggaatctctccaacgataccatcttgtcactcctctgctcaaatgtttccagatgactcaattgtccttagaatgaggtccagattataactgtgacttagaagtttcttcacgattcgacccatttgcctgcccatgtccctgcccctccatcctcacatttcaagatccaggcttgcctttttgttctttgaatatcacctacttcctgtcactgtcaggctttcgcacatgccggccccgctttctggaagactctccttacccttcacaacctcctcatctaagtcctgtgtattggccaggtgtagtggctcacacctgtaatcccagcatcctgggaggccaggtcaggtggatcacttgaagtcaggagttcaagaccagcctggccaacatgatgaaaccccgtctctactaaaaatacaaaaattcgctgggtgtgagggcgggcacccgtaatcccagctactcaggaggctgaggcaggagaattgcttgaacccgggaggtggaggttgcagtgagctgagatcacgccacttgactccagcctgggcgacagagcaagactctgtctcaaaaaaaaaaaaaaatctaaaagttaagtgctcagaacaccaggattaacacctataaggtttggggttttttttccaatgacaaagataaaagatgatcaaatactttaacattttctgctaaacttaacgatgactattttgaagtctcttttgaggtttcttatttaataccaaaagactagaagt

SEQ ID NO: 89989 - DNA, 1023 bp, Homo sapiens
cctcaaaagagacttcaaaatagtcatcgttaagtttagcagaaaatgttaaagtatttgatcatcttttatctttgtcattggaaaaaaaaccccaaaccttataggtgttaatcctggtgttctgagcacttaacttttagatttttttttttttttgagacagagtcttgctctgtcgcccaggctggagtcaagtggcgtgatctcagctcactgcaacctccacctcccgggttcaagcaattctcctgcctcagcctcctgagtagctgggattacgggtgcccgccctcacacccagcgaatttttgtatttttagtagagacggggtttcatcatgttggccaggctggtcttgaactcctgacttcaagtgatccacctgacctggcctcccaggatgctgggattacaggtgtgagccactacacctggccaatacacaggacttagatgaggaggttgtgaagggtaaggagagtcttccagaaagcggggccggcatgtgcgaaagcctgacagtgacaggaagtaggtgatattcaaagaacaaaaaggcaagcctggatcttgaaatgtgaggatggaggggcagggacatgggcaggcaaatgggtcgaatcgtgaagaaacttctaagtcacagttataatctggacctcattctaaggacaattgagtcatctggaaacatttgagcagaggagtgacaagatggtatcgttggagagattcctcaaggtttagtgtgcagaatgcattgaacgttggccaggttggaggcaaggactcagtgaccagttccacactgggatgatgggcctgaggttgtgtgtgcgtgatgtcagccgagagaagggattgggatcaatagacacttgagaggtggaaccctcccagcctgtggtgatggagcagatgagagggaatgagggtcgttttctgagagggcaggtactgtggagatgaatctggtgtgggtgggtgtctcgggctgcggtgctggaaacagaccctga

SEQ ID NO: 89990 - DNA, 3286 bp, Homo sapiens
ttgtgggaggtaagtgggggaaggagaaggagggggaaacagtgtctgcggtgggctgtggggtggaggggaggggggatgggccctgaggggctctggggtgcttgcgaggtgagcatttccaaggctgtgtgctcgtggggtggggggacacacgatgaccttctcctcctcaggaagacctaagagggaagagcaaaccccagcgagatcccccctgtgctgatgattttcagggacttgttggcaactcagcgagggttgccatagcttttttatgtagggtgaccagaaccggctgaaactggtttgaggcagatcagctcctgaacacaatgcagtcactgagctactacagtaggatagcagcttcctcccttcatggcagccaaaagcagaggagcttgcaggaaggtaccatccctacacagtatgtgaatgcacacttagacaccacacagcactggtacgtgactaatggagccctaaaagattctgggtagagaagatggaaaaaaaggtgcaggtttgcagggtctgagattacttgggcttttcctgcctttttcttttgcttaagggatggacaaggagctgagatttatgacccttattagagaaaaaaatgtgccttgctagggtggggacacttggttgatgcagtctctctctctctttctcggtgtttataacaaaacaaaaccaaaatgaactgaggggtttgtaatggtagtttgtttgttgctggagaatgctactttgcatgctttttttctcttgcagggtatgttctgtcttgtgctttttcttttagaagctactaaagggtgttggggatgcttctgactattatgaaggccaaaaggtaacaatatcgttctaggaaatgaacataaatgcattccagtgatgctgttagccatacatgctgtcttttttttccttgtaggcctgttgactggggctgcttttaaccctttcctatttgctgagaatgcagccgtgtgacagtaactgaacattggtctaaagtctttccaaaaggtcaaggttcacaaggtgagatacgctgttttgagcatgaatttaaatatttatttgcagatccatttagacacagacggaccgtggattgctacccaggagataaaattgggttcagagtggagaagaaatgctcttaatgttatcccagtttaatgggattagagtgactttatgatggtattgcgatcaaggcgaaatctgaatgccttcattaaatcgcatgtgtctgggcaattgggagagtcaggcctggaaggaagcgagtgtggagaatggtaggcgtcagggccttgtggagaatgtgctgttttgcataagacgaaagcagtacacatgtggcattttcccgatgattataagaaaaggaagggcttcaccaaatcgaggcagcctagccacctttttaggatttgaggagtctgaaggtagatttgccttttgttcattcatcacctttcttttaccttgctctcttgtgttaacctgaaaggtttttcactccgactcaagtggtggaatgtcttttattgattttgggggctgttgacggtgagttcgccattggattctttgtggcatatgtttaatgtggaatactaatgcaataccagggggaagccgggtagtctggcttcatctgtgaaaagatgcctgttaactcaaagctgtactggaatgggtggtagaaaatgtctgatgcctttaaagatcgcagttaggtttgagcaggcattttaatgcaccttccaaaaccagaggttggagaggagaggagagaaggaaggagtgaggagagtagcaaagtgaagaacaaaggctgagggggcttgcaggagaacactcaacattttgccttgggttccttgtgaaaagaactgcaacttccccaaacaggaaaccagcagctccagaatgggatccagtgtgatctcaacaacagatagaactggtcctgcctttctgctggtttttggtaaaagtacagtcaagaggagcccatagaagacatgactgaaaataaaattttcccctacttcgaagtgggcattttgttcctctccgtgttcagcagaataggggcttttcagcagtgccgaggatcttggaattggttaagttgtgtgctggcagttggtgggcaggatatctgcagtgaaggacgtcaagtatgcaagggttttattgttaaaatgtttttcatttggctacagaacatccactatgtgataaaactggcaaaagggaaacaagagtgcatggttagctcaggatactttatggagtatttaatagagataaatgtaatcttggacggatataccagtaaatagcttacatgatggaacaaaattctttacaaatcactgtgctaaaattggttttcaattctccatcatttctgactgccagaggttctgtgtatgagtgtggcaggaatatgcttgcaaagcagatccgaatccacgctgcgcgtggtgtgctgcttctgcgtttctgatgtcaactaaaactcagatggctaatatgataaaccttaattagcttaatacaataagctgttttattatttagtccttcattcttgtcttttgagagtcagtgatttttgtttaactttgacagctaaccccttgccacggctatacagtgcgaatatgttttaaaaaacctcttcgtagggcattgcatgtcatggaatgttctggttttctgtcttggtggtttttagctttgttcctctccctcccccttgaagtctcctgaagatagcatttgttttgcatttagaccaatctttccagctgcaaatgctgctgagggttggagagctggttctctggggcgggagtcatgagctcatcttggattggagcttgtctcaggtgttgatctcatgctgaggtataacaatgtagcaggcccaggcctccctggagtggggagagtcttctgggctggggaatgtggatgtgagtgtgcaggatgagctagggcatgttccttcctgggagagccaggggggacccggtgcctgcagttcctgtcaccgtggagcccagagcccagcccctggtcggcagtgcctgtagcaggctctaaagacgacctgcggtccatcccctccggagcaggaatgtgtgggtttggctgaggagagcacactggaaagaaagtgtaactgggtgttgaacccttcttgtttttatcctttgcctattcaatcattttttccatgtta

SEQ ID NO: 89991 - DNA, 1051 bp, Homo sapiens
cagcgcaacctggttcaggagcacacacgctctctttttcttctgttcttttctctcagcgattccctgcccccacccaccttgactcattttaaggaaggtctaggaaggaggttgccaacttgtcagtagaatcttctgatgcctttgactgtgagttagaattttagggtttgtgttctcccatctcccatttatttcttctcttgaaatgttctcttggacttttccgtgcaatacagtcgctctccagttggctttgaacaacctttaccgtatccttggtagaactccagctggctgttaacaggtgaagcagaggttgccaacacaagggaaactgactccattccccatcatgtactcctaatcccaggaccatcagaacaagaactacagacttgataaacattatggaaacacacaccttcgtgttcattttattttagggctgatctttaactaagtcatggttaaagaattagcttaaaaaaatttaaaatttgtgtacaggaaaatttactctgtggtgtaccgttctgtgggttttggcatatgtgtagagtcacttatccaccaccacgggcgaagcagaacaggcccatcacaccagagcatttcctcttgccgcccctctgtagtcagcctctcctacccctggcatccactgtctcactatagggacatggttctctcgtcctagagtttgggctttctagaatgtcagatagcaagatgcgtttcagattcatccatgtttctctgtgtttcgatacttggttctttgtcattgctgagtagtattctgctgtatggatgtaccacagtttattcatttgctgggtgaaggacattagggttgtttccagtttttgctaattgtgagtaaagttgctgtaagcatttgtgtgaaacaggtttttgtgtgaacataagtttttatttctttttgctaaatgcagtcacgtgtcgattaatgcaggggtacattctgagaaatgtatcattagacagtcttgtcattgtgcaaagatagaatgtacttacacaa

SEQ ID NO: 89992 - DNA, 1092 bp, Homo sapiens
accatgcctggctaattttttgtatttttagtagagatggggcttcaccatgttggtcaggctggtctcgaactcctgaccttgtgatccgcccgcctcaacctcccagagtgctgggattacaggtgtgagccactgtgcccagcccaggttgttttttttttttttttttttttaaggataaaatagctttcaggattgggaagaacagacaaaggtaatggtggtacagatggaggggagcccaagaagtgggacatgatgttaacctggggattgccttgtcatttaacagatgcttactgagtgtttaagcactgggcattgtgctaagcacaggagtgcagagggaaaagggccccagggagaaaaatctagtggaaggagcccccagaagctatgataggaatgtgaataggccgcctcatgccaagcgtccacagaggagctgtgaaagactggtaagaatatgtgaggcagtcagagcctgggagagcatctaagtccatgcagcacacgtggaaaggtctggggagagcttggtgtttcgagtggggtgtgggtgtgcgaggggatggagctggaaggcagttgagggtcacctgatgaggccttttggtgcagtgccttgaggatggacttctgtgtaggcagaaaagacggacctttcgttacaaaggtcctgtggcagccccatggaggttggaatagaggctgtacaggctggaggtagggaggccaaagagggaaccggcaatccaggagagaaaggatgagggtctttcatcccaggtgttgtttgtggggatggagtggtaggtgggggctgcttcaggggccaggtagtgcctgattggaggagtaaggctgcttcttaggtggctgtctgggggttgcttggagactgggtgttctgtctttgagatagcaaattccgaaggcagaatagatttggaagagtggaggtggagggacttgatacagtgagttcagttttgggctccaattgcctctggctctgtgagtctggaatttaggagggttgcttgggctggaggtcaagattggtagtaatgaacataaaacagagag

SEQ ID NO: 89993 - DNA, 2002 bp, Homo sapiens
ggttgggtttgggtcccctaagatagtggcttacgtagtaaaaaccataaacgaagcggcaggggtggctgaagaacttagaacctgtgctttagcaagttggagggcagaagattcccaggaaggtagaaaatgtagctaaaacctgcagatgctgcagtaggtgatggcactttacgtctgttatcccatttttctgatttttaaaccttttcttagaggtggggtcctgctatgttgcccagactggactcaaactagctggacttgaactccttggctcaagggatcctcctgcctcggcttcccaagcagccaagtagctggcactataggcatgcaccaccgcagcagctattatgttacctcatttgataccgaaatgatgagaggagctgtacatgtttttccctgtggtaccagtggggaaacagacagagaccctcccagctcgtaagtggaagtggaaacaggatttgaaacatgctccttctcactgtgctgttctgccttgggggagcacagttggtggactgaggggtgagcatggaagctgtttcagggtgtggaggtgcccagagagggcacagcaggtgctaaacagcaaagacactggcgccgttcacgttggaggtgatagctgatgactgccagcgtgagaatatgcagtggagaagtttgaggtacactcagggcctttgtatttagccagattttcctgattgtagtcagcacagagagcagggcatctgtatttgcaccagagacatctctagaaatagcatgttgaaaagacttattttattgggcactggggtgaggatacagattggaggggagaagggctagaaagatgtatttgttttatgtattctttgaaaaggctgagaaaatcaaagcaaattgaaagtggtgccgagaagaatcttttgttccaacaataaataaacacagtttaaagaattctttgaatcatcttctacggcaggaagttctatattctggctgttttataatgagggagagcaaattctgtttaatctaaatctggagactgaaataagtaatttttagacagacgcagagcggcttttttagctgtctcacatattccttatgaaggatcactctttaaggatggtcttcaggggccccaaatgcagattttgtattcttctgttttcagtcagttattattacagctttacataattagagcttttagacatcttgagtgatccgtagagacctaaagataaaatcagggtgttgtggttcttgaactgttttcttaccatcagcctttgcattttgggacacaaactcctcctttccccaaggctgactcccggggctagtaatgggtattgattttatcattttcttttgtgaggaacaaattctttctagggatttcaatagtaagaattagatagttgaaaaacctaaaaaggttagaaaattcaaagccctctgttttaaaggaccccatagctggaagtacttcacacatttgtagttatctcattttctacagtgagcccacattggagggtggggccatcaggtaaccaatagcaggtttagaactggaacccagcactatagtcctagcccaagaccgcattcatcattaccttctctctgccttccaacatttatctttttttttttttttttttgagaccgagttttgctgtgtcgctcaggctggagtacagtggcgtgatctcggctcactgcaacctccgccttccgggttcaagcgatcctcctgcctcagcctcctgagtagctgggattacaggcatgtgccaccacgcccggctaatttttgtatttttagtagagatggggtttcaccatgttagccaggatggtctcaatctcctgaccctgtggtctgcccaccttggcctcccaaagtgttgggattacaggcgtgagccaacacacccggcctaaaatttatcttatgttttatttttttgaggcagggtct

SEQ ID NO: 89994 - DNA, 1286 bp, Homo sapiens
gatttgattaagttaagctttaccgaggtacttgttgagaagctggtctttgatgattttgctgatttttttttttgttttttctgggatgaagtcttgctctgtcgcccatactggagtgcaatggcgcaatcttggctcactgcaacctctgcctcctgggttcaagcagttctcctgcctcagcctcccaaatagctggtattaaaggcgcctgccaccatgcctggctcattaattttttgtagttttagtagagacggggtaacaccatgtctctatctcctgacctcaggtgatccacccacctcggcctcctaaattacaggggtgagccactgcacctggccagttttgctgatttaacctagcaagaatgggagaggtaatttgaaaactgattttactttgtgttctggtgaaatctgagtgataaaggccacggagattttcacttgcctttgcccagctctcaatgatataaacctgattgcctgtcagtgatgtaaacctgtgttttgccacttactagctgcgggaccttgaacaggttatgtaaattctaaaccatacgtttcctgagggttgttaggaggattaaatgcatatataaagtgtttagcagaatatgtggtgagcccttcctacaatcttagctgttgttttgtggtctttggtctctgttttgggagagtagccttagtcccaggactttttttttctttcttggagggtattgtctcctgtcctgccttacctcattggcaagtatatttgtttttgaccatgaaaacagactgtgtgtctcctccttgtcgctagagttttagttacagctgccctatatcaggttaaaagtgggtgaagtagacacaagggtagtgtatttgttcctacttggctctactttcatttgtggttggagaatcttgtctgaattttgtatttatttatttatattttattctattattttttttgagagatagttttgctcttgttgcccaggttggagtgcaatggcgcgatctcgcctcatcgcaacccctgcctcccaggttcaagcgattcttctgcctcagcctcctgtgtagctggggttacaggcgcccaccaccatgcacaactaatttttgtttttttagtagagactgggtttcaccatgtcaggctggtcttgaactcctgacctcaggcgatccacccgccttggcctcctacagtgctgggattacaggcgtgagccactgcgtctggcctgaattttgtatttgtaatctagtact

SEQ ID NO: 89995 - DNA, 2404 bp, Homo sapiens
actccacctttgatattgtgatccctttgacacttgtagtcggatcagatggaaaagaattttaatattgtgattgcatccaggagatggggcaaaggtgcctgttatgacttcatgaagactgtcaggccttaggtcagcacagacaagtgactttgggcctagtgcaatggctcacgcctgtaatcccagcacttcgggaggctgaggctgaggtgggaagatcacttgaggccaagagtttgagaccagcctgggcaacatggtaaaccccgtctctacaagaaataaaattagctggctgtggtggtgtgcacccgtagtcctagctacttaggagactgaggcaagaggatcacttgagcccaggagttagaggctgcagtgagctaggatcacactactgcacttcagcctgggcaacagagtgagaccttgtctcgagaaaaaaaaaaagcagaaaagaaaagtgactgtgtttggttcacggattcagtatccagtgagagatgcggactgaaggcagttagcttgccaccgtttctgcccccttgcctgatgaggaatagaggtgacttgggagttttccttagaatgggggttagaagagccacttcatgtagcagtgttggaaaacggctagtcacatcacctctccagcacgtgatggagacagcctccattgggtccttgggtgaagctgtcctggggaaggttgccttggggcctggaccaaacaggagattgagttgcaggaaggagttcactgtgttatatgtttaaactcttatgtaagagactggagaattttacttagtgggtttattttactttgggaaggcacattgattaaatcagctatagcaataaataaatgtctgttgcatgagttcagttttaacttccccatctctctacaagaaagtctgccatttcacagaaattctagttgaaatttagatcttactggacatctgggcactgagagttctgtgttatatgaatctggcacattgaattggatttattaatcgttggctaagtctgtcaactccctgtgctgtgcagaatcctgtgcctggcatggtgacagtatcggctctgggcctgtgagtgtggcccttatggaatcacagattgttggaaggggagtggagtggggtttggaagaatagggacaaggttgggtgtgtcctaaggatggtcaaggctgtggggccagccctggattaaggaagtggaactatggaagttagtcacagttggggggtgagtttagaatgtagctagggcagaatgttgccatagcatgccaagagtcagggtaagttaaagagtcagagactgggcaggttggctgggcatggtggctcacacctgtaatcccagcactttgggaggctgaggtgggcagatcaatagaggtcaggagttcgagaccagtctggccaacatggtgaaacccagtctctactaaaatgacaaaaagtagctaggtgtggtggcatgcacctgtattcccagctactcgggaggctgagtcaggagaatcacttgaacctgggaggcaggagttgcagtgagctgagattgagccactgcactccagcctgggcgacagagcaagactccatctcaaaaaacaaaaaaaacaaaacgaaaaaaaaccactgggcaggtagaccttcagaggacatcagaaggccaaagatgatgggcacaagtccggtgaaataggcaaggacgggaacacatacagatgcaggacagatggccatgcacaagtgcatgatggcaggagtcggcagtccgaaagatctgtgatctgtggtgctgataggagaggcccccctgaaggactaccatggaatgaatgagtgagttggtgaatgaatgaagaccatatgagctaccagttccagtgatcactggataactgcagcctgaagtggagccaacttcacccagccttcacgtggagtggtgactaagggcccccgtggcccaggtggctgaggtgaggggtgtgcattgggagaggcagtagctccttgcctggcaaagttcatacgagaaggctctgaaagactagattgtttagagtttgcatgatttgtaggacatgatcaagctatgcagtaagaaaggcagctcattctgaggcccagggttagcagctgtcaggaggacctgacatcaagaactcaagcgtcatcttgcactaagcttactccgcattcttttgaggaccacatgcccttggttgtctcttttgcttcccccttagtagaacttctttcctatacacatgggcaaacaatgctgttccacagctcctgtgtctccatgtcctcattttaaatactagtggacatcacctgtagtcctctgtcctacttgcagt

SEQ ID NO: 89996 - DNA, 1072 bp, Homo sapiens
aacctgagggcagtcttgccctttaaatgtacattttgttttctgaagagaaacatggggcaggtatttttggaggctttatatattcagtaagtagatattccactgttcaagaaccttcacgctcacagcaagtcagcacaattctgtttttgacttttgagcaagaaaaggaaaacactggtcatgtgaattggctggagttgcttaatttggttattgttcgatgcatatttatttccggggtgatgcagccctctgcctctcatgtgtttggggtcagttgggtggtctggtgggagaagaggggaagaaagaaaatgggtagtctgctgcatcattgtgtgacctgtcatcttccacctgggcttaacacaaaaccacaaaccaaaacagaacccccacgctcacaggagggaccgtcatgcaggactaggcagtattgctggttgtggttagtgtcctcttcccaatcctagggcctatctgaaggctggagaccacaccgagtcggggcgagctgcggtcagtgccacttcctgaggaagtgactgaggcagccgggctttgtgaaagctgctttatccctgcgtcccccggggcagaggggagcagaaataatatgccaatggcttttcctgcggaattaaaggagccctccccaaacatctttttattagattagagctttgcgttcataaattatttctaactactctcctattctagttctcagaaaatggaaggagcagaacttcatatctttaaggattttctgggattatgctctaatctaaattatgaaaacttgatatattttaaaggaatttactcagttgaataataaaccacaatcatcatgagtattttattttatataggcagacagtataaaacttttagatagttcattaataaaggaaaattgaacattttggaactttcatgtgattttagcaaactgcaaatcagtcaaatattaaatccgttaactccatgtgaaagtaaagaatcacttagaatgtacaatgtcacgttttctaattttataaatataaaatcagatattttt

SEQ ID NO: 89997 - DNA, 1734 bp, Homo sapiens
cttcttcttcctcctcccccactccacctcttcctcttcctcagacctctttacctcttcttcccggtaggtaaatggttcctctccttcctttttttttttccttcttaaactatttttttagatatggggcctctgtcatccaggctggggtgcagtgatgctatcatagctcactgcagccttgacctcccgggttcaagtgatcctcccacctcagcctcctgagtagcaggaactacacgcatgccaccgtatcgggctaactgggttcaagcgattctcctgcctcagcctcccgagtagctaggactacacacgtgcgccaccatgcctggctaattttttgtaatttttagtagagacgggatttcaccatgttagccaggatggtctcgatcccttgatcttgtgatctgcctgcctcggcctcccaaagtgctgggatcacaggcatgagccactgcgcccggcctctctctttcctcttaaaaggaacctggaggcctggcctggtggctcacgcctgtaatcccagcactttcggaggctgaggtgggtagatcacttgaggccaggagtttgagacaagcttggccaacatggcgaaaccctatctctactaaaaatacaaaaattagctgggcatcatggcgcatgcctgtcatcccagctacttgggtggctgaggcatgagaatcacctgaacccaggaggcagaggttgcagtgagccgagatcatgtcactgcactccagtctgggtgacacagagaaactgtctcaaaaatgaatgaatgaaacctgggacgcttgtacttacgaacatttaaaaaaatcaggtaaaatggatcatgctttgtaagtgtgattaaaaagactttttactgttagtgttggtctgtgttcttgcatgtgttttaagctttttacctaaaataggaatttatttataatgagtttgactgaggatctcttagaaagttggttaaccttctctgttctgaccagtcctcgttttgttgttgaacgtgccatcctctttcccaccctggtgtgatactaagtgccagcctatgccagtctgccctccctcctaaagctggataaactcctgggttcacatttaccttgagttgggggaagtagtttattatttggaatagaacatttccttcaggccaagatcctttaggaaaatgaaagtaaaagtgctaaaataccagcccccactcacccataagcaaggctggtttactgtgaaatcaagaatatatagtatcttgatggatagagtgacagaaggtattcttggagacattttaaacataaaaattatgatttaagcgcatgagtaaattattttaatgtctccatttctctcatctttcattttatcgtgagttaaacatatatcttcaggattttaaagcaaaagagtgaaacacaacactgtgtctcaaagggttttttcttttttgtttaagagttatttttgtaagaatttatgaagaaaggttgttcttgtggttacttgctttggctttaaactctctttggagaatatcacaatctaaatttaaagggtactcttgaaaacactgttgaattgacatggagtgtctgatttgatggaagccccgtagacctggaacggtatctgggatatgttactgagtgtgaaaatgcctatatatgtgtatgtatatttatgcttatgtatgcatttagaaat

SEQ ID NO: 89998 - DNA, 2222 bp, Homo sapiens
actgcagtggcatgatcatagctcactggcagccttgagctcctggcctcaaacggtcctcctaccttagcctcccaagtagctgagaccacaggtacatgccaccacacctcactaactttaaatttttaaaatagaaatgaggtctcactctgttgcccaggctggtcttaaactcttggcctcaagcgatcttcccacctcagcctcccaaagtgttgaaattatgggcgtcacccagccagatccttgcttttcagtgcagtgtaactttcttccctgttaaatctagcagtgtttgttttttgttgttgttgtttgttttttaagtaaaatatacataatatttgtcatcttaaccataagtgtacagttcagtgagatgaaatatgttacccatggtaaaagttttccatcaccttcaaaaaaagctctgaaccaaataaataactctcccttctcaccttcctcctgcttgtggtaacttctcttctacttcctgtctcttaatttgcctattctaggcacttcaagtaagtgcagcagtttttatctggccaatctactgtgacccagtcaagccaccacccatgtctgggctgggaaggtggggaaagaggctgctgcacatgcttgggatgtcttcagccatatgcatctgtccatctgttcatccacccatccgtctgtccatccgcccactcagctatctgtttatcaaggtataacaatacagcttttttattcctctccctctgtaacctatttgggccttatttatgtttctcttcttataaaccacctcagatctttctgtagaggtatttattaagtaaaacaacaccaccacatgacggacataaatattgaaaagaccaatcgattggaaggattaatcagtagagggaggtgttttcaggggatttagacaggaggaagatagcctaggctgacaaatggagcagatgaagataaatcggcaaaataagtagggagacaagatccctgtcccatgtgaccatgcatttgaaagcaggcagcccagcgaggtagaggcatgaaaggctgtatggactgcgctcttcaaagggctgtggttttgttctggggtctagtcttaggttgtaagcttttttctcttctctttctgttttttcccccggggcttgaacagactcaaaatactcttagggttggaatttctctttgattctggtcttggttagcaggggtgggggggattgttatgaacatttcattagatgtgtgtgctcttagatatggtcagtttgactgaacagttgctctgtttctgcattaagcacgtaattttgtaagttttgtagctttttggaatataaagtagttgaatacttaaagctccccctgctgccttccctttatttttaacttggactgagcaaggttcttctaaatgcattgaggttggggggaaaaagacctaaaaaagaaaaatacactgaataatactttcacatatacacgaaacctgattttgcaatctaaaatgactgtttttgggttttcaattatggaacattttctgacaaataatagaatttgctgtatttcactgtaaacagttttgagaatgcactaaatgcaacaacaaccttaggattagttatcatgacagattggcattaggaaaaatgatgagtatattttatgttctggaggaatgagacttgaagagcagagcaatttttaagttgtttacatcgagggaagagatgtaaagttaagattggctgggcgcggtggctcacacctgtaatcccagcacttagggagcccgaggcaggcagatcacctgagatcaggagtttgagaccagcctggccaacatggcgaatccccatctttactaaaaatatgaaaattagccaggagtagtggcaggtgcctgtaatcccagctacttaggaggctgaggcaggagaattgcttgaattcagaggcggaggttgcagtgagccgagaccatgctactgcactccaccctgggtgacaaagcagtgggactctgtctcaaaaataaataagtaagtaaataaataaatgaataaagattattacttaactcctttcaacaatttaaaattttttgtcaaagtaatacatgtacatagatcaaaaaaatagtactttacatcataattcccttaggcagtgaatttgaattttttggtttgttctgt

SEQ ID NO: 89999 - DNA, 1068 bp, Homo sapiens
tgcgatctcggctcactgcaacctctgcctcctgggttcaagcaattctcctgcatcagcctcctgagtagctgggattacaggcatgcactaccacgcctggctaattttgtatttttagtagagacagggtttctccatgttggtcaggctggtctcaaactcccaacctcaggtgatccgcccacctcagcctcccaaagtgttgggattataggcgtgagccaccgcgcccagcctgcctgaagatttttaatgttttcctagagcaggtgaaggtcattgacaaaacataggatttagaggaacatgttgggagggaatatgagggctttagttttaagtttgacctcgtgtagggagagccaagcagaatatcatcccagcaatggaaagacgactcttaaggcagaattaggactaaagatagaaacccgtttgttctgactgttgtgaccatgggagttgctgaggttgcctttcaacaaaggtagataacaaaagagaatctgaagggactcatgaaaggagagaagaggaagagccagtgagtcaggaaaagccaggtgagcttgaggcagtgctgtggggtccacgagaggaaaggatgaccagaaaatgaaattctgcagaggtcacaggcaacatgaaagatgattagcagcaaaaacaggcacgcgggaacacggattgggaatggatcgttgctggagtgttttctggctgtgagactacactattcagcgacggcatgcactttcatttggacccaggaggaagggccactcagggaggcgctatggccacctcaggtcactagctaatagtagtaaatagggcagcaaggatttcatctccaaagctgtctcctttgtattatgtcacatagcctgggttttccctttttaacttttaggttgaaataattttaacttaaagttttggctgggtacagtggctcacatgtttgtaatccctgtgttttgggaggccaaggtggaaggatcactggagcccaggagtaaccagcctagacaacatagcaagaccctgtctctacaaaaaaaa

SEQ ID NO: 90000 - DNA, 1069 bp, Homo sapiens
catgcaccaccaagcccagctaatttttgtatttgtagtagagagagagagagggggtttcatcatgttggccaggctggtctcaaactcctggtctcaagtgatccacccgcctcagcctcccaaagtgctgggattacgagcatgagccgccgcacctggcctgaaattctcaagggtttgacagatgcacagaaacatgtctccactaccacatttgtgatacagaactattccatgagccctaaaattctctccttcagcctggtttgttttttttttttaagagacagggtcttactctgttgcctaagctagattgcagtggcgtgattgtagctcactgtagcctcgacttactgggctcaaccaatcatcctgccttggcctcccaaagtgttggaatcacagtcatgagctaccacgcccagccctgcctggatttcaatggtggttttgagagagtggattgtcagagtgctggggagatactgggaggagcaggatatgtcccagtactggagaacttgagccatgaaggctgcgtggcaagaggacagagcaccaagggttccagggtaaggctggaggagatctctctatgccactaggcaaatgggataggaattacccaaaatagaagggacagaccaagctcactgtggaggatcggcttggcaaagccagcatgaaggtacaggcaagatttgaaggaatgaagctgtgggagacctcttgactggtgactatgattttttaagttaacctcagaaagaaaaggggggatggagtttagaagagggagagattagtaacatctgcaggccacagccttaggccaggcagggttgctcaagcctttaatcccagcacttgggaggggaggctggaggatcactcgaggccagtttgagaccagtctgggtgagagcaagaccccatttctacagcaaataagaattagctgagtgtggcggtgcttgtaaggatcacttgagcccagaagttcgaggctgcagtgagctatgatcatggcactgcactccagcctggacagcagagccaggtc

SEQ ID NO: 90001 - DNA, 1036 bp, Homo sapiens
tgtaatcccggctactcgggaggctgaggcaggagaattgcttgaacccaggaggcggaggttgcagtgagccgagatcacactgctgtactccagcctgggtgacagagcaagactccgtctcggaaaaaataaataaataaaataaaagactattattgcctttgaagggagatgtattttatagggcataagtgaaagacattgttaaaataactaaagctaattctgtttgaaaatcaaactgttgagggaaagggaagctaaaatgagatcgttctattttatcttttaaaagagaggactgagatttatttttgtaatgtttttaagcaaaagaatctatttttaagacagtagtacttaggaattggggtggaaagcgaagaaaactttcagacataaacattcctctttgtattcagtataactgagaaatgaagtgggagttatacatttttttcccctccaagtggaatggaacacttgctcttgccttccagaatgtgggaagggaaagggtaataggacaatgtgattgtgggtatgaaaaacattcctataaaccaaaaaagaagtgtgaagttacagagtggtatccattccattagttatacaaccccagagaggggagtccaggcaccacagtgatctcgggtttcagacgacacgatgcgctttcggttggccactgcactcagaaatgcccattatgcattttcagcttctagtcggccttcctgcaggtgaactaggatgactgactcactttttaaaactaccatcagttcactctgacctcttaccacgtcccactgcttcacgctggactcccccacgtcccccatgagaagagtataaaccttaggtggagtagagggatggggacagggtgaggctggatcactgtggagaaagagttgcttctcaaccccttgaggggtttgcaggcatgggagttcctctctggggccttctagatcctaactctgctttagctgggcaggtaggaaaagatggggtgatgtggaggtca

SEQ ID NO: 90002 - DNA, 2395 bp, Homo sapiens
taagagagaaacagaagccagttctataaacctgagtgtttatgaaccttttaaagtcagaaaagcagaggataaattgaaggaaagctctgacaaggtgctggaaaacagagtcctagatgggaagctgagctccgagaagaatgacaccagcctccccagcgttgcgccatcaaagacaaagtcgtcctccaagctctcgtcctgcatcgctgccatcgcggctctcagcgctaaaaaggcggcttcagactcctgcaaagaaccagtggccaattcgagggaatcctccccgttaccaaaagaagtaaatgacagtccgagagccgctgacaagtctcctgaatcccagaatctcatcgacgggaccaaaaaaccatccctgaagcaaccggatagtcccagaagcatctcaagtgagaacagcagcaaaggatccccgtcctctcccgcagggtccacaccagcaatccccaaagtccgcataaaaaccattaagacatcttctggggaaatcaagagaacagtgaccagggtattgccagaagtggatcttgactctggaaagaaaccttccgagcagacagcgtccgtgatggcctctgtgacatcccttctgtcgtctccagcatcagccgccgtcctttcctctccccccagggcgcctctccagtctgcggtcgtgaccaatgcagtttcccctgcagagctcacccccaaacaggtcacaatcaagcctgtggctactgctttcctcccagtgtctgctgtgaagacggcaggatcccaagtcattaatttgaagctcgctaacaacaccacggtgaaagccacggtcatatctgctgcctctgtccagagtgccagcagcgccatcattaaagctgccaacgccatccagcagcaaactgtcgtggtgccggcatccagcctggccaatgccaaactcgtgccaaagactgtgcaccttgccaaccttaaccttttgcctcagggtgcccaggccacctctgaactccgccaagtgctaaccaaacctcagcaacaaataaagcaggcaataatcaatgcagcagcctcgcaaccccccaaaaaggtgtctcgagtccaggtggtgtcgtccttgcagagttctgtggtggaagctttcaacaaggtgctgagcagtgtcaatccagtccctgtttacatcccaaacctcagtcctcccgccaatgcagggatcacgttaccgacgcgtgggtacaagtgcttggagtgtggggactcctttgcacttgaaaagagtctgacccagcactacgacagacggagcgtgcgcatcgaagtaacgtgcaaccattgtacaaagaacctcgttttttacaacaaatgcagcctcctttcccatgcccgtgggcataaggagaaaggggtggtaatgcaatgctcccacttaattttaaagccagtcccagcagatcaaatgatagtttctccgtcaagcaatacttccacttcaacttccactcttcagagccctgtgggagctggcacacacactgtcacaaaaattcagtctggcataactgggacagtcatatcggctccttcaagcactcccatcaccccagccatgcccctagatgaagacccctccaaactgtgtagacatagtctaaaatgtttggagtgtaatgaagtcttccaggacgagacatcactggctacacatttccagcaggctgcagatacgagtggacaagtagagtatcatttaaatttttgtgtttcagtgatgagtctgtaggcatgagtgcttgataagatgcccttgattttagggtgggaatgcagtgaaatggacgtgtgtgtgtgtgtgtgtgtgtgtgtgtgtgtgtgtgtgtgtgtgtgtgtgtgtgtttggggaggggagggggaatgcctgtgcagccgggcacatgatccagtaaggattgttttcatagaatagaaacaattagctggggatgtggtggtggcagtggtgttggaggtggtagcaggagtggtagtggcagtggtggttgtggttgtggcagcagtggcgtgtgcctgttgcgccagctatattcgggaggctgaggtgggaagattgcttgagcccaggagtttgaagctgcagtgagctgtgattgagccactgcactgtagcctagcattggggcgagatcatatctctttaaaaaaaaaagaacagaaacaatgttgaaacatgaatcttattttagtaaaacgagttttttgaggggaggataatatatatatactagttgagttgtggaactttagattttggtaatcgtttggtcattggaatgtatattgaaagtctgagatttagcggattatagtgtcatcccattgtattaagtat

SEQ ID NO: 90003 - DNA, 1475 bp, Homo sapiens
actgggcacagtggcttatgcctgtaatcccagcactttaggaggccgagacaggtgaattgcctgagctcaggagttcgagaccagcctgggcaacatggtgaaacctcatctctaacaaaaataccaaacattagccgggcttggtggtgcatgctgttggtcccagctacttgggaggctgaggtgggaagatcagttgagcctgagaggtggaggttgcagtgagctgagatcataccacggcactccagcctcaggtgacagagcaagaccctgtctccaaaaaaaaaaaggaaaaaacttgtgaaattcaaagggagcactagtttgagctaatatactctgctcctcaaacatctctataaagatttaacagtaaactgggctttcctttttttctccctccaatattttgttaattaattaggatgtttatgccgcaattcagaagtttggtgctatcttggtgattagttcctcagggtaattactggtttaagttctttgtagcattttcagtttggggaacaaaagatcaagaataccccggtaatttttttatctggtttttcagttcagtggaaatggaagcaataaagagttttgacagcattcttgcaggtttgaatgttaaatgtttcattggctctggcagtaaaatgctcaaaaaataggaaagcagcaacttagttcaagaaggctatgatggctccagctgttaacctagcccggtgacaatgcctgggttctgtctacatggatgtcctcccatcttgacaccgcttcatcaaaggataatatttcttttcatcctaacaggatgcagtaaaaaaggggaaaaagccaaaaagctctttcttcatttctgttgtcttcgtgtctgtgtctgctggtgggctgtgtagagcggtcgactgtgtcctggcttaggagggttctcactatgagctgtgtgctctgtatctggcctttggagctaccctcagatgtgtctgtctgagacctccttctctgagagcaaggaagggcatgagcaggcgggtaggaatgtccttattccctgcgtttccctagtttttgttctttattaaccttttaggctcaacagccaaactagggtgaaacgggtgaaactctgtccccaggaggagagatgaacatcttttcttttgtgtgtggttgctttggcatcacttttgtatcttgctgggacgagtacgcaggtcacccgtttgacgcggaatcccaaggagtgaatcagggcagaatgtatatttaactctcagaccagatacacacaagcaaaacactcacctcctgatctgtttccgttttgcagccatccactcacctatgtaggccactcagctcaccagcgaagggcgttggtttgtagtgagcttcaacccactgcatagccaagcactgcaggaccagcagtgtgaaaaggccccatagcacgctctcctcct

SEQ ID NO: 90004 - DNA, 1010 bp, Homo sapiens
ggttcaagtgattcccctgcctcagcctccagagcagctgggattacaggcacacatcaccgcatccagctaatttttgtatttttagtagagacggggtttcaccatgttggccgggctggtcttgaactcctaacctcaagtgatccacccgccttggcctcccaaagtgctgggattataggtgtgatccacccccgcccggctagcattccatgtattttaacactttaactccatttccccattgacctccacattcttggtagctcatgggtgaattggaagagtataccagtctacactgtaacttttttctggtgctcacaccctgacctgtgctttctggggtaggaacccagtgcagtttaagcctgtgcctgtggctctggggcaggatgccctgggtctgcacattagtgtctagttagtctagtctcatcacccgaagtggattcctgaaccaaccttgctgccactgttcatggttcagaaggtgtaaagggtatggcctctggggtccttgctagactggcaggtccatcgccctttactcagtgcctttcagctccttggtttactgggtctggagaaaggtatgacttcattagcggagggacctccttccctttttcttttgagataattgtagattcatgtaacaaataatacagagagaacttgtatacccttcatccagttccccacaatggtaacatctcacaaaactatagaacagtatcacagctgggacatgagcgttgactcagtcaagatacagagcttttccagcactacaaagatctcatattgctcatttatagccacccacagcctctcctcactccttaacccctggcaaccactaagctgtttttcatttctataattttttcatttcaggaatgttacatagatggaatcatatagtgtataactccttaggattggctttttttcactcagcataattccctggttgttgcgtatatcaatagtatattcctttt

SEQ ID NO: 90005 - DNA, 3808 bp, Homo sapiens
tccatgttggtcaggctggtctcgaactcctgagctcaggtgatccgcctgcctcagcctcccaaagtgctgggattataggcgtgagccactgtacccggccttgtagttttcatcatataagtcctgtgcatgttttgttagatttcttttttcaaacaatcataagtggtatatatttttggtgaggacacgttcatcactaataatttttatatattttttgtgtatcctttgactctgttgaactcagttattggtttcagggcttttttttggatagattatactgatttttcagatatcaaaatagccttgcatttctggaatgaatcccacttggtcaagctgcatatttctttttatatgttttgaattataattgctgctattttgttaaggagttttgcatctatatgcatgtagatatccttttttgttctgttcttgtttggtttgagataggttgatactcactttttaaagaattgagaagtattccctccttcaatttttctggaagagagtgtgtataattggtgttagtttttctttggtagaattctccaatgaaaccatctgggcctagagatttcttttctagggtttaaaaaaatacctgttgggctggtggtgggggaattggcagagatcaaaatttacctttgctactgggcttctctgacacccaccatctgggtagggacgttgggacagacagctcattacagtctcaagagggctgaagtcttggctgcacctctactttgcacaggttggggtggggccgtagtgttttctgtgggatttggctggagtagacagtgttcctttaaaagttttctgttttcctaggcactcgtttcttggtggtcggctacagagcacaggcttttcttgggaatttttttttgtctctacccattggcattttgggttgctagcttcttcagctccaaatctgggatatatgaggcgaagagaaacccagggaactgactaccctgtcattcctagggtcttgagatccctagctaacctttcactccacctttcagagtccttttatgtttgttttatatataatgttcagggttttgacttgtacttaatgggaagaatagggaaagttactcttattccattttcctcaaagtggacgttttactccatgtttaaaaaagatcctaatatacctgtcctgtcttcaaggagagattgtgtaattgcattattgtgctctgccggagactttcagaccccaatctctgtttttgcaattaggcttcctgggagggtcactttccatttgacttcctgggatttctgttgtctctgaatggaagacattttctccacccagtgtaaacttcctttcttagccccgtctttaaaagcagttaggagtgagaattgcgtcttttacctttcacatctggtgggctgagcctcttttaagaccttaagaacgtacttttcttgatttagctcagtcactatccccttttttatctttctttttatattttatttttcccttgttatcattttctattttgacctctgtttatgttttgaacagagcctgtctcagtttccccagggtgcttctctgcacccagcagagggtctgtctgcctgtgagcaccagctggggctgttcctcccacgcctctcaccacctccccttacgcatgcctttagccttctgagactgccagtatgccatgggttaaaggaaggtttgggtggcatttggtgcattctctctgccagttgctgctgcccctccaagtgttctgtagacaatctatgcagaagtaacaattgccagagagactcagaagcaccacttccttatgaactggtctatgctcagtgacccccaagagcaggtctctggtaagagctgtgttggaatatatggttttagctcgaggctctctgccatacattcccaaagctgtcttgggatttgatcacactctggtacacgatctgggccaggaaccgaaagcctgctaggctgaggttagactgcctgcgtgcatctgcttaccccttggaggagacagtggcagagggagagagcctagaggactgaggaccttgtggggatcactaccttccagggagcatggaatcaagcagtaaataaaaacagttctgagcagttgactctttagccattaaatctgccccagttaggggtttgtattctgatctatctgcttaataatctctgctttgggttacgttgagaaaagggagtgggcaagagaccagaggagctttccttttctccatgaagtatttaagagctgaggactgtcgtttgaataattgatattttaatgtgttgggatgtcattgcttcacctcctcttaaaaccatgtctaaatttaaccaactacagactggaaatgctttctgtaaccccttaattttaaaaacctgttttcttcttgtggcatttatatcagctgtagaatcacagaatgctataggtcttttggccagcccttttattttacaattgaaaaaacaaatgcccaattggtggcagagctgggactcaaggcaaaatttctgtattgctggttcattctttctgcttctctaagatgttgaagcataggctcttacagccggagggaccttaggaatcacataaggatggattcttggggttacttccgagtcaccttcaagagtgtggataaaggtgacatttgcagtggtcctcatttttggggattgctggttcactttagtttcaggaactttctgggcatcgttaatacaacatactaactgtattctcgtgagcagcctctgctggttctcatttctagatcccgctctgctcagacagcttcctctggaaaccagggagctcatctgaattcctcccctccgccgtctcccaaaatacccttattagctgaagacttgtgacccttggcttttggtcctgctcttctaagtgtttaatttaaattttggtcaagactagtcctgtcctagtttatattttagtgttaccaaccttcagtttacccgtattcttcagtaataagcatgtaagtagatgatatgtgttggccatatagctttctgtaaatttgttcatttaactgtcaactcttattagggatttttttgcgtagcagaatgatttgaggacaaaaccagcacaaccaactagctctgtgagcaaaaggcatataaagccatttctgctgtatttgcttggtatgacttccatttaagtgagatctgaaatgaaatgctttctttgtgttctcagtgtgaaattggacaaaagtgaaagccacaaaacaaactggtatactttattatttttgtataattatactttaggcagaagattgtggaacttcttttaatgaggtgagagtaatttgcttagcatctgggctgactgttaagctggtattgtttctgcctttagctccaatgtttcatgttggtgtaggcttttggtctgtttgaaatttaaacataaatatacagccatacgtttctctagcctctctcactctcatgtacctctcccaggctacttttctgcctaaaatatgagcaaaaacacgtagaattatttttcttattactcagctaattcctcatctatagaaagaggatgtcaagcttgaacactctctgattccttaactggccagaatgtacctggttcccccttccctgtagcctgcatttgcatgctattgatcaatttcagtgacaggattggatagaaaaggctcagtaagagtaccgggc

SEQ ID NO: 90006 - DNA, 2763 bp, Homo sapiens
tgggtacttttcggctttattttcctatagctttctagtattacctattgaaaagtaatgtttactttaaaaagtaacagtttaaccgagcaaataaggctgccctagaatagaaattaactttattacctaagtaccgaaaacatttatccatttttagatgacataagtaaaatgtcaagacacacataaaaccacttaggtgccctttattatgcttttttctattgaaaaggcagttactgtcacattaaactgctttatcctctactaagtagcttcagcttgtgtagtagagtgttagaattttaagatatattttaatttacttgattaaaaaaagtaaggaaagtcagtcattacaggccacaaagagatccttgtgtgccctcatgctcaaatacatcccccaaacccagaggatgttcattattttcatgaattcaaagcattagaaaagctaatggaagatactcctttgtgctgtgaaaatgcatcaccactatcatgggaaacaggggatgacaagttttctgtaacaggaacagtgaatacaacttgagggagtacagctaagcaaatgatgtcatgtgagtttaaaactattgataccatgcaagcatcaaggaggaggatgtctccaaccaaaacagcgtgttttttttctcagaatggaatggagccagcacggtggctcacacctgtagtcccagcactttgagaggccaaggcaggaggatggcttgaggccaggagtttgagagcagccttgacaatatggtgagaccctgtctgtacaaaaaaaaaaaagaacattggctgagtgtggtggcgtgtgcctgtggtctcagttattggggaggctgaggagtgaggattgcttgaggccaggaggtggagtctgcagtgagctgtgatcacgccactgtactccagcctgggcaacaaagtgagacactatctcaaaacaacaacaataataaaaaacccaaaccaaatggagtcaaggagtagaggaggcaggtgaataaagatagaaatgtgggagtaactaagtgtctgtacgtggatatgcatgcatctacagaaactaaaggcaaggtctctagtgtccagcgtgattccccagtgaccattttctcccacttcaggaattgcaaagtatgaaagcattttgatttgaggctgtagtccctatgcctccctctttctccttgtgcttctgtatcgaaagtgggtgaggagcctcagctgatgggaacgagtgagtgcagagtcctacagttggggtggggagacatgatgatgatacattccaatgaatttaagtaattccttgtgcatcttatatgtattgtgaaggataaccatttgtagtatatcttgatgaaaatgtgcaaatttttttcaggaacactgtctgctttttagattttctttccattttctaccgttctaaagtagtgcaatcacattactttagataaaagagaagcagcaggggaggggactcacctctactctgacatgccgtggtcattgttggcattcaggtatatttgctaatggttttccctgtgtgtttttgtttattcattcattatatccccaccccactcctcgattccagttcaaatcctggttcttccacttaataggtatggagccttgggcgagtttcttaactttactgagccttcgtttccttatctgtaaagtggagatgttatctgcttcataggttatgagaattaaatgagatgatgtacttcaatttacttaatgtatttaaaatacctagcttaccatttgactcatggtaggatgggaccaatctatatattttaatataatatgtatatacacacacatgcatgtacgtgtgtatgtatatatgtatgtatgtatataaatgtgtgtgtgtatatatatatataaatgttttttgacttcttttagtatagaaaatgctaactttattcccaagtaagtgcaagacattttaagatgcctgtggaagttcagacatcataattccctgcctgggactgtgtgaaggtagatagaagactttagttcacagaaacaaatggttacctgtggtaatgtagatgttaacaggatctgttattaatgaatctgttgactggttttccttgctgtggcttgttctaacctttgaaatatgtgttatgagaaaaggggtgctatttttttaatgatgctaacttcattaaagctacctgtaatgttcttattttgtgattataataaacattttttgggataaaatttgtattttagtcctttcaggagaaaatcaagaaagaattttcaagtgagtttcctatttttcttagtctaagtcactcggaagtttaaaccttaatttttgggcgtgcttcaaaaacaagaagaataaaaaaagtctttttaaaatttcttaactgttgtcaatataaacaaatgctttaaatcttagcaagaatctatattttgagactttctttggctttaatacaaattgtacattttagaagatggtagataatttgtgtttgcacgaatgtctgaaagtatttaaacacagtttatgtcatatgctatgtgaggtttatttttggggtggaagtaataagtcctcagtttatgtttactttaagtttttttggttttgtgtttttaaaaatataccatgtttagtgcctatatcttaagaggatgaaaaacagtgttttgggttttcctggatagttactgata

SEQ ID NO: 90007 - DNA, 3981 bp, Homo sapiens
tgtcaagatgtgtatgcctataaacttgttactatatattaaagtcttttgctcacataaatttgtaagaatacctctttgccctaagcaaaatgcaaaagtaatggaattggaactctgctgaaacaggtgtttttagctcatactttgagacgagcctgactagatagcacatactgtgattttacaggatagagaattgtacgctggacatgtaactttcaagttggcttttcccttgggcttagaatcaattactgtagtgtttgaaatgaaggatgtataattatctggaggtttaaccaaggttctttgcatattagaaagtacttagtaggaccaaccctgtttccccctttggtttgtttagaagacttgcactatctgccagatgctgcttcctaaccagtgcagttatgcatcacaccagagaatccatcagcacaaatctccctacacctgccctgagtgtggggccatctgcaggtcggtgcacttccagacccacgtcaccaagaactgtctgcactacacgaggagagttggttttcggtcagtatatcattcacttatgtgcaagtaaaactcgttcacttacaaccgcacagcattttgagtggtttgcacacacagttttctgggtcatacggtgatacctcgattaacagatcctctgggaacctagctcgtttgtagagtccatctgtttgaatcctcttaatgtaatattggccctgctggtccgcacaaagtggagggtcatggggcctgtccttttaggcacactcttgcatgtgtgcaggtgtggctttgactgtcagctttgactgtaccctttgtagcagacttttgttatcatactctttgcattttaacccctgcaagaaaactatacattccgcacctcttaatatttccccttctctaatgaaaacagaaatagtgcgatggtcttttacttttatttggtccacattgaaagatggggtgtatgttccagccttgcactccaaataaccttctcctcctccccactcctcctcctccccactcctcctcctccccactcctcctcctccccactcctcctcctccccactcctcctcctccccactcctcctcctcccctctcctcctcctcccctctccttctcctcccctctccttctctccctcctccctttctcctcctccctctccccctcccttctctccccttctccttccctctccctcctcccccttactcctcctcccttcctcctccctctccctcctctcccctctccctcctctccctctccctcctctcccctctccctcctctcccctctccctcctcccccctctccctcctcccccactcctcctccctctccccttctccctcctccccatttcctccttctcccttctcccccctcttccccccttcctcctcctccctctcccccttcgagttctctcattcctcccttgtctcttctgcatatcttcactgtagtcccttttactgtccctcaggattctcagatgtgcattgtacaacatctggcaaatctaatgttagctagtgttgaatgattatatatatgaacttttctctccatcttatgaccttcctgtgccttttatattttcactaagaagattccaccaaggaaaacatgtcactgatacacagtgtctttgttaatagaggtattactgtattatatgtttatcttaacattaagtatttgcttacctggtaactttgttagattgttaatatgcagtgattttttttttcacctgtaataaattatgttgaataaaaatgaagtccagttggcatgatttgatggttttatttaagtttaggttctggtatcatcagttcctaggtggttctgcccagttttgcattaaacaacactaagctatgagacttaacttcacattttatctcatgcctccaaacttgtaatgcacaaatgttttatggattgagatctagcctggtggaaacctttggcttggaaatcaagaaaccagttttcttgtacgacttctgccagtaactaattatgtggtaattcacgtattctttctgtgccatggtgcctctgtcagtaaaattggtgcattgtctgcctccagctccactgggatgttactgagcaaaacaggataatcaaaggtgccccagatctgcaaagtccatgcagaataatactttcgttcttgccatcacgttttgaaactattattaatggattatgtgtttaataatagaaagcagctctgcagcacttcccaagtgctcttctttgcactaatgtcaaatttttctcaaatgtttagtttttctaatagaatgaaagttgatatgattaaaggaaatatgacttcttcaattttagctattgctgatatctttcctaaattaaaacagaagctccacatgcaggctgaaagtaatcaactcacttgggaaaagaccatccttgctcttctgttcttttgccctactcacagagttgttcaaattcggtatttcaaattgtagatttcaagttgttaaccaaaaattttgtgttaagtgtagatttttttctccctggacttgaggctatatggggctggtaaacaacgatgtgttgtgaagtttagttcatgttgactgctcctttagaagagaggagcaattttaaacgtaattcttttcctctgctgcttcatatgagggtccaggttcatgtttaagtggggcttagtagccccgtggccttgtcatgttttttgctccctttggctctatagttactcattttcaatgtgtcttttctttagccagatgagtctaatgtagcagcatggttcccacgccttactttgtctcgtcttggtgcagtgtgccttgctgtctctcctcttgctcatattacatctcccaaatactgatgggtcatccctggctcctggttaacttggtaaaagttatatattgataaaagtcaaatattttttctgaattttcctgcctcttgatacactggactgtatatctagaaaggggaatggttataggattttatactgtaaatattttttttaattcaaaaaataaagaaactttattgctatccagaataggacttcaggatattacgtatttcttagtagacaggatttttcatagcattaagatactgcatgagccgtttgaagtctgcctttctttgtcttatttacatcccccattggcctctgttgccccctgaaatgcctcttcttcctgtaagcagatgttttatgactttttaaaataccctgctttcgtttcttacattaaggagggtttcccttggtctccatggtgttctctggattgagtcatagccacttcctcttgcttcaaaaaattccatctttattttagatacttcctttttatttgctgtacattaaaccttcctctcactccaagtgactttaggtaattattgcttttctctgtattcctttttgtccttcctggttcttttgctctttaaacaccatctttctatccttcatgggaaaatcttctgtttatagtttatggtgtggtaggtccttcagtttcattaattacccatctacttttgttttacataatcttcctctttcatgggagttgtaggcttctaggtttgggaagagctaaaaatgatctattttaattcttctcattttacaaatgagtaactggcccagagaggagcattaacctgttcaagacaactcagtaagttaacccaaaatagtttcaatatgcttaggtggctctattgcctgaaataccagttcaagtagataggctagagaggctgtccttttattctctattgttatttagtgtttaaacatagctgttgctgaacataatgccttcagtcactggaaatgctaatgcgttagttatgattttaacagaatgcttgcaaagcttaaat

SEQ ID NO: 90008 - DNA, 1971 bp, Homo sapiens
cctgtgtaacttcggaagcatctccatgattcagaagggaggttctaagaatagaagcatcttagattgtcatagaagtctttggacactgccccccggaaaccaggccctgtctgcagtcttccttccctgggtagctcacatctgggagcacatatgttcagttgtattagaggtaaatttctggagacttttgtacctgcagagagaccactcttaaatagttttcaggtgtgaacaaggaagacttggtcatcaagtggaggtgtaagtgttgcttagagtctttgtgtgaaaaagatgagatagaggagaaatgtatcttagatttaaagtttgtctttgttggattatatttgagcagggaatgagctaattgtgagattactagaaattcataaagtaaggaggttagctagacaattttttttagagatgctgaattttcagaggtttgtaattcatgcaatttcttaaacaaatgcaagtgtacttaaatttattttctaggagacaaaacacctaggtggttgaccttctctatcctgtggaccaccatgaaccccacatacattgaccacatcagtgtgtaccaggaaacagtgggccgaggccttggagccagaacttctttgttcctctctgcccctctgttcttggcatgcaggtttagacactgaagatttcttccattagaaatgctatttgggtcctggagatgggtaggaaactcagggccctggtgccagaatccagcatatgtaacctctccaaaaacagtggtctggagatttgacatccattcttaaaaatgttaaagatgctccaaaaatagaccatttgagttttatttttcttcttcatgatcttttctcttaaacatataaaaataggctgggcatggtggtttacacctataatcccagcattttgggaagctgaggtgggcgaatcacttgaggctaggagtttgagaccagcttggccaacatggcgaaaccccatctctactaaaaatacaaaaagtaattgggcatggtggtacacacctgtaatcccagctacttgggaggctgaggcacgagaattgcttgaacctgggaggtggaggttgcaatgagccgggatcacaccactgcactccagcctgggcgacagagcgagacgttgtctcaaaaaaaaaaaaaaaaaaaaaaaaaaaaacccataaacaattaagttgatttataataggaaaaaaactaaaatatacttccgaagggccattaaaaacctaaaagggctatgaaagtgtgttcatctcacccagtttttgcagttacacgtgtgttatggtcttgtgctaatgaccgtgtgtttatttttctaacagatgtgtgcattgcaatgttgtgtactctgatgtggctgctctgaagtctcacattcaaggttctcactgtgaagtcttctacaagtgtcctatttgtccaatggcgtttaagtctgccccaagcacacattcccacgcctacacacagcatcctggcatcaagataggagaaccaaagtaagtcataccgactttcaagttttactccactgctttattagcaatttagaagcaaggtagtagtcgttctattgaataacatttaccaagatctgaaaaattatgcagctatgccaattttgatgctttatgaaatacagctcatagctcatccaaatctttctgttctttccaggtaaagaccttgtccaaaaacgttacctattatttatgctcttgtcacgaatttttgctcaacaagtaaatatttatatttttttcttaagatgaatttttttttttttttgagacaagagtctcgctctgtcgcccaggctagagtgcagtggtgcgatcttggctcactgcaacctccgtctcctgggttcaagcgattctcctgcttcagcctcctgagtagctgggactacaggtgcatg

SEQ ID NO: 90009 - DNA, 1027 bp, Homo sapiens
cttcgctccctccttgtgcacacagcactggattaatgctcctggttgtgctccttttattcctggattagttatcgcaacatagagtttgatcattacaagaagctagatttgctgtccaaatctgttgctgtgtttttgcccataactccataattaaggaagtattagggggaagatacacagctatgccatattttacacacacacacacacacacacacacacacacacactctttctctctctctctctctctctctctctcctggcttttgttgaaacatttagttttggggaaatgtgattgaatactacagaagtgactgttttatcaaaaaaaaaaacatgttgaagttaaattttattttagtaggaccttcattctgatctttgtaggttgatcccaaaatgaaacacattacaaattaaggaatccatacatgtcttgatgtcttgactctgaagatggggattagtgaattttagtgtcttcagttttcaggactgttagacttgtgggtactaatgtagcctttccccctgggatgaatacagtttttatttggttctttattaaaataaataaaatttgattgtcagaaatgtgtgtgacatctggaacagtagttgttacctcagaatgtaaggaagcaaatgattaaaataggctaaaacagttttcttcaaatttgggtattgtatagaaaacaattattccagtggtttcttttctctctctctcttttttttttttttttttttatgagacagagtctcattctgatccaaactggagtgtgatcacacctcactgcagccttgacctcctgggctcaggtgatcctcctgcctcagcctttctagtagctgggaccacaggtgcacacgcataccaccacgcctggctgatttttaagttttctgtaaagatgggattttgccgtgttgccaaggcttgtcttgaattcttgggctcaagcagtcctctcaaagtgctgggattgcaggtgcgagccactgcacc

SEQ ID NO: 90010 - DNA, 2377 bp, Homo sapiens
ccaggctggcgtacagtggcgtgatctcagctcactgcaacctctgcctcctgggcccaagcgattcttgtgcctcagccacctgtagctcccacacccagctaattttttgtatttttagtagagatagggtttcgccctgttgcccaagctagtctcaaacccctgagctcaggcaatccacctgcctcagcttcccaaagtgctgggattacaggcatgagccaccatgctggcctagttttctatttaaccacttatttatactcttggacatttgggccgttcacaacactaagcagtttcaaacagggaggaagtgaacatctttgtcacacctgctacggttaatgatgacaaatgattagtatacaacattgtgctgcattgtacggccccgaaaaccttgtctgcttctcaacaccccctcccccaagggtacttgtgctctgcagtaaagtaactaacatctcaagaccttgtaaaaacaggccaatccagttaaacttataaatcttacggggaaaaagagaaaaaagttacatctgtaactttggacagagaattgcacagtgaggtttgaagctacatgggaagtcctctctcagggccctgagagagggaaggcaggtggttttaggaggcattccgttcttcaactttgccgtaggaatgccaggtaaaacctcaacttctctcttttcatttctgaccctcacatccagtcagcttttctctgaccttttcctaagcggctccttagaattctttgtgcccattctcacagttctccagaggaaatacagatgcccataggccctctcctatgtgccagggtgacccagagcagtgactaaaaaatggtgacctgctgccatcagagctgttctcaaatgaccgaacacacatccattggaggcagaggccggcagcagggtagacgcagccctttaccctctcaagacatctcgtgccctcgtttcagtagagagtgtggatgggcaggagggattatgttcagaaggttcaggtctgctgaattcatttgaggaggctgcttgttagtaacatattagtcatggaaatagtttgtaggagacaagtgaatattttaagtcatttaaagcgtaagaaacattcaagcattgttgaaataacagtggtatcgattttattttctgtttcttgattttactgtatatttgtttactggtgtagggcttcctgtgttaagaacaggtatagaaatattgacattcaaatgtaaaattgctactgactctaaatgaaaactttggagttgagtaggcctatttagtttattaatcagattaacattcttttccaagttagggtatcatcattgccttgtctgatcttaaaaaaaaaaatctttaaaaaaaaaggatgcttttgctctgtgttaaagtaacatgaagactttgtacaaacatgtgccagttatagatttgtgaatagtaaaatggtcattaatttagatttctaagtaaatgtagctgaatgcatctttactgaaaatgttaaggttgatctatggttgagtaatgccagttgtcttcaaaagtttgtttcagagctaatcgttgttctatttattgtgtttgtgtgttctcaatgtgcctctgcctcccaagttcttcagctataaagtagcagatcctttgacttaaagaggctgactgacatgatctcgctgcactcttctattttagaataatatataagtgttccatgtgcgacactgtgttcaccctgcaaaccttgctgtatcgccactttgaccaacacattgaaaaccagaaggtgtctgttttcaagtgtccagactgttctcttttatatgcacagaagcaacttatgatggaccatatcaaggtgtgtgtgcatctatcctctactttaaatgaattgcagatccattcattggtcataaatcaaggctgagctgcaggtgactctaaagcatgcctcactgtcgagggaagggatggatgctggtcgttgtcagtgagcaacttacatgctgtcatcatgtgttcacttgactgtggtgcttttcattcaggagtcctgatctgcctactaaagattagtgaaaaggaaccaatgtctgccctgattttaaaagagtaaaaaagtactaagttttttgttttttgttttttttaatatgtgaaaatgatgactgtgaagttttcctttcctttccttttttttttttttttctttttgagacagagtctccctctgtctcccaggctagaatgcagtggcacgatctcagctcactgcaacctccgcctcccaggttcaagtgattctcctgcctcagcctcccgagtagctgggattacag

SEQ ID NO: 90011 - DNA, 1075 bp, Homo sapiens
agtaaaccaaggttaaagacatttgaatttacctctatccttgtgccagctaaggaagaaaggagcagagaaagacagtggaaatgttgaacattgccagtagcatttgtgtgacttacatgattcttccttgagtttggtagtgggaagaggaaccacatcctttaacttccagtagaagctctgtaactccaagtcactgaaaaatctgagtcacatatgtatatcctttctcttttaaatagtaagtatatgtctccaactgataaggaatttaaaaaatacttattagacctaataatattagcaaaattatttttcagtattatctaatactgtattaaatacaatattaggctgtattcacatttcctgattgtctcaaagttggtttgttatggtcaggacccaaaaagtccatatattacatttggttgttgtgtaattctttattttacgtagtcctcctttcattttattttttaatgtatggttgatttcttagaaaaattggattgtttgtcctatatataggttgtccctcactttactagatttaggtaattgatacttttttttttttaacttgttgacactaggaaccaacatggaatttgctactttttttttttttttttttgagaaagagtctcactctgttgtccaggctgaaatgcagtggcatgatctcggcttgctgcaatctctacctcctgggttcaagcaattctcatgcgtcagtctcccaagtagctgggattacagatgtgcaccaccacgctcagctaatttttaaatatttttagtaaagatgggattttaccaggttggccaggctggtctcgaactcctggcctcaggcagtccacccactttggcctcccaaagtgctggattacaggcgtgagccactgtgcccagctggaatttgatactttttgacaccgtttaacttgttcctctttatctcatattcctggaatattgattagatttgaattttttaggtaagccttgtcagctgggcatggtggctcatgcctataatcccagcacattgggaggcggaggcagg

SEQ ID NO: 90012 - DNA, 1394 bp, Homo sapiens
cccatttaccctgggcttgccaccttatcactgaacccagttctctggtgacccctttgttgttaagtcgttggatgtgttcctgtctttacctccactcaccccacagcggtgtttcacatgattagcagttctttctaaaagcattttctacccttattgtggaataccactctctcctgggttctctcaccattaccggaacacccatcaggtttctgtcctagaaacatttaactttctcttgggaaaattcaaccactcttataactttgcttctcgtgtacagtatatatacagatagcacccaaatctgtgtctccagttagttgaaaagtatttcttgaattaatagaccaagaatgagttctgatttggaagacatctaactcctcttagacttaacctcctcttctttaaaatgggtacatatttagtgatcttccagtgtcctgtgttgtaaatacctagagaactgtatatgaagtgataagtattctctaattcctatgggtttaagatgagatatcaatatgaaatacgctatacacatataagggttcaaaaattgtatttggctaaaggtctcaggagagaatacagtttaacttccaccagcccagaagtcattggaaagatccaaatttattggattacccaatgaaatattatgcattaggataaatatgtcagcgttctgaaccagtgaactttgtatacttgattttagtatcataattatgacttaaaatacatatatatatatatatatatatatatatagaaataaaataacttggggaataatctaaacgtattctgccaaccacagtacagtcattaccttagtgttactgcttctagtatgattattattttgataagatttggagtaaatatttcaggttaggagtaaatttaactggcataagttaaaaatttatgtcaaaacattagaattcactgctactcattttagatggccattttggtttcattaattgtttttgacctttcttccccttctcagttcccatccagaagaactttactaaaaagaaatattctgtatacagttcaatttattgagtaaagatattcagtagctttgtttttaagattcagaactggccgggcatggtggctcatgcctgtaatcccagcactttgggaggccaatgcaggtggatcacttgaggtcaggagttcgagaccccccctggccaacatgacgaaaccccatctctactaaaagtacaaaaatgagctgggcatagtggcaggtgccttgtaatcccagctatttgggaggctgaggcacgagaattgcttaaatccaggaggcggaggttgcagtgagccaagattgtgccactgcattccagcctaggcaa

SEQ ID NO: 90013 - DNA, 1059 bp, Homo sapiens
gtaaaaaacttaccaatttctctttttaaagttttttctcaaatgcttatgtattatctaatttttattgtgctttctaaagttggtattattgttttgttatggccaaattttagctgtccttgtaaatggtaaagtctttgagggcaagttgtatgtccattttattattacagtcttctatggtttacagcattgtgccttgcagagtatctctggagtccctgattgaagcagttctctttggattgttacttgcacatatgggaaggggctttgtgttagtcacagatacacacaagttgcagtctaggttcaggtacctaactagctttctaaccacagaaatcccaccacctttgtagtctctatattctcaactataaaatcaggaggacgggcgtgtcagtgtcacattaacctgatgatctcatcccagccgtgagcctttcctcagatccatgtacaaatgcacagagttttacatacaattttaggtgggttgtggatctcctgctcttcttttttgttgttctagaaggccttttaggaaccaaactaagatcctttgaatgagataatatctgaggtcattcttagagatcaaacattctgtaattatgtgagccagtattaaaattaaaaagaagttacatgttatatgtacctgttcaaatctagaaaattacaacacaatctgtgataattgtaatcattctctcatttgctgcctggttctcctacacatcaaggaaccttaacttattaattgaaatatcctaaagcagaggcatatgtgctgaattacggaactctggtgccatcaaaatgaaccttagatcttttcagttttttgttttttgtttttttttgtttttttttggtttttttttttgacaaggtctcactctgttgcccaagctaaagtgcagtagggtaatcttggctcactgcaacctccgcctcccaggcttaagcagtcctcccgagtagctaggactacaggtgtgtaccaccacacccagctaatttttgtgtttttatagagacggtgtttca

SEQ ID NO: 90014 - DNA, 1128 bp, Homo sapiens
gccaggatggtctcgatcttctgacctcgtgatctgcccgcctcggcctcccaaagtgctgggattacaggcgtgagccaccgcacccagccggccctggcattcttaaagcttccaggtgattccagtgttgtggcagggctgggaacactcataccacctgggatctgccgcacacctgcccttgctgctgatgctcattgctgtggccctcactgtgtgactgctatagcaccaacacacctttgttgagtttatgttttggggaaggttgatctcaagtgtatttgtttaaagactccacccaacgttcactcttggtggtgaaggcaggggacacaactctctggatgttggatttacagcattagtaagtctgttcaatataatttaaagcctgattataaatgattttaggatgtcttaatgtttctgttcctaaagcctttaagaaaagtccatagatttcatctgcattttccatacagggtgcaggtgataggtgatttgaatacttgctattttgtagcctttcccattctgaaattcactttcagttcactcagagatgtaggtgaaagacagcagtggcagtgaaggaaagtgggagaatgaaaggatcagagtgtggagagatgaccacagccactgaggcaggtgtgctgttgttacttttgaaaagaatggcaaggcaatcagcttgcatttcctagtttgggaccaccatgcttagaatcagattgactgaggagctttacagagactctcacttgcacagtatttaaaagaaaaaaatgtgtgtgtgtgtgtgtgtgtgtgtgtgtgtgtgtgtgtgtgtatgtatataaatttttaaagtgcccacttggccgggtgcagtggctcacgcctgtaatcctaacactttcagaggctgaggcaggaggattgctagagcccagagcttgaggctgcagtgagccgcagtcgtgtcactgcactccagtgtgggcaacagagtgagaccctgtctcaaaaaaaaaaaaaaaaaaaaatttaaaaggtgctcacccacacaacctggaacctagccatgtgtatgaaatgtgtggtagggcataattgccccccttaatctccctgaaactt

SEQ ID NO: 90015 - DNA, 1053 bp, Homo sapiens
cattttcatttcatttaggtgttcaatcttggttaaagttggttatgccatcattaactggacgtgtgtgtagttttggaagactgtgaatgtcctggttttatattccttagctggggtctgatgctttctggaattacttgcagttgctgttaacagcatcatggtgtcgttaattaattgggcaaatcttcctgcagaattatgaaatgttttagagtggcttgaatttagcagttgcctgggatgtatctgggggctgcatggattgtagcagggcctgagccttatgagggacagagcctcttcctgcagtgtctcggaaatctggagaaatgcacaagagagaggccctttcttgactccaggagttatcttaaagcagaggctctcgaggcagagagcacagttagaatcagggtttttttgagtctggttatgggggtttgggatgtggagaagtgggtaggacctgggtaggagtgaagtctatttttaaatttctctagataattgtgttaccttcacacttacatacgttccctcctactctcctaccctctctcttctccttgagtagttctgctgtaaagggattaagctgagagataagctatttagaggattttgctcttaatgctggagagtttataaaagctgcctaacaggaagatgagattggagaataatttcagtttaggagttatatatttttaagaatagctagaaaaaccatgagtttttactttgggaattatctttcatttaaaatgtttatctaaaattacttgccttggtgtttataatttgtttctaaattatattttataactattatgtgttttagcaaacctgtttatttttggatcatgaacaagaatctggaaagccccaagcttgccccagtaccaggcaatttcactgaactgaaacaaagtgaaagatacaaagaaggaaccataaggtttgccctctaaattgaaagaaaatgaaatgacaaacgaccagattccatttctaaaatttactgattatttttccattagggacaga

SEQ ID NO: 90016 - DNA, 1077 bp, Homo sapiens
ggcagcttgttagaaagttaggtagccttccttcagccctttctttttttctctgcccaagtgtctgacattgccctaagctcagaaactacggtgcgacacgtttctttgccatctgctccggatttggccttctgttcttgtgcatttgttactgttctgcgtcattactttttcagttgtacagtgtcatcagcagaccagacagtcttataaccagaaacttcggagacttggttttgtttttgttgttttaaataagcatagtggtaagcacacgttggtttaaccctctttatttcaaagttgtcacctcggtaatctaggcacgtgacagtgatagtgctggttctcagaacctgtttagagcatggcatatgaaaaaaaagcattcttttcactttatagttatgactggctttagattatctacataaatttacataaatttggttctgaatgattgagacttgtctctattttctattgaatgtgaaacagtggtctcaatcagggatcagcaaactgcgtttcatgggcctgccacctgtttttgtaaataatttatgagaacacagccacgcccattcatttaattattatcgtctattcttggttttaaggtacaagggcagagttgagtagttgcaacagaaaccttatggtttctggcctaacatactgtctggccatttagagaaaaagttggtcgactgttttacctatcactttggtagagttgaagactagagctggtgtgggaaactcccttggtgaacgtgctagtggtggtagaatgaatcttttttagggcagtttggcatttaaagaggcttatttttcacaacctttatattggaaagactgccttcaatagtttatacaaaggaaataattgattatggaaatttgtgtctgtagttactaagaagttgagacaacctgaatctttaatagaagataaacaattcatggttcatttgtgcaacagaatacaatacacttgttaagaatgcagaactagctgggcatggtggctcacgcctgtaattccagcactttgggaggctgaggcgg

SEQ ID NO: 90017 - DNA, 1005 bp, Homo sapiens
ttttcccgagacggagtctcactctgttgcccaggctggagtgcagtgatgcaattttggctcactgcaacctctgcctcccaggttcaagtgattctcctacctcaacctcctgagtaactgggattacaggcacatgccaccacacccagctaatttttgtatttttagtagagacggggtttcaccgtgttagccaggctggtctcaaactcctgaccttgggtgacccacctgctacctcccaatgtgctgggattacaggcatgagccctggcacccagcctgatccctgagtgtcttgggggagcgattgattggcagtacagggtctctctgcacatgtcgagttggccacattggcgaggtgatttggctagcttgtttactcagggctggtcacagattcagtcctcggctgggccctttgccccttggctgcagtcaccactgaaggtggggcagcctgtgaccaaatgcaagggactgggtgggccaacatcaacccagactccagtggacagtcataagctgctgcttcatacgtgaacaccagaacgtatctcatcattagtgaaaggctgtcactcagctggaatatacctggagtgggttgataagaagaaagcatgtctcatgagagagagagagacaaaggaccctgaggctaaagcactgaaatgttacatggatgtcagtgcaggccagatggaccctatggatcaggagacttatgaaggttggctgtcagattcgcagggggttatgataaccgggtaggaatcatctgattcagtgaaattgaagctgtttagtgagataagaatgattatgaataaagtatgtgttgagaccaaatcaaaagaatcagaatttagaaggatgctctgggccaagaagacgatgggagatctggcccataatgcttcactgataggttttgtttatttccccatgaactcactgtaaagcagtaaaatgctgggattgttctgctaacttacg

SEQ ID NO: 90018 - DNA, 1038 bp, Homo sapiens
gtcaaggagggaccttatactaatgtgttcagcatggtgctcattctgagagaatactgagtcattgtgaaaacttcttttgaaatgcaatattttccctttaaaattaaagccatctagacctgtaaattaagggccactcctagcaaaattgctgattgcgtgttgaaccatggtgtgaactcagcttattggacctgtctgtgtgaactgacggctaaggaggaccttcgaccgtgagttcttccacaggagcttattttgtcagcaagtgcgttatctccttgcctttcaccccacaggcactgcccagactccagacgtacctttaccaaacgtttgatgctggagaagcacgtccagctgatgcatggcatcaaggaccctgacctgaaagaaatgacagatgccaccaatgaggaggaaacagaaataaaagaagacactaaggtctaacattgcagatgtttgctttacagtgaaattgtgttgacttgcttttcccattcatttttttcctttcaagtttttgttgcatagttacagttttaaaaattcagactggctgggtgcggtggctcatgcccaccactttgggaggccgaggcgggtaaatcacgagttcaggagttcaagaccagcctggccgacatggtgtaacctcatctctactaaaaatataaaaaattagcttggcgtggtggcgggctcctgtaatcccagctactcaggaggctgaggcaggagaatcgcttgaacttgggaggtggaggttgcagtgagctgagatcatgccactgcactctagcccaggcgacagtgcgagactctcccaaaaaaaaaaaaaaaaaaaatcagaccacactgaaagtataaaataatgattaatctccccatagacccattctgacctcatcatcaggagttcgagaccagcctggccaacatggtgaaaccccatctctactaaaaaaatacaatacaaaaattagccaggcatgatggcaggcgccttaatcccagctacttgggaggctg

SEQ ID NO: 90019 - DNA, 2053 bp, Homo sapiens
aggagaacaaacccagccacgaggatgaatcccctgatggcgccgtgtcagacagaaagtgcaaagtgtgcgcaaaaacttttgaaactgaagctgccttaaatactcacatgcggacacacggcatggccttcatcaaatccaaaaggatgagctcagccgagaaatagccacagatgctccatgaggaaaatccctgtccacattggaataaaaaagacatttttgttacaaagtttgcagtataatagagttaacagtactgtctaggctgttgcaatatattctctttcaatgtaccttccttcacctcgtcgtatatatcctcgataagtattaaaacagtatttgagtttaaaagagtttgtatatatttaaatgaataactttttatactctttgttacatgtttgtatcagtatttagtggaaaaccatttgagttgttttgggttagaatttttctttttgtactgtttctttaaaacagagttcttagtaacaggggcagttcctgaattcaaataaaccattttgtatgtttggattttgaatgggttaactaattacaggctaaaataatgccttttttagtgtttttaatttttagaattcactacataaattgtaagtaattgtgggtctcaaaaacactaggaacttttaagtgtcttagcacttcctcgatgtgcctgccctgagggagtgagttcacatttgagacaactgcactccagtgtggacgtgcctttgtcttcaggccatgccgaagggtgtttaaagcagtcttgcaggtcgctcctttcccagccgtggataaaaactgaagctaggaatctaataaggaatgctgatttcctcagttccattttgaggaatggggaaggctattctaaagaaaaaaatgggatttgttttctcggcagatctgcaaggctggctttaagagcacaaggagggaaagtaacgaaagggctggactactataaaagttacaaatacgtagttagaccaatagatttatatagtcaggtttttgtcatgtaatttattaactaactattacagaaacacagctaagaatatcaagtatttctctggctcttgacagaaaaaaatcagttgacttaaccctttgctgtcaaaagagttggcgtttcctgttctgggtgctactgccaaacgttatggtacttagagtcgggatgcacaacttcaaccaccgacttatcaatgcagccgcctgtgtattgcaattggccgttaccttaagcactgagccacccgggtttagttcagccatttcaagaagtatatttaacgtcggtagttctgctttattaaaatgcagcagaggtactcttctgtcccttccgtttatagttctctgagagagttctattttttggttttgttttgtgttttcttttgcattttgtatcttgtatttatccctgaacatgttttgtaccttttttttttttttttttaagaaaaggaattcttttgtgtatatatagatacttgcatgatatactgtagtcaatgttcggttcctcaaaaggtcttgctgctgtcaggtgttatgcactccatccatcataactgtatgaaacacatttcatatgtaaataaacgtgggacatttggcccttgtgcttctgtgagagaattattgatggtgggtctctgacatctttgtgaagtttgggaagtaattaattgcagcgacaagctacagggtgttgcagaattcttcccactcagaagaatggcatattcgttctcattagtaatcagctattttgtcactttcttgttgactccatcagtacatgggtacaatccgagggtgtgaatttcagcttgaaattccattgctgttccttgttttgtttgtattgctctaagttgtattcataatagcactttcatatgtttctgcatttgaaccttgcaataagcctgtgtggtaggccacataggtccgaataacctagttttacagttgagggagctgagctcagattcagttctttgccgaagccctcata

SEQ ID NO: 90020 - DNA, 1053 bp, Homo sapiens
agcttatgtgattccttacattttttctcaaggtttaggttacttaaaaatatggaagtaggccgggaatggtggctcacacctataatcccagcactttgggaggccaaggcaggtggatcacctgagatcaggagttcgagaccagcctgcccaacatggtgaaatcctgtctctactgaaaatgcaaatgagccaggcatggtggcacccacctctagtcccagctactcaggaggcttaaacccaggaggcagaggttgcagtgagctgagatggtgccactgcacttcagcctggatgacagagcaaggctctatctccaaaaaagaaaattttatatatatataatatatagtacatatatatataatacatatgtaatatataatacatatataaaatatataatacatacataaaatatataatacatatataatacatactttatatatatgtaaaaattaagagttgattaccaggaagatgatcttaagtttcaggtatacatacaaattatgcttttgtttttatgtgtttgggtgatatatcaatagctgagtaacaaatgcatacaaaagaatgccagcaaaacgttacttgcaaaatgagaaaaaggaaaatgtaggcttacactgcatggcaaagaccacttccttcctcccaagcacgttttctgcaaattccttactcctaccacagcaagtagtccaaagaacagctgttctaccctgaagctctggtgggcatgcctcaccagtgtcagcaggctagtgagtttccatcctaggatctttgaccaacagtgaaatttcctcttgaaatttttgggcagccaagaaatttataaaatatgactcagaggaacccttcatctatcccaaaggatagtctgaaaataaaaagtaatgtgccaaatgtaggatgctatttgtgcaatttacacacacacgcatgcacacacacgcacacacacacgctttgcaaatatcagatgctgtaaggattccagattgtagctcttaattttaacatacatcttctaaacaa

SEQ ID NO: 90021 - DNA, 1159 bp, Homo sapiens
aattcatcaagaggatacaataattataaatgtatccaacattgaatgaagcacctaaatatataaagcaaatattaatagatctgaagggagatagaaactataatacaataatagtaggggacatcaataccccactttcaataatggattaccatccagacagaaaattaataaggaaacattggacttgaactacactttatgacctgacagacatatacagaacatcccatccaacagcaacaggatacacatttttctcaagtacacacagaactttctccaggatggatcatatgtttggctgcaatacaaatctaaacaaatttcaggggatcaaaattaccttaagtatcttttctgaccacaatggtgtgaaacttgaaatcagtaacaggagaaatcttggaaaattcacaaataagtagaaattaaacaacatgggtcaaagaagaaataaaaaagaaaatcaaaaaaatcttgagacaaatagcaactatgtaccaaacacctatgggatgcagcagaagccattccaagagggaaatttatagcaagaaatgcccatatttctgtgaaaagtctctcttcatgctactagaagtttctggagtagccagttgtcattctatagtcactgttacccccaatcaacccattctgaacagcccagcctcagttcacatggtttgagtataaggctgaatttgagactaggctactctcagtcttttcagagtattttcttttcacatccattttttcttcacagtcccaatggattttgaatgttttagtaacgattcaatacattggataaaactttaatgatcttagcctacatttttctaggcatttgctcatttatatttgctgccttctttggaaatctagatttgggggtaccctagatcctgtttcaattaaggtcccagcagaatgcagtgcagcacactgcaaaaggtttaactttcaagaaattaaggaagggactatacacagagctgtgtgctggaacaaggcctgagaagcctgagtaggggtggaagctggagctgtgggaaaagggcactcaggaagagccactgccagagccacagtgaagccaggaaggtgtggggagcggaatcaccaggaggccctctcatcacactca

SEQ ID NO: 90022 - DNA, 1034 bp, Homo sapiens
cccttgtgttgtaagccactgagatttggccttcggtattagcttcaatctccgattgggcatgagatggctacaacgattccagaatcacctcctggcatgacaacacccagaacaagaagagagacctactcttcccaagggtttctctaaaaacaagggatgctgcaaggagacccacacagactttcccttatcttatttgctgcatggggcaggtagaaagacatctaggttctattggtgctagtaggggtggtggcggggattcaccccaggcaggcggttgttctgcccgatgcctgcccagggctaaggcttgtggccagcacactcccccatcagggctcccttgagtaacctgaaggtcccctgtgctcaggaggattgctcaaccactgaacttctactattatcattaacagtaacaaaacataatcaataatccacaaaactgcactcctaactcctttctttctgaaatcacattcctatctaggtttagggaaaaaaagacaggaaagtgtgtgtgaagttaaatatttgtgtatccacgtatgcattccggtcactgaagaaataaaggatagtataaaacatagatccaaccctcagaagcaatttcagagtggtgagggagagaaaagaatcacaaagggcaaagcaagcctgtgtgaccatctccagagtaatgtagacagaggatgtaggaactctgagcacaagtggcttttttctcccatccccaagagggcgaggagggacgaaggagccaggagggagtctgctcagctgcaccgttcctagcatgtggcaggtgcacagcaagtgtttctccaagggaagtaacagggcatccaggaaactcttacgctccctcactctgagccatgttgcttatttccatactgattgaccttaaaatggatttgtgtgcatgtgaaatttgtcatgcttacaagagggtgtataatgtacttttatagctcaaagaaaaataaataaccatggacctgccacccattttaagaaat

SEQ ID NO: 90023 - DNA, 1047 bp, Homo sapiens
ttccaagccccgcccaccgcagtccatctttaggccccgccccaattcggctcagcccgccccagcgtagaggcaccacctttcctcgctgcagtcatccaatagccaagatacacggctaggtgatttgcgagcgggagttaggtgtcctcttggcgcctgaccagagtcgggaaattcagctcctcttgagtagtcccttccccgagttgccccccgaggtatgcggggtcactcgctgctcgatgttccctccgaagggtcggacaaggctccggagccctgtagctgccctccctaggagccccgggtcttcactggccgaggtgcccaccccgcagcattctgggagtggtagttttcttccttcaggttcattcctggctggccagtgcccaagactggcgagactacgattcccagacgcccaagcgagtcgccggtcacgtggccgcaaggacgctgggccggtgggcgggggccggcaggtgctccgcagccgtctgtgccacccagagccggcgggccgctaggtccccggagaccctgctatggtgcgtgcgggcgccgtgggggctcatctccccgcgtccggcttggatatcttcggggacctgaagaagatgaacaagcgccaggtgacggaggagggtggtgagcgcgccgtggccgggaccgcctgtgctagcggggagtcggggcttcccagtcagggctccggctcccagtgaatgcggccgggcggccacccgaagctcccgcgctgggctctcaggccctgggttctacgcctacgtgtgggcatgggtgtgcacttccttgccctgacaagagcacaattaggggagggtgcaggaaaggggagaatagaaaccccgtgccatggaatgtcaaatgtggttgagaatgccacagccacgcttgtgggagagatgactcggtgaacgacagctctctgagcgtatttgaagggccacccggtgaagagggaaccgatttctctgtggggcttcagaggcctgactgccggcaggtggaagaggcaga

SEQ ID NO: 90024 - DNA, 1019 bp, Homo sapiens
ccaacccgctttctcctccactcccattaagttctttatgcattgttttaaatagtggagtaatctgccattttcttttttttttttttgagatggagtcttgctctgtcacccaggctggagtgcagtggtgcaatctcggctcattgcaacctccgcctcccgggttcaagcgattcttgtgcctcagcctcccgagtagctgggattacaggcacatgcaccaccatgcctggctaatttttgcatctttagtagagatcgggtttcaccatgttggccaggctggtcttgaactcctgagctcaggttatccgcccacctcggcctctcaaagtgctgggattacaggcatgagccacactgcacctggccccactttctactcagttatttccatattgttgctcatttatttccttttccacattattagaattaagactgtaataaatgtcttcgggccataattctcaacctgcctttagtttatactgaattcctagaagtaggattatgggccaagagtaacctcttaatactaatgccaaatagctttcagaatggtttatcaatttgtatccccatcacagtgtattcttgctagcactaagtattagtattaacaacaacaataaaaaaaccagacactttaaatttcttaggcaaaggctaggtgtggtggcttacgcctatagtcccagcactttgggaggattgcttgaggctagtatgttcaagaccagcctgagcaacataaaaagaccccatttctaccaaagaaaaaaatttagaactacccaggcatgccagcacatgcctgtagtccagccacttgggaggctgaggtgggaggatccattgagcccaggagtttgaggctgtggtgagctatggttgcaccactgcactctagcctaggccacagactgaaaccttgtatcttaaaaaaaaaaaaaaaaaaaaaaagttgctagaaacaaaaaaaaaggaaggggttgcaaggagggtagaggcag

SEQ ID NO: 90025 - DNA, 1029 bp, Homo sapiens
gctgtaaagaactgtccggacactgagaagtcagaaccacgtagaaccacctggcaaagtctccatttggacttcccgagtgtctttcactccgacttttccaggccttgtgtattttaaactgtatttaaactgtgtttaaaactgtattttaagttgtactcaatgctcaaaaagagttcataccaccacattccatctcagttaatattaaatttggatagttgaggaaaatgatgttgcccagagccacgtgatccaggtcctcactccaaactcaattcaaaagtatgttctggaaagctggtagggagctaaggtgggatctaacctgtctaacatcactgcctccaaaacactaaaactatattaatagcaaggagagtttagaagttatcagttactccaggatacgcccgggaaaaggaaacaagatcagccaaatactagaagctggaaaacagatggaagaatgggaactggcacagccagagaaagccaggatgtgagcggcactgggggaggctgtggctcttcaggtttgtgaggcagagagagtcctcagagacccaggaattggtgtccccagaactgaaggtgaaggggaccgtagggctgaaatcagtttgattgggtagaaaagcagagaagcagtgagacccctcgctctccttgtcttccacccagaggcctcaccctcctcagcagaggtctgggagttcattccctggagaggggaacagaaatctctggaggaaaagctgccaggcctggtgggggttatggctcccaccctataagtgactgtgcacactgcatgctgagggtataaaaacagaagtgaggggtgaaggacctcagatgtacacagaacacggtcctcaggtgtacacagaagtgagcacagatgccaggagaataggcacctgtggcccggtggaagggggtcattgaagcagagacccacgtggggatagagccattttggttctagggtgtgttgctgagagtgagtggtcccagtggagg

SEQ ID NO: 90026 - DNA, 1065 bp, Homo sapiens
aggactccaaagcttccatttgaggctaaaggtagttctaggtgaatccacagtgtgtggatctgggttagacctgtgctccccatgctgcgctgtgtctgggactggtctgcatcgggaggctctggtggcaggccttgagtagtggaactctctagggtataaggtgctgggaaatcccaaagaggtgattagggcctccttgaggctttaacaagacaaacctcacagattgctctttttttcctcccttctctctcacttaaggagagatgatatttgcaagtctctttccagggacagaagttgaaatactgcagaattttgtaccttgtgttagtttcctgtcctaaaatcatgtctttgaaaaagtttgataactgcatctccagcttcacaggttggtggatcttctgctattggttttcatcgtggtttcctctttttcattccagctctattaccaggttttaaacttcgccatgatcgtgtcttctgcactcatgatatggaaaggcttgatcgtgctcacaggcagtgagagccccatcgtggtggtgctgaggtaggtcccccaggctggcctccagcctccaacctccatcacaaggctgccttgggcctgaggagcggggcagccttaagtgaaaacctgcgtgacagctaaaattcaagattttaattggataaattattagtctttattgatatctattttgaaaatgtttcgttttttttctggcttttgaaaaatctcatctttcttagtagacattttagagctttaaccatgttgatgctcgtgtacctaatccatttcaaatgacaatttaataatatgtggtattcctgcattatttctatacaaattgatttttaaacataactaaaaatgttacttcattttctttgtaccaaacaggcagagagagcctgtatccccagtgcgtagcattgtgtctagtatttttttcaagcttcttcagtaatactcgtgtattgatggctactatcttcttgagactatgatgcttataaaagtacagcatgtttattttagaaaag

SEQ ID NO: 90027 - DNA, 3800 bp, Homo sapiens
ggaggcaaaagacttgggttccggttttgtcccagccctcagtttggcatcagggcgggtcctgctccccaagtgcatccatgtgttcctcatttcttaagtaagtattgcagtatcctaagtgctggaggcctgctctaaagtgaagggattgccctagatgattaactagctgtcagcctgcagttctggaggaaaacactactatatttgtagatgcaggactttttttaaagctaaaaattggtagcttttacttcagagttgacaattatcctggtttcttttctacctgatacaaactgcagagggtcctgtcagtgctcatgacatgttaatctcagtagaagtcatttcctttcgcacatgttaccaccttgagcagttaagaaggaagccacattggctcgttttatagctcctgagacctacttgactattgagtttcacctctgacatgtctattctgatcgccttttggacacagggtaatgctgatactgactttgtgcttctttccagtggcagtatggagccggcctttcacagaggagacctcctgttcctcacaaatttccgggaagacccaatcagagctggtgaaatagttgtttttaaagttgaaggacgagacattccaatagttcacagagtaatcaaagttcatgaaaagtaaagaggctttatttccttttggttttgttatgtaaatttttggtagattcatggctaattagaaactagtaaaagcactggattatgttctgagttctgccattgactcactgggtgactttggaccaaatgcttaactctttctgtaggatgggagttgtagtagttaaacccatagtaactcacaaagtgattatgagaattaaatgaactaatgtttactaaagcaattcataaacttaaattgctgcacaaatataaggtatgatgtattatgacatgttagttatttgaaggagctcaaagaaaatcaagtcacattgcaacagaggatggttttgatatgaaaattattttctgaaatgcaaaaaaagctagctgtttttctatgttacttgggccaaagtggcattttcagcagtaatattagtcctggatggataaaaattcattttccaactcatctcatgatttggccgttgcatattctgcattacttttccaccgccccatcccctactccccaaacagccttgctgttaataccagctgtgacttacttatgaagacccttttctggaaccggaaacatttacttcttgctcaaatatataaagttgccatgagagagtacttcacatgattagtaaaaatgttacatttcatatacttggttattcatttacctttatgcagcttagtgtggatttttatctgtgtgagtcatagaattaaatttaggtatgcataggtatgtttttaaataatggagcatttctcactgtgtatgtgtgtgtgtgtgtttgagtttgagagagagcggtaactacttgtacatatctggtattagattcccattccattcactgcttctttttttgagatggagtctcacgctgtcacctacgctggagtgccatggtgcgatctctgctcactgcaacttccgcctcccgggttcaagcgattcttctgccccagcctctcgagtagctgggactacaagcatgcaccatcatgcctggctaatttttttttttttttttgaggctctgtctcctaggctggagtgcaatggcatgatctcagctcactgcagcctccacctcctgggttcaagcaattctcctccctcagcctctcaagtagctggaattacaggcatgtgccaccacacccggctaatttttgtatttttagtagagatggggtttcaccatgttggccaggctgatctcgaactcctgacctcaggtgatccatccgccttggcctcccaaagtgctaggattacaggtgtgagcaactgtgcccggcccatttactgcttcttcacaggtgtaccccacagatattgatacttattcacttcacattactctaaacatgagaacaatccagtttcaacctgtggtgatacactggtcctgtactaacggttacttgatgcctacctgttagattcctgaggaagaagcatcctcagtcatgatgtgacagtactcgcactgacttacaattaatttctaaagatgatcaattgttccaagttgaggaagtgttgattatttgctctaatttgcatgaattatgagagactgtcaggatttttatcccgatttcctttataaccgtggctgcaaatcagcttgctctttttgatatggtttcaaatctttgggggcttttggcattttatctcattataatagtgcattcttttttcatctgtcttactgaaagaagaccctctttacagctccataatactacaatattatgtttctagagtcaaggctatctgagtaccagtttagaatgcttaaaatgagtcccacatgtctctttaacacactggtgttatgccatttgtgattcttgtttccttgcaaatttgactttatactaccgtggtcagtggtgaaggaaataatgcagtaacaaattctgcatttggcaaggaaaaggaaatctgaggacagcctagagcacacttggatttaaattactttgtgctcaaatctgtgtgatctaggatcaagtttatgtctagagtgaagaggaatagcatccatgttaacaaattggtctatgaggctgggcgcggtggcttatgcctgtaatcccagcactttgggaggccaaggcgggtggatcacttgaggtcaggagttctagaccagcctggccaacgtggtgaaaccccatctctactaaaaatacaaaaattacctcggtgtggtggctgacacctgtaatcccagctactcagagacggaggcaggataatcgcttgaacctgggaggcagaggttgcagtgagctgagatcgcaccaaggcactccagcttgggtgacagagcaagactccatctcaaacaaacaaacaaataaataaacaaaaaaccaaattgttccatgaggcctaagaatgaaaacagttcaagtccaacacaggttgttaaaccagcttcatgacctgacttctgacctattctgacttgaggtgaatgaagtgagtctggaaaagctccttgtcagcagcgtttttgtgtgttatgaatctggacttgaaagaattgcacagaggtgattcacatgattttgcccactgatgaatgacactaatacacttgtttacaggttaaaaaatgtcaggtcctagtttattcgtcattcccagaagccatgtggtaagaaggaattcttcattgtgtgctgtgctggaagcaaattgttgcccttgtgcttggtcatgctttttgttgtcaaggatacttgagtgttttggaatttaagtctacaaaactgtcattagatttgtgcttcagttgaatggttgtcttaagcagtcatcttagactaaaggaaggtcaggttatctttgactgtttttctaaatgctcctgtctgacagtaaagtcttgagtaaactaatatttttgttaatgatgctgtgctgaaaataatttttgagaagacattattttgctttccagagataatggagacatcaaatttctgactaaaggagataataatgaagttgatgatagaggcttgtacaaagaaggccagaactggctggaaaagaaggacgtggtgggaagagcaagagggtgagg

SEQ ID NO: 90028 - DNA, 1052 bp, Homo sapiens
acaaatatgaagaagtgctactttgtgtcaaaggtagcaaacaagaatgctgtcttctaaaaacaggaacttccactagtgttcaccagaaataaaataaaatctgtagatccacaaggatttactcaaatagtttgcagactcactatcaaaacattcttgtagggcctgtgtgttaaaaaaaaaatcccatcaatgcgtaatggcaaatagacaaaattgctgaaaaaaactcctaaattggagtttggaatcaatatccttttgactatatgtcaaaaagaagagaatgtagaaattgtctgtcaatgtgcttagcatgtgttagcctaatgtagtgactgtgaaggtttatatcataagcaattctattcttcctcctttgaacttgccctctttccacctctccccagatacctcccaccccatcttgcatgtatgtttcttttacctttgccttttgaacctacatctttgaagttgctgctatcctctgaatcccacgaaggctgctgattgcccagggccttgggttgaggtggctggtggtttctgttctcctttgcttctatgagacccagcaaattccttgcagcttcttcccacctgatgtactctctcagctgctgcttcaggctccctctctcagaaacagaagaagactcccctgtgctctttttccccattaagtgccctgtaaaaacaaaaacaaaaacactcagaatgccacaaatttaaccaaagggaatgaatgagaaatttaaaagaaatttaaagctaattgtgtttgtgctgcttcctcctaaatgcagaataaatcatgttttattaagagttagttcataaacgacagatagattttgctctctgttcaaaatgtgcaatgagctagacagcattcagaactgcaacccaggaaccctgggtttggttccagcacctctcctaactagttaggtcacctctgccaagtcgtttagcacccctagtcttcaattttctcaactataaaatgaacagggtagactagattaaatctaaggaggcttcca

SEQ ID NO: 90029 - DNA, 1016 bp, Homo sapiens
cgagactctctaacctccccaactcgctccacactcgccaacccagagttcggtaaaaggcgcgtctggtgaggtgccgcgctcggagagtgtcctggagcgccctacgccaccgccccgagagctagttcttgcgggcgtgccctggacagtatctgcagttctttggcgccggctctagggcgaggaaggaatctcgaaatctcagcccgcttcacaatctcctgagactctctgaagaaggagagtcccggactcccgcctgagcgtgctcgatatccaccgttgacactggaagctgggcgaccgccagcagaacctggatgcccgccaacaggtcctggcacggggggggggggggcgtccaccccacaacccccgtccctaagcgtgctttcaggatgatgcccccagagccttaattagcatcaactggctactgtctgtcggtcctgagcaaattagtgaagctcccagtcccctttcctcgtctaaataaactctgtctctctggaaggtgggaaagatggaataagatcacctgtaaaggctttgtggaaagtaccaagaccctggcatgacgcaatatggattgtaatcatcgtccccatttccccgaaattccctggctgttctccggttcctgaaaccgacttgggaaaaggatgaccacgctggagctgggaatatgggaagcctcatcatagtttccagtcctttctctgcgggtctaagaggctattgcataaccagggctgtgtacccctagacctccagatggtgccttgcacacagtaggctgatcagtaaaaatgtactgaataaattattcccccccaagaggtagggagtaatatctgcacttttcctcacaaggatgtctccttgggggaggaggatggagcagcccgtgtgttatcaccttttagcaagaaaacaaaacaaaacaaaaccagaatgaatgtgtgtttggcctatcatttgtttcattctttcattccctagggatgatttat

SEQ ID NO: 90030 - DNA, 4278 bp, Homo sapiens
ctgtttgtcaagtagttcattggtagggtaaccatgtaatttattgtctgacctgggacacttttgagaatgaaggggtgctaataatcacaccactacagcaagcgtgaactgggagtatccagaggagttgtctgtggtgacgctagtctcagtgacctcagggacagcaacatcatcatatactgtaatgcagacaggagccaggaggcagtgagttagtgactgggtagtaaaaaggtggaggccttccagtgtcaactactccttcaaaaacagttgtcagtaaaagttaaggggatagaaggttttctgggggatgaaaaaatgaaaatacttgtttatatagcaaacagttttataaagatttcacatttatttctttttccaaactgctattttgactaactgtaatagaaagtcatttgccttacagccatcaaatgaaaagccgaaatgcccagaactaccaccatttccatcatgtttgtctacggtccacttcattatatttgttgtggtgcaaactgtattattcattggttatatcatgtataggtaagtctcttgataaaatgtgacccaatatttttctgcatctgtttaattagaaatattcaactaagttatctatgttcataatacaattttcaccacctataaaattaagtttattgtgatttctgttcatttcagttcacataaagtgcacgtgtagaatatatgtttatcttaatgcgttgtatacttcaaaaggcattgatattttaattttaaatagtcctgtttctttccaaagttaagcgtatagaacttctttaagtgtttgtttctttttttcattaggtctcagcaagaagcagctgccaaaaaattcttttgactaccattttcctgtgtacttcatctatttgtgtacaaaatgatgtcgttttgagggaatttaagtatttaaattgcttcatagtctaaattattaattttcttaataaaataactgtttaaacattgatttgcagttaagaataaaccttaaagcaaagacaaccacattttaatttgttcacagtatgtaaatctgtctaaatttcagtgaatttctggtcagtatgatgcagcctctgagcagaatattgaccagtaagagggtaaataaagtgggggcaacccctggatatgaatgttaccccctaagtctccaatattgcaggtttccctgtataacgtaaacacacttgccctcatgcctcccagaatatgaggtctaattaagaagtcccatcaggtttattttgtaaccaaagtcttttttagaggtcagacttcctaatcaaaggcctgggcctgcagtcctttcatcttaatgcaacttcctttgaaatcaaagaatattttgtctgagagctttaaggatctggtaatagacttcaaaatgttaagtgaaatttttttttcctctatttatcaatgatatatttcacttttaaaggaaattttagaggaaaattaatagctgctttttgcctaaaaaaccttgtgggtggaaacattcctctgagaatggcttttataggtattttgcctggtaatgtattcattcatgattgcccatattcttgaatgtcttcattccaatggggtcaggtcaatattatgaaaataatttttatatttatatttgtaacttaaggaatttatttctccctttactacagcatgtaaattcagctcaaattgcatgatctgaggatttaaattcacaaaacctgccactacattctggtttacattagttacttcatgctggctggggttagtgaccatttgcatactcttttaaatcaaggaggctgtagtagaagcagttttaagattcttgaaggcaaaatttgaaaaacagtgaatacttctaattgtttccttttagtgccagaactaaggacattgtgaagcacttgttagtaaacttaaccttgaaatgtcagactggaaggagtttttatagtctttgtgcatacttctaggtattacagaaacagtctgtaaatgacattttaagatgcaaatttaattctgttcacagctgatttatactgatttttgctgccttcaaaatactcttttacttcttttagctaaaatggttgtctttcatttgccatagaattccaaacaatactatcttataaaatagtactgttgaattattccaagcctccctaggtttgctctcaaatgtcatttacagattgggctaacgacctaaaatctatatataaagactttctgaagaactctgtattatagcaataccaaacgagtgctgtgtgtgcaaacagtctggcgttgctttttatgttgatatttatcctagaacactgaaagagaatatgccagtgataactcactttacttcagtcatttcaacacagaaaatgcttctctagcatttttcttttgtagtgttaacattttgaaattcatgtttcagaggcttcatcatcacagaatttactcttgctccatgaaaaaaaattaaataccttcagaggaatatttaagttgtaaactatgaaacttgagaaatcctcttgagataaaaggctgccaaatccagtattataaagtccatggtcatatgtgcctgtgcattaaaggaataccagatctatgcagtatacatttttcaggctgaaattcaaggggaatcattctgattattcttactacaaatggagatggctattatgaaacagcatgagcatgagccttttatcttttatacttagtgatatactttgcttgaaaatcactcagcaaagtagttcacatgatgtgtatcatatttgaagtgtggtttttctcaaaatcattgactttaaggagctcatttctgaacaaaaaggtttgctctgtggaaaaatcaatcactgccaggattctttcatttctgtactattttgtataattgaatttgttcacttctctcacaccagcaagtgttttacaggtgccttggattaaaacaaaattgattttaaaatttttatgtaagtcattgtgtctatgatgccacttttaaaaggaaaatgcaattgcgtaatggcttatatccttatttaatgtacctatttgtgttctaataattgtttgaatgttttattcagcttaaaactttaccatgaagtcataaacagtaaacaatgttttgttatgtattaaggggatatcagtgtttctcaaagtatgatccatggaccatctgggtcatggcgcctggtttcagacaacctgaatcaaatcttaggggtggggctttgggatgtcattgttcaataggcacctcaggagattctgagcacaccaatgtttgagaaccactaaaatgaggagtgggaaaaaaaaaataggtgttttgttaatttagagctgagctgagaagataatatatttttattgtcaatgacattaacagatatgcactgattcttttatacctacaatttacttaatgttccttttattaaaacgcgtggttcatgagcaactacagactgaatccagattattacctgttgctttcagtattttcgtgatggcttttaatcttatgaaatcatcttgagatcattcatggtcaagccatgaaaactcccatcttcaagcctgcctgctaaagcttctttgccttcctgattgtgattatggtaacaatttatatcagacagttgtactttttgataacttagggaaaacagaaatgacttgaacaagggattgcctgcctcactgcattgcagagatacaatttttgtaaagaacacaaatagcagttgtgaatattaaggtgtgattatctttccctgtccatgtgcttattgaaagaagatagtgaacaaatgattatattgaggatttttttaatttataagatctaatgtgaaatccacacttggaactttttagatctgtctgttgcttgtttaatatatttcttttatgacattacttaaagtttaaaagggttttctatccactgtcaatttcaattggataacattttgtcaagttttttttttcctgattatttgatgctagctggaattcaagaaatggcattgaccttattcaaataaagaaatattttagtaaatttgctttttccttcattgatcttggataataagttgccatttgtttttcagacacaacctgtattgtgatagcatttcatttatcacatgctttaggctctgcccgaggtggcctgctgcatgc

SEQ ID NO: 90031 - DNA, 1197 bp, Homo sapiens
atatgtgcagctacaaagcggacaagtctgtgtgtgtgtgagtgtgcctataggaaatgattgcgtttggcactagtcctttactgtacagctgaacacctagaaagatttattataacttcattaaaaatatcatccattatattcaatatccacttatactattggttttaacacagattacctagtagtattttctacatggtatttttagatgacctttagtaaaatataaaggcataatgtcgttttataaattattttccaattttgaacacaactcgatttttaaagatactttacctgtttttttttttaaatgatgtaatatattagacttgaaaagtaaaagtattggagatctgtgactgaaaaaaaaaaactttatagtgattttattgtatcaagagactttctgtttcagaaattccatgagtgaaaccgtcagactggtcagtggaatgcagcaccctggctctgctggaggcgtctatgagacaacacagcacttcattgacatcaaagagcacctgcacatagtaaagagggacatagataacttagtgcagcgaaatatggtaactttgtttccttttccttttataattataatctttaggaaaggaagaactcatactctactgcaagtattttaaccctttagttaatgctaatgcttatttttaatgtttaaggtagaattgtcccatttattgcagatctccatgtgtcctggttttctagttattgaaggtggaagaacagttcccatagcagtcatggttttttaatatgtaatatttatattatcatttcgtgaaaatattttctgatttccatgttaatgtcttctctgacccatggattgcttaaagtgtatttctttggcctatttttccgtcaaggttctaatctggtaatttcttgctatcttgttagcttcatttaccttcacccaggtttcgtgtgcttggattggattagatatgtttttgactctgctggttgtcttctataagacatatttgggatatggttggcccatatttcctagtctgctttaccagaagcagaaatcccaatcccttatattttatatcgcgttttatctttttaaaagctttttaaaacgtttgatgacctttagaaaatatactaatagattaataataatgttacattaaactgactctccca

SEQ ID NO: 90032 - DNA, 1060 bp, Homo sapiens
tgaagtccctttctttcttatgtgacgggtagcatattctagatactcttttgtgctttgcatgttttacttaacagtagtactaggacatctaaagatgtaactagttgtcaggacgtcctagctgtccagttgtattatccatagaatccctttcttagaggagttaacaatccttgcaaactcccacttactgagaataaatgtcatgcatacagtaagttaatataaaaactgagctcaagtttctgaactagtgctctggaactttttctttaggatttagcttcaaaaaaaaaatgtaaagagatagaaaatatttgcctttaatggaaagggtagtttgtttctttgtggatttttatattcttaaggaatcaaagaaattttttttagcagaaagagatcttagaaagcatgtagcttttctgtagcagttgatgcctcttcccacttctccatctcaaaacttcccttttaagatttctgatacaccattcactcctggtattctttggcctctgcttccatttagttatcttcacttgctctccttccatcgtcccttaaaaggtattcttttcaagcgttctgtccagccctcttttcacttgacctgtttcctaaaccaactatgacctccttcaaccacaattctatccccataggctcctcttcattttttgacactcagctaaatgcatctttctttgtagagctctagtcgtgcttctgtcacgttgctttcctgctagacaattcatctccacagggcagatatttcattcttcttgcaaagtttatatccctaatattccctggctcacagcacttatgaaataaatgttagcagaatgaacaggcaaatgaatgaatgactgagtaggagcaaattaagtgactcaatctttggtatattaaaaagacatttatacctaagcaagttcatgcttctgggaagcagaatttcttaaatacaaatatgtgacaacgttacatactctgtgaggttttggtcttggtattattttagttatattaaaatgttatgcttaatttg

SEQ ID NO: 90033 - DNA, 1054 bp, Homo sapiens
gttttctctcttactgtttcccatcatctaggagcccttctggtgctcagtcagctcctggctgggcaagctgcctcaaactctctccttattttggtgcttcccatttcttctctgatgaatcctagcattctctcctaggcaatctatttgaaatgcaagtatctacttactactctggtttttctccgtggaggaggtacatactacttgcatctggttagccattttgatccctcctgagattatccaagaaaaattgtttttaaataaaaaaatttaaacccagtttataataagtgttcaatcacctgaaatggcagaaaacaaataatttaatcattattgaattaattatttgcatattttctgtttgggagattgtaccactgtgatggtgatgtcctaattttgctgaatgttggcactttggtcacttacgttatttcaaaaactacatatgtgtaggtgactctgatcatttttatttatttccttttcagcggaggaaatatttgagagtgtaggagatcgagagctaagacaagtctttgaaggacagaatcgtattcatcttgaaatcaagcagctgaaccggcagttagatatgattcttgatgaacagagaagatatgtctcttccttaacagaggaaatctctaaaagaggagcaggaatgcctgggcagcatgggcaggtgggcttgcagaatatgcagatgtgccccatttaccctttgctggaagggaagtaaagaagaagggcaactgtactatgtgctcatagaatgtggattattcagcttgctcgtcattgtttcttcctccagattactcaacaagaactggatactgttgtgaaaactcagcatgagattctgagacaagtaaatgaaatgaagtaagtatggaaaagtagcgtttgtgtgttatgtgattttttttatcctaaatttgtgacttcaggtgtgcaagcactgtattgcaagatttctgcatgagggtaagaatcccgttctagattcattttacaaataggggaccataaatacagc

SEQ ID NO: 90034 - DNA, 1010 bp, Homo sapiens
ctggacaacacagtgaaactccatctctactaaaaaatacaaaaaaaattagctgggcatggcagcaggtgcctgttgtcccagctactcgggaggctgaggcaggagaattgcttgaacctgggaggcagaggttgcagtgagccgagatcacgctactgcactccagcctgggtgacagagcgcgactcttgtctctaaaaaaaaaaaaaaaaaaaaaaaaaaagagtaatttgctatcgtttaagtaaagaaggaatacatttttatgttaacctttccgctagtggtagaagagttaaaatgagaaaaataacatgtatagagatatcttaatgattttcttatctttttaatgatctattccaaaactccaaaaaaaagcccacaccagataaagaaatttcggaaaaggaaaaagaaaagtatcaggaggaatttgagcactttcaacaagaattggataaaaaaaaagaggaattccagaagggccaccccgacctccaagggcagcctggtgagttgtagcaaagctgacatgggtgccgcagcagggcttgaggctgttgatcatggacgcttgagtctctgtgttgcctagctcatccctgctctctgaacaggcacattccaagtgatttctggaaacaatttaggagcaaatctttagtctttaagagtcaagagattggcatttttaccagtgagaatgtggcttagtcatgtatgaaataaagagtaccatggttatttggaggaatgggaccgctagagtgaaagctccatgaggacagggattttgttaatattcattgctgtgaccactaagcctaaaaataaatccaaaacaatgctaacctagtagttcaggttcagtaaatattttttgactgaaatcatcaaaagtgtatatttttggttttagtgacacataattaccttatagtgtggagataatccttaaaatctatcaaaactgttgtgaaagtaatgtgacatatctgcttctc

SEQ ID NO: 90035 - DNA, 1050 bp, Homo sapiens
aggagctcactacttgttgagacaatctgtttaattctcaaccagctgcagataaaattgtaaatttaacctcttggttttagctgtcactgggatctgagaacaagtctgatccctctgctgcatgaaccattccaagggagtaatgatgactccctaggtcttcttgagagaaggcaaaccatattccattttagaaaggttttcatagaaagttatcagatttttctctctttaaacttttgacacatagtggggcaaaactcatttttttaagtaaaatatattgtatattgacaccaagtaggaaacgttatttaaaattactctttataataatgaaacaaaactgaatagtagtcataaaatggatcgattgaaatttattttctaatgtcttttgcaaaagctatagctatgatatgtctttctaggtaatgatcaataatggctttacaccagataaaaatgattatgaattttgtgccaaagtggaaaatatgattatccctgcacaagggcattttggaatatctgctgcaactggaggtcttgcaggtaaatcttgcagtctgatgatattaaaagtttgtgaggtgtgttttattgggaatagtatattagggatatgtagacttgtttatactaataactttttaagactgtttggaactttcccatcacctcttgtgccagtcttttggtctgttgagattgctaattttctacttacattgttcggtaggtgtacagttaactggggctgtatacaagtgtgtcaattacagcatcagtttgggtgctattttatagtgaaggagacatatttaaagtagaggctatcaaagtcagcaggcttaaaggctggagatcaaaccacatgacaattaactaaaatagcagtcttggctagtcacatccacagaaaggttaattgccaagtgttttaggatcctgatcattgtcacatcacatgtaaatgaatttggcaacctaaggaaaggttatttggtgactaaactttaaacaaaaccatagttaccatttttt

SEQ ID NO: 90036 - DNA, 1073 bp, Homo sapiens
ccagagggacttccgcaacaaaccctatcctgtccgagcaaagattacctattaccagaacacactgacagtaagtaacatctatttagagagaatcaaataaacaatgttacagtatcacttttcattttgaatttttgatagaaattaaatgcacttaaatttggatatgcttacatactcttcattgttactctaagagaacggaggtggcttcacagctcagtgtaagtggtcatctgttgtaaacccctgatggtatgtttccatttagtcagtaaatgtttaagccccctactgtatagcacatgtgagagatatatatatctatagatagatagatagataggtagatagatagatagacggataatctccaagccttcaggatacaaatatgagtaagacagatggactttctccccagagagcttatagcctaacagaggacacacaaatgtatcattcctatgctgtgtgataaatgctgcgttgcagacactatcaagcggtcctgtggttagaatcctgtaactgccaggtggaggtggggaagggcaggaacattttctcagagttgagctgtgccctacagggagatcaggaagttcctgggagttgggggaagagggtgtgtgtgtgtgcgagtgagtgggtgtactccaagcacagaaagcaggcataggcccttgagagagcttgaaatattttggaaaggcatgtagtttggtgtggctgggagatagaagagatcagtgagcagtgaggttgaaagggcagtaacaggccttgcacagcttcctgtagtttaacccataagaagcttttaaaaatgtttaaagggttttaagcaggaagtgaaattatcagatttgcaatttagaaagatgacttaggtcccagtattcttagtaccagttttcttggggttaggggtgaacacagttgttgagtcaaggagagttcctgaatatagccaattggacagctaattggtactatttactagcaaagaagcagcacatttgtttgtgttttatctgtttgggggaggaatgggaaatcagagggtt

SEQ ID NO: 90037 - DNA, 1001 bp, Homo sapiens
tgtagctttaattttttttatttgataagggaggtgttagccctaaacttttaaagttaaaactgtcaacatgaaattttttccaaatcattattgtacaggttactaagtctctgtaggtatatttagcagtttggaaatgatcattgagttttacctaattataacttaaagcttttttcccctgatttctgttctagatgctattccaagttcagatcaaattcgagtagcaccatctttaaaaagccaaagaggctcagtgtggacaaagacaaaagcggcctttgagaactgggaagttgaggtgacatttcgagtgactggaagaggtcgaattggagctgatggcctagtatgatcatttctttaacttagaaaatgtgcataaatgcatataccactagcctctaactgttccctattacatattttcaggcaatttggtatgcagaaaatcaaggcttggagggccctgtgtttggatcagctgatctgtggaatggtgttggaatattttttgattcttttgacaatgatggaaaggtatatttattgtcaggactgttatccactttaatacatctatcaacagagttaggctgtgagaaataatagcttattcaatgctttcatcagtttgatagtacagaactccccaagctatatggtaaatgtgataattagtctttatatagctaggaatgtatcagtttaatttacatgtgcatgattttttgtacatcagcttgagggcatagtagagccctgactctcagaactttgcagtgacccctgctcccatggccctatttaatggataaatacaaatccttagacgtaggtggtgaaaacagtagtgtttaggagactctactaaacacttacataagcacatccaagtccatgactaatgctagctcacatattcatgtctggtcatatgttaatcattctttttgatcgggccaatttttctgatgatctctcctaaaacagtt

SEQ ID NO: 90038 - DNA, 1658 bp, Homo sapiens
gcaccgccccagacccgccccctgcgcgtggccccgcccacagctgctcctggccgtgcggccgcgcggaaagcggaggccgggggcggggctcaccccttgcccttgggggtcccccgggctctgccaatcagcgagcgccctgttggccatccgcagccatccgcgcccctccctctcccgccctcctccgcgttccagaatccaagatggcgggatccaggcaaaggggtctccgggccagagttcggccgctgttctgcgccttgctgctgtcactcggtcgcttcgtccggggcgacggcgtgggaggagaccccgcggtcgcgttgccacatcgccgtttcgagtacaaatacagcttcaaggggccgcacctggtgcagagcgacgggaccgtgcccttctgggcccacgcggggagtaagccggagcagagggctgggggccgggttcctctcccccttctgctgcctcttcgcctttcatccgcggctaccctggtgtgctgaggttcccgttccagcagctgcacaccatatgcgctgtggaggggaccctcctggcagcccctccgccgggtccctcctggttcgcacggttccctccgcttgtccccgagtctttccctcacccattctgttctctctcacccgcctgctgtcttcccttctttgatctcgtcggtactttccgttggatctagaggtgtttggttacctcctacacttcctagcactcaaacttgcttctaggtatcatgtttcacaacgccacgtctctaggagaaatgtgccctacccccagccatcccaacctgagacatgttctagaagcccccttacttcctttcccgcttccaccccccacccccgatccccgatttctttgctccggtgttagcaatggttaatgcttcgcttgaaccccatgcccactgacggctcctgagatggcatatagtagtattagagtaattttttaagtctttgtatgtcagaagacattcttatactgttggaactacacattttcctctcagtgacttggtgtggtctttgatcttttctctcgtagtaacacattatgtaactttttaggagaagggatatatttttagggattgattgtttctgaacctgagactaagaatagcattacatttttagccctttaaaaaaattggaagcattgaaataatcttgggttcatattttattcactctctgtgtttggcacttttgtagataagagagccttgctagagcatttacttacgtgaaagaaaacatatctgcactttttagtgctgatgtgtcactgctgactaaggagtcaatcgtagcacttggcatgacataagctctgttcagtgaccatcagatatacccgttgaacaagtggcaaatgcctttatatgagatgaggagctctggcagtttgaattctatctttgtgtgtgattaatctttttttttttttttttttttactataaggtttagggtacatgtgcacaacgtgcaggttggttagtatgtatacatttgccatgttggtgtgctgcacccattaactagtcatttaacattaggtatatctcctaatgctatccctcccacctcccccataagtaatcttttatataaggtttttata

SEQ ID NO: 90039 - DNA, 1066 bp, Homo sapiens
gagtgaatgaaatggagggctgaatcctggatggtttaggggaatgagatgagcaattgcaaggaggatgttggttttggaaagaagatatggttgattttcagatgttttgactttgaacagtgtgaggtatcttggtgaatatttccaggggtcattggaaaatgggacttgggctggagtaagaggttaggctacagtagatgtgggaactggcacttacagtaaatgccaccatgaaggctgagcatggagacagaaggaaagagtagaggggctgaaagagaggcttaagattggaggaaaagaagacccagtacaggacagagaatgggacttcaacatcttctatatctggggagactaatagtcactttatgggaagcaaaaatttaggttgatactttccagttttattgtcccagaggtgatagttgtaaatttaatcttttgtttgctccatccagatagaaacacactttccactcttctatctgctcctctccaccccaggaggctggtctgggtgcaccatgtcagtagggctcccctgcccctggcttcctgttgggagtagccagtgagggacccataggtggagactggagagaggaaggaaagagattgaggttgggacacaggtatatcaggctccatttttacaaggttcttacagatgggctctatcctttgaccgaaggtctttgctcatctgaaagtggtctgcccagcacagtgttttcttctgctggggttggttacctctccctcccttcattcctttagcaagtgaagtggtgtcttagttttcttgggcttctataacaaatggccacaaactgagtgacttaaaataacaaaagcctgctctctcttacaggccaggagaccacaaatctgaaacctaggtatcctcagggttggttccttctggaggctccagagggagaaactggtccatgcctctgtcctagcttgccatggttgtgacaatccttggcatttctttgcttgcagatgtgtcactccaatctctgcctccatctttacgtgaccaccttctcca

SEQ ID NO: 90040 - DNA, 1051 bp, Homo sapiens
attcagagaatatcattccaataaatagctttatagttattttgtgactgatgaaaaccaacaaaaatgtattaactttttaaaaatcactgtatcaacacagcacccaattacatccactgctgcaggtaggaggcattgtgccaaattgggttaatttgtgtctgtctttagtgtcaggatcttatgattttgaaaaaacatgtttcagagaagaaaacaatgctcattttggcaatcagccaaattcagctcaactcaaaatcattatggaaattggatatacatggttcagatggatgatatactgtcaggaaacatgacttcagatattctgaatcttagagtcaactttgttgccttctgtaggttttgtcagctaattggcatgtgtgtgtgcaggcgcacatgagcatgtaaaactgcaacacgtttccttttcctgtatgcataccttgacattcatttgaaaagttcaccatgcaagaagttgcttagcaaacatctgaacagatgggtttttttcttaaaaactaccattgcttcattgtcaaatcaaagaggtcaacataacctatgctgaattcaacttaacccaagaactcatctctgttgacggaccaagggatgcaaaggaacgtcttcaagaagaactacaaaccaatgcttaaggaaataagaacacaaacaaatggaaaaacattccatcctcatggataggaagaatcaatatcatgaaaatggccatattgcccaaagtaatttatacattcaatgctatccctaccaagctaccattgactttcttcacagaattagaaaaaaactactttaaatttcatacggaaccaaaaaagagcctgtatagccaagacaatcctaagcaaaaagaacaaagctggaggcatcatgctgcctgacttcaaactatactacaaggctacagtaaccaaaacagcatggtactggtaccaaaacagatatatagacaaatggaacagagcagaggcctcagaaataacaccacacatctacaaccatccgatctttg

SEQ ID NO: 90041 - DNA, 1058 bp, Homo sapiens
aggatttagggactttattaatatgttcagataagattagcagcatttgcaaacatgatctttggcaatctacaccagaacagaacagctcagttcctttctcaagacagttgagtacttctttcctactttatcagtgccttttccaaacaaatgcctgaaaaccatgtattaaggataaatctggcgatttaaagttacagttgtttcatgtcatggtacttccatcatcttaggttgacttttaattttttttttatttttgcttccattttatagcttttctaaaggtagttttaattagggtgagtggtagattatgcatatgagcctattaagcaagcctgctccatattgtttccttgctggaaattttctctcaaagatggtcacaagagacaagtgactgacccagggactttatttaaataatgaaaatggttatgttatgaatggccctggaagagacattgtgtgtcaccctgtgggtggaaagaaaatgatactgtggtagaatgatgtggaaaccatgcatctgattgatttcctgacctgctgcctgcggggcaccctggtagccacggttgctgttgcagtgtgtgtcctgggtatttcactctcagttaccagatatggctttttcttattcactgttctcttatgcaagataatagagcctactgcagtgagctttaacactgccttttgggtctccaaggtcagaggtagtgactcggggtctttggcaatgcatttgggggatgggggagttcaggagccctgacgtaacagcctgagaagatgcacctgagactattttatgcattaggttgagttttgcattcgattttctttggggagaaaaaagcttgaaaacccagcagtgtgtttcagaagagaacaggctgtttatctgtactgttcttaaaaaaagaaaaaaaaaaaatctagtgacaacccgtcttcccctcttagctacagggtctgggtttttgcacagggcctgatgcttacttaaaagggccctatgcttagtttaatgctttgctgtcgccatc

SEQ ID NO: 90042 - DNA, 1988 bp, Homo sapiens
acattgaaacaaatgcctattgaagcaatcacataccatggaaatttccttctttactaaatctcccatatctgcttgtttaattcacgtttttctgttacagaagtagatgatcagctctccttttaaatacaggtgactgtagccacttacttagtatgttggcttatatcaagggagtagtaatttgactttattatatctgatcagtaacatggactatagagagggccagtttgagaccctcatctgcttttttttcctggataggtatctctgttctatgtgtcctcctacccctagccctgtgaaaatggaagatgatgcagcctaatggttaagaactcaggtgtgaagtcagacagacttgggatcagactccagcttcacatgcacaggctctgcacccttggacaactggccaaacctctgtgtcttgtcttgaacctatgaagagggtagcatgctgcttcctggctctctccataactgttttggccttatgtgaccctccgtcagcgaagctcttatggggtgaagaggggccctccttagataagttttccagtttcttctgcctactttctccattggatccttccttatttgcctgcataagaggagataaagtaccagagagaaacaacagataccttttccaacttctcattttttaaaaaaagtagaagattctatcagtggtcacatgtattttgtgtcaggcttcccacttcatttttacaacagcactacaaaggcatcccttttggatatggaaacagagtcatcgagaggttgaggacctttcggcctgaggaggtcaggacagagcttcagatgtccacctccaacacttggcacttcctcagatctccttcctagctgctttgtatcttcctcttctaatgtacttgcctggtctccagtattttaaaaaggataagaggtactgtttctcctaaaataaaattggtgtgtctctttatagaaagataagggaaggttttctggggtgggagaaagaaagagcaacaactttgtagtaggaagataatgctaatttcattttgtgttcttgctggatttaataacaacacaggaacatataattagtagataattctgtaattacttaaagatgagcaaaaccttgaaaatgacccaggatgtgaaaggtcttgaagcagggaggtatcttccctggaggaggccagagactatatttaaatcagatgttttacagagagatgagccatctttatctttaaaggccaaattctgcctcctcacaggggtagaggtgagtgattgttttagaaataataataaaaactttacaagaaccttatgaccaaggacccgagtggtctagatgaaattaattcatgaatcctcacaacacttagcttctctcattccttcaactacttaagaatttcagccccaggggccaaattctatgctctaatatttgaggcggtggaagtcacagcttcttttcttctcatggtcattccagaatcttctgagcaaatgattagcatttggctatggcggatacacacactggatttttttcagggacagtttaagaaatattgtcctattagtgctctatgtgtaacaactaacaaatggagttttctcttcctgggagcatgtgagtgtgattccagcttacctcctttagtttccatgacagccctcggaggttggtattgtcactgcattttatgattcgagacaaggcacagaggcttagcaagttatccaagggtgcagagcctgtgcatgtgaagctggagtctgatcccaagtctgtctgacctcacacctgagttcttaaccattaggctgcgccatctttagttttgtcagagcgcatagcagctttgatcactctgtagtcttctggcacttaacccttgttcaggccttgcttctctctgtggggtcctcttccctatgcctcttgccttccaagtcct

SEQ ID NO: 90043 - DNA, 1077 bp, Homo sapiens
tggcactgcctgtctctagcttgggagacctgtttcctccttggggaggcatgttctctgagaagggaaaggggcggctttttagttggtcatgtgcttaatatctatacttgaagctgatccaactttttaaatatgttagacaatgccatttaacctgaaatttcttactttggaacttgagttaatcacatctggggtctcccatgaatcacttagccatcatttttcagggccgcctctggctcctctttgttttctttttccattttgccaactttttgtttaagatgagcattccctaaagcggtcatctcttgatctctctcccccactctgcccactatgaccccacagcagccctcactggtttgacagggctgccctgcactctgcagctctggagggttcttgagagcccatttccctctaacccagatcctcaggttgggatgccccaagaatatgctaagcaggaggaggccagagcgcccatcacataggatctgtaacttgttataggaccacagccgagctcagctactagagattctgtgatgcctttagactttcctcttgatcccaatatggccatggtagtaggattttttaaagtaacctaggtttaataatagtccccttggtaagtgtcctctttgctctatgagtgcttgcttactttcaaccttcttattctttccttctcttctgcaaatattaaatgcctaccatgtgcactgttctagctatgtccgtgaacaaaacaaaggtcccttgtaaatcttgccttctaaagtgactgggagtaggggggattagtggagagcagacaaaagaaataacctcataccttatggaacgaggcagctggttaaataaactatatgccaagtatcatattgataaagaataaagccactcctggccctgtgctcaaaaccaatttaggagaaacaaacttataattaactgtagtatagtgtgatcaaaatatataccaaatacagtgaaaacaccttaaagatctcttctgtctttttttttttctccgacagttggtcaggacaggcttgacca

SEQ ID NO: 90044 - DNA, 1051 bp, Homo sapiens
agaggcctcacaatcatgacagaagaagaaggaagagcaaagggatgtcttatatggcatcaggcaggagagcttgtgcaggggaactcccctttataaaaccatcagatcttgtgagacttattcactattatgagaatggcatgggaaagacttgcccccgtgattcaattacctcccatcaggtccctttcacaacacatgggaattgtgggagctatgattcaagatggaatttgggtggggacacaaccaaaccatattagcacctgtcctgggatcctgctacatatagtattaggataaacaatctcatgtaggtcaaaaataactcattctaagataatgagggtctcagctttctctcttgagggcttcagggcagtggccacattctagccctgcaaatttccccttttctacctcctccaaccaaattcttctcctccaaccaggtaaatgctcctagaaagtcctagaaacagcagggttgtcttgtttagccagggtaatctctccccccactggaagacagcgagaatgaagaagcactgaggtcagaggtgaagggagaaacttctaggctacctaggagggtgctctaaggggcctggagtcaaggctctcacgtggggaaaactgtgtctctttttctgcatgtgcatgttccttctcccctctctccctcctcttcccttcccaactctttcctttcctattcccctccctcttttgacttggcttacaatggtgaagatcaaaagctgtggaagtgttgaatgggactgggaataccgccctctcttgtccagctttctgccgtgaattccctacctgcttgtctggcttgtgttggaagaattgaggtcccttttcttcagtgatgtggaccactaggagtttataaaaatggtttcatcaaaaatgaagttagatataaattcagctggaatagtttaagacctctttacctcatcaaaacaagaggagtttaaaaaaaatcactgagtttaaaacacatttaaaactcacttggaaccataagccaatg

SEQ ID NO: 90045 - DNA, 1030 bp, Homo sapiens
atacatcctaggggaaaagggtataaatgggatcccttaggaggctgtggcagtgataatgatgagagggtgctggctgaactcagaggtagcagaggagaggtgacaaatggttggattttgagtgttttaaaagtggtactaataggacttgctaatttggggtgaggacagaagtcaaggatggctctgagtttttggttatagctaggcaggttggtggcctagaaagcagatttggggagctcagtagttcagcatggattttgttccacttgagaggaaggactggcacttggacatacaggtctgggtcctcgggtgaggagctgacttgaatgaagaagccctttcccaaggctacttgattgtctcaggttagattagaaggcctgatcccaggttttggaacgtgttctatcccgtcatatcttatgactcccatccatcccacgaagccatggacatcgcggtggttacagggaatgtccatggcagccctgttggtctggagcatgaattggactattgacatgatcaggtaaaaagctgccatctttaggctggaagagcattaagatagattttttccatcacctcatgtctcttggagtaggggcagtaagactggaagagaaaagttaggaaaaaataccattttgtcccaagagaatccaatataagaaaaagcatattctccttattatttttaatgaaaaatagtagcttccacttagtggatccttgtgtaatatttactaattaaaaataaagaatatccaaaaagatggaagtctgaatctggatttcttttttgaggctggatatcactctgttgcccaggctggagtgcagtggcacgatcaaaattcactgcagtctcagcttgcccccaggctcaggtgattctcccacctcagcctcccgagtagctgggactacaggcatgcaccaccacactcggataattttttgtattttttgtagagacggggtgtcgttatgttgcccaggctggtcttgaactctt

SEQ ID NO: 90046 - DNA, 1048 bp, Homo sapiens
aactgtgtgttaaatgctttttaaaaactcgctgtgattttggctttggggttcatggaactccacgtggaggctaagtggtagggatgccccaggtgcctctctgccctgccggtattcatctgtccagcccgtgctgtctcatgaggcagtgttcttgcttagggcagctcaatgttcccatgggaaatagtgacatgggggatgtaaaacacccacttttctttgagataatacaactgtgttgccaagtcttgtgagaatgtgaaaattaatgtgatgtttttgcaaatgtgtttacttggagtgctttgaagagcaaggtccttttaattagaatagtactaccagattgatagcattgggctctaggtaaggacacatttgaggaaagactgtataatgcacttctctggcaagtcaccaagttcccatggcgggggagtgggcttcgataatgtcaaaacacatataaaataatataaactctttgctccagtgtgaatcccagctctactacttggtggttttgtgaccttgagcagttttaatatctgtgctttaattttctcatctgtaaaatgagcatccaattggtacttaaactatagggctgctgtgaggattgtgccttaatacatgtaaaatgctttgaaaaattcacgacacataggaagtgctatgttagtaatacctcccatcgtcatcactacatcttgccaagtctgcatgttgaatgttttagatgctcaatggatgtttgttgaattttgtgagtcgtatgaacttcatctttttgaaagagcaatttgagaccacagccagaaacatcactcgtttgcagatgctattttcaaatgtaggagagcccagaaacctagtgccctggggaaattagagtatctttgtttcctgctacctccctgactaacaagctactctactcatgaccataagagccagtggaaggcatagcctgaactagaacttgaagttacaccactttcatcccttccccaggattatgaagggtcttactggcagaagg

SEQ ID NO: 90047 - DNA, 1096 bp, Homo sapiens
caaacgcccctgctctccggcgccccctgccgggaagagggaaggcggcggcggccgcggaggagcaggacgcttggtccggacggagctcggcgctgggaagaagccgggagcttccctgatggtgccgccgcctccgagccggggaggagctgccaggggccagctgggcaggagcctgggtccgctgctgctgctcctggcgttgggacacacgtggacctacagagaggagccggaggacggcgacaggtaagcgctgcaagccccagcggagggcgagctcctgcttgatgcgcgcccggctcgcggggtgcgggcggtcctccccggcgcccactcccacagcgatccgcacgccctcacttctccggggataaggagagtgctcagctgtcctgggcgacacttccctccgctcccgggtatcagcctttgcgccctgccatccgtgggtcgcgtcagggatacccttcgccccgcgttcctgcctccccccgggtgccacactggctggcacagctcgtgaaccccgcttcctttctcctggagctggttcgcttcgtcgtgaccctcgcgtggctcgtccctgtggccggagtctgccccgcgtacgcgtttggggaccagcccctgcccagagcgccgggacggggagcctggcgatccccacgcgccagggattccccagcgcgcgctgcccgcctccgctctcccgctgagaatcgaacatttcctctgcactttttcatagagaaatctgctcagagagcaaaatcgcgacgactaaatacccgtgtctgaagtcttcaggcgagctcaccacatgctacaggtaagcctgggggctctgcgggctgttcgccactgcgcaccggggctggctggggaggcggcgctgtaaaggaggggtttggagacgcgcttgggaccggagcagcttttacgctggaacctgctgggtgcgtgccgcgcggtgcgaatctttgagggttggttggatcggagtcagagcaacactgagcaactgactttgcgtctagggtgtgtgccctgagatcctgaggatggttgccgctccctgaaatacttgtgt

SEQ ID NO: 90048 - DNA, 1066 bp, Homo sapiens
gaaaagtttccttttccaatctcttttctgggcttgtttacccaagtctctaattgccaaggcctctggtctctccccacccacaacgttcctcctggttaaacccttcccctcccgccactcccagctcccgccactcccagctcccgccaccactgccgctgacgacgtccagcgtttgcagatggtcaaagccgacccccttctcctcccacctcgttttgtaaggaagtaatttcggggccgagcgctctgcgccccccgccgcgggtcggcgccgccgcgggtcgggagcgtgtccgggcaggtcgcgctcagcggggtacttccccgcccgcgtcccgcgtccgctcccataacgccgtctgcggggcggggacaggggcggggacaggggcgggccgggcgtctagtttccctacgtcaccagggaagttctcactggacaaaagcgtggtctctggcgcggggatctcagagtttcccgggcactcaccgtgtgtagttggcatctccgcgcgtccggacacccgatcccagcatccctgcctgcaggactgttcgtgttcagctcgcgtcctgcagctgtccgaggtgctccagttggaggctgaggttcccgggctctgtagctgagtgggcggcggcaccggcggagatgcctgggaagaaggcgcgcaagaacgctcaaccgagccccgcgcgggctccagcaggtaccgacccgctggggccagcgaagacccaggccgggcggggtcggggccggggtcgaggtctcggctggggcgggctcagctcgccggggctcaagcacagactgcacgggggtcaaggtcgggccaggtctgtgccctggcgcgagccttaggggcgcctccagaaagttcttcggggtttttccccaggaccggcgggtacggcgggtacggcgagggaccaagccggatttgcgattgggatgcagctgcgtttcaccaggggcaaaaagctcctttcctcctctctttcctcctcgccacttgcccttccccggggccacgaggaacaagtgcaagtgtaggcg

SEQ ID NO: 90049 - DNA, 2331 bp, Homo sapiens
tttgtagcattgcttttaaaataaacaaagtggttttacaatgttctcacatcccaaagaatgataatgctactctttgtggtatttgacatatttgaaagtaaggtaacacttgcctcatccaggatgcgttttttaaaaactcaaagtaaatgtctttattcttaccttaacgattgctttcggtgagtcacaatgtgtgtaagtgtgtgtgtgtgtcacatttggaaaacaggtgcacataaagccaaagttaagagaaatgcttcctgggatactcaatttgtcactagtgtgggcgtattaggttttgctggttacagtctgtaatatcatcaatgttcatgtccatgttttgctttccttctcagagctggaagtcgagtgtgctactcaactcaggagatttggagacaaactgaacttccggcagaaacttctgaatctgatatccaaactcttctgctcaggaacctgactgcatcaaaaacttgcatgaggggactccttcaaaagagttttctcaggaggtgcacgtttcatcaatttgaagaaagactgcattgtaattgagaggaatgtgaaggtgcattcatgggtgcccttggaaacggaagatggaatacatcaaagtgaatttctgttcaagttttcccagattatcattctttgggatgagagaacattataaaaccactttgtttattttaaagcaagaatggaagacccttgaaaataaagaagtaattattgacacatttcttttttacttagagaatcgttctagtgtttttgccgaagattaccgctggcctactgtgaagggagatgacctgtgattagactgggcggctggggagaaacagttcagtgcattgttgttgttgctgtttttggtgttttgcttttcagtgccaactcagcacattgtatatgattcggtttatacatattaccttgttataatgaaaaaactcattctgagaacactgaaatgttatactcagtgttgatttcttcggtcactacacaacgtaaaatcatttgtttcttttgactcaaattgtattgcttctgttcagatgatctttcattcaatgtgttcctgttgggcgttactagaaactatggaaaactggaaaataactttgaaaaaattggataaagtataggagggttacttggggccagtaaatcagtagactgaacattcaatataataaaagaacatggggattttgtataaccagggataataaaaagaaaaaagaagttaatttttaattgatgtttttgaaacttagtagaacaaatattcagaagtaacttgataagatatgaatgtttctaaagaagtttctaaaggttcggaaaatgctccttgtcacattagtgtgcatcctacaaaaagtgatctcttaatgtaaattaagaatattttcataattggaatatacttttcttaaaaaaaaggaacagttagttctcatctagaatgaaagttccatatatgcattggtgaatatatatgtatacacatacttacatacttatatgggtatctgtatagataatttgtattagagtattatatagcttcttagtagggtctcaagtaagtttcattttttttatctgggctatatacagtcctcaaataaataatgtcttgattttatttcagcaggaataattttatttattttgcctatttataattaaagtatttttctttagtttgaaaatgtgtattaaagttacatttttgagttacaagagtcttataactacttgaatttttagttaaaatgtcttaatgtaggttgtagtcactttagatggaaaattacctcacatctgttttcttcagtattacttaagattgtttatttagtggtagagagttttttttttcagcctagaggcagctattttaccatctggtatttatggtctaatttgtatttaaacatatgcacacatataaaagttgatactgtggcagtaaactattaaaagttttcactgttcttttctgtgtgttaattttgtcttcatcttgtaagctactaattactaagtgttcattatcaagccaaagtattttaactgatttccatcagcagacatcctctgaccttctgaccacactgtctcctcccagtagttggagtagaaaatataggggagtttgcatgatttctgctctcaagggacttacactttaattgggaggggaaatagtgaaaaataggaaatgaatgcccaacataggtcctttttttttttttttctgagacagagtcttgctctgtcgcccaggctggagtg

SEQ ID NO: 90050 - DNA, 1026 bp, Homo sapiens
gagatgtcttatttaccaacaaatccaccagggagcattcttatttgctggctcggcgtctctctcagcagtcaccggagtgccggagggggaagcgcgatttacggaagactattacccagaagaaaagatgtttgtttttcacaagccaaagatgtaccgaagtatagagggctactgtatttgcagagctaagtcctccagttctcgattcactgacagtaaacgctatgaaaaggacttccagagctgttttggattgcatgagactcgttcaggagacatctgcaatgcctgtgtcctgcttgtgaaaagatggaagaagttgccagcaggatcaaaaaaaaaaactggaatcatgtggtagatgcaagggttggacccagtctaaagactacattgaaaccaaagaaagtgaaaactctatctgggaacaggataaaaagcaaccagatcagtaaactgcagaaggaatttaaacgtcataattctgatgctcacaataccacctcaagtgcctccccagctccatctcctcgttacagtaaccagtcagatgacggctcagatacagagatggcttctggttctaacagaacaccagttttttcctttttagatctcacatactggaaaagacagaagatatgttgtgggatcaactataaaggccgttttggggaagtcctcattgacacacatcccttcaagccttgctgcagcaataagaaagcagctgccgagaagccagaggagcaggggccagagcctctgcccatctccactcaggagtggtgactgaggtttttatgtagaaggggaacaaaaaaaatctgaattttgaaaagaccacaaagcagcaaactgaccctctttttttttttttttttttttttttttgagacggagttttgctcttgttacccaggcaggagtgcagtggcgtgatcttggctcactgcaacttccgtctcccgggttcaagtgattctcctgccttagcctcccaagtagctgggtttatat

SEQ ID NO: 90051 - DNA, 1085 bp, Homo sapiens
gaggcacgatattgaaaatgctgcatgaaatcttggttctgtcgcccaagatacaataataatccacgggtaaaataaggatttacccagcaattttaaagattaataaaatcatatgtataactagtacatgctcaataaatgagagctgagatacagagatgggacctttaaaaatggagcatgaaaaaagagacccttttccttggcagttaaaaaaatggaacatttgtttaattaaaaaaaaattgtcaactttttttttttttttttaacaagcactggcaaattttattaaagggaaattttgcatggtttatttttcaccagtctgttctggcatgcttctaatggtgtcagaatcacctggatcaatgatagccagtgtgcatactctgtagtattttcctcatgctgcgcccagttcaatattattgccactgtagtgatggacaccagttttgaccaacattgcatagtactccatttctgatttcttcaaagttggacagttgttacagagaatgaccaattttgctttgccttgtctgatcatcttcagagtctgcttgtaccccagcacatgcttctcactttttataacaagttagagcctagaattgatcaactccagcgacttttttgtcttctttgcagccaccatctttctgccttaggtgtgggatggcccccaaccaggagctgctgctaagatggcccgggagcgagaaaggccattgtcaactcttaaaagactgatatagggttgggtttggtggctcatgcctttgatcccagcactttgcaaagccaagtgaaagatggcttgaggccaggagtctgagaccagcctgggcaatataccaagacccccatctttaaaaaataaaaataaaaataaaaccctaaaaattagctggggtaggccaagctactccagggggctgaggcaggaggattgcttcagcccaggagttcgagactgcagtgagttatgatcacaccactgcactccaggctgggtgacagagcaagaccccatctctaaataattaaataaaataaattttaaaaaactattataa

SEQ ID NO: 90052 - DNA, 1058 bp, Homo sapiens
ataaatctgaatgtcttaaaagcattcttgcttgctctctctgttatagatggtgtcttagccagtcctgagttttccaatgaacccaattttaatatatggtatttttgtatgccaaactggtgtcttgtcctttgtatatgtggtaatgttgattttatgactaccgtaaaaacacatttgctatgattaaagttcataaaatgatttcaaatagactcacgtattggttttttcccccctcctaaccccaggaaaagaaaaaaaattggctgagattttcatcatcagttattctaaggattttagtagacttgggtgataaagcagtaagaagatcctgagccaaggattttaagtggaggtgactttcaagtagctcctccgagaggccaaagaacacatctttaatgagtaagcccaagcttgtctttgcaacttgggttttcttctggtggcccttcctttatcctccagtgtttagaaattgtgctgcatgccccaggtcccaagtgaaccatatacagaacaacttgttgcaccgtatacagaacaacttcatgcagcccctgtgaagtagggtagagtgacttggcctcttggccctgagcctggaaaggtgtccttcaattaatgttctcatgaatagggtattttggagagacttttttgataaaaagcatcctgtcttttgataactggatcatatcaatgaatttcaatttagtttagcaggtaccctactcctaattaagggctatcaatgacctgatatgcatgggtgcaggtgtaagcatgctctggctttctgggaaattataaagtaatccccacagttttaaaagtgagatgtggccaggcacagtggttcatgcctgtaatcccagctttttggaaggccaaggctggaggatcacttgaggccaggagtttgagaccagcctaggcaactcagtgggacccctgtctctacaaaaattaatgaggaaattagccaggcatggtggtgcacacctgtagtcctagtttaatcatgaggctgagcctggaagtcgctt

SEQ ID NO: 90053 - DNA, 1529 bp, Homo sapiens
gagagcgtgaggtttggaataaatggaaatacttttttatggtataacaagttatatggtgacttgcctgtcttttccttcatggataaaaatcagagtcaacaagcccaacgtaaaagcctctgtcaaggaatacaaatgcttctagcaaatcctagtgacactgtttctttcatggtttcctgtccaaagtacatctgcttataaactttctcatttttgtttacatcattgttgtgccaagttcatggatgcataaaagctgaggaagttggtgggtaagtggcttgtctgagtttatgaagatgataagcttccgggtgtgtgcatgtgtgtgcgtgcgtgtgtgtgtgcccactcagttacatgagttttccttttcattcatttactggacattcatttactttgaagttccttctaaaacctgtacttattctaatgatctgtggtgtcttcctggcaccctcctggatcagctaagttcttgatgccaaactttgctacatcctttattgaaggtgtgagtgtaaagtaaacctaaacaaatggaaataacacaaaagtttgtgttcctttatcaagtgggtctctgggtgttcacctttagtgccgtctgtggtgaggtgacagggcattccacatttagttcttttccagtaacagaatctcttgtcaggtgcaggagacaatacctccatggcccatgtttatttggaagtaggggttgtttttatgtatcctaaaagatgaatcttggagaccagttttctttgaacacttgagttgcttggaagtatgattggaagaagacccctgacagcttttgaccccacctagtgattttgtggagttagcagttgaaatttgaggatagacattccctatttctttggattttactaattagggttttgtggtcagtgaaatgattaagactgggctttcctttagctcatcctacttagagagacatggtgaacttaggaaattttatataacaatcgagattacctctgagatgttagaatattctcagaatctcttctgataacctcaaatgcttataaaaacctgtgttcttacaaatggtgaatgctttttagttactctcatcatgaaactgggaaccctaagaacctcaagtataggcaatttattgtccatctgattttaagtcatctatgaagatgtgtggatgctgctggtctttttgcactgttgcctttgtaatgcctgctcctgacttgactacatgcttccctgctctgtctttctgccacataactacaaggcacactactgatttatgcttttcattcatttcctggacattcatttactttgaagttccttctaaaacctgtacttatttttttttatttttattttttgagacggagtcttgcttttgttgcccaggcaggagtgcaatgggtgatcttggctcactgcaacctctgcttcccgggttcatgagattctcctgcctcagactcctgagtagctgggattacaggtgcctgcca

SEQ ID NO: 90054 - DNA, 1005 bp, Homo sapiens
ccagtgtatatagttatgtgagagattctgtcagagtctgggagcttaggatttttcggaatacactactaaaaagctgtgcacaaaaaaaattttttttttttttttgagatggagtttcgctcttgttgccctggctggagtgcaatggcgggatctcggctcactgcaacctctgcctcctgggttcaagcgattctcctgcctcagcctcctgagtagctggggttacaggcgtgcgccaccacacctggctaattttgtattttttcagtagagatggggtttctccgtgttggtcaggctggtctcgaactcctgacctcaggtgattcgcctgcctcagcctcccaaagtgctgggattacaggtgtgagccatcgtgcctggcctcaaaaaaatgtttttacaatcctccctctctagttactgtttcttcctgaccccataccagaaagtggaataaatcatacccttttgtattcccattcctttgtgtagttccctttccccggaacacgctttctccctatccttcctctctgccctcccgcaaaacacagcatagtgatggaaagctataagtaccatatatacagtcgtcactcagtatctatggggcactgattccaggaacccccttagaaaccaagatccatgcatgctcaagtccctgatatgatatgccatagtttttgcatataacctatgcacttcctcgtgtatactttaaatcgtcactagattacttataaagcctaatacaatgtaaatgctatgcaaatgtaatgtaaacatgatgtaaatgtaaacacaatataaatgtaagttgttgttatactgtatcgtttagcaagtaatgacaaaatgaagaagtctgtgcacattcggagtggaggtaaccatttagtattatttttcctgaatatttttgatccatggttggttgaatccacagatatgcgacccagatatggagggcagactgtactttcttcgatactt

SEQ ID NO: 90055 - DNA, 1072 bp, Homo sapiens
ggtggagccgccggggagggcggtgccgcggggagcggagcccagcctctccccccaccccctttggtgccggagtctcagtgacacaaaaagctctcgctcggtgccgagcgcctggcggcggtgtccgaccgcgaacgcggagggcggccgggcaggtgggggtgccgcccgaagggccgggccgggtgctggggctgcaggcgccgccgccgcgctgtcagcgtccgccccgtggctctcggccggaggagcggcggccgccggcccggggcgcgagtctggctgaaaggagcgggcgcgccgggaccacccggcgatgctgtcgccgccgccgccgcctctgtagcgagcacccgagcccgccgcggagaaaggtcagtgagtttcggtttgtttctctgctctgccggctccggatcgggggcggacagaggggtgcgcagggatgtctgcgcccctacggcggccgcgccgaagccgtggaagcgggaaagggcagctgccgcctgctgtaactggggagatcttctggaccgcggagggggtggcggggccgcagggtcccggggaggggagcgcggggtctggcggggcacgggggaggtggtcccgggagttgcgtgtctcctgagagctggcggagttgggcgggcggccgcggcggggagcggcgctgtcggctgctcggccgagtcctcggatgccccctggagctccggtccgagggagctttcctcgtgcccgcgccgcgcgcgcccctgggtgtgcacgtgcgcgcgcgcccgccccagttgcgcccccggcccgcacacaccccggctcatcttctcccggtccccttgtctcgcgccttctccagccctagaagttgccccagggcccctcccgggattagagagcgctgtgaagggccagatgttgggggtcttttgtgcagacacacgcgcctggggcgcttgctcctggaaggacagcggcaggacaaagccagctggactcgtggggcgctgctcgggaagcggcggtccccaatcccgcctggggtcggggcatggcttggggagcgctg

SEQ ID NO: 90056 - DNA, 1048 bp, Homo sapiens
gtgagtcctctacacagagtgaccacttacagaaaacctctctcctttgtctgtttcctatgccttctgctccaggtgggtgttcctgctcatggttctttcatgccatcccttctttcccagactcctctccctccttatcttctgacccacaaccctctcttcatttctcagccctccagaaaccccctggagataagctaagaataacatgtttcttctaaagggaaggatatacattcaagaaagaaaaagagaaaatttagagtgcgagggggcagagacagaaattaaaagagggggcgtacaatagccccaaagtggaaacagcccaaacttccaacaacagataaatggataaacaaaatgtggcatatacatacaacagaatattactcagccatgaaaaggaatgaagtgctgatacatgtcataatatagacgaaccccaaaatgttatgctaagtgaaagaaaccagacacagaatgctacatattttatgattccatttataataaatatccagaatagatgtatccataaagacagaaggcaaattggggttgccagggatggggtgtggaggttggggtaggaggagataggatatgggtatgggctttactttggagtgttagaaatgttttggaactagatagagatggtggttgtacagcattgtagaggcattaaatgtcataaaattgttggctctaaaatggtgaattttatattatataaatttcatctcagtaaagttaaaaaaatttatgaaggggagaaagatgtgtcaaaacttccaattccacttcttttagatttcataaccttcacattggcctttctcctaaattgtgtctcagagaaagtttcacatttaatttagatactaagccccacggattggtcctgggttgacctccaaatcttgttaagtattgaatcagtcttcagtaaaacagccctaataacaatgggaagaataaagtcatcctgtgagtcagtgagaggactgggaatggatcccgaggagcattaccttgcagt

SEQ ID NO: 90057 - DNA, 1141 bp, Homo sapiens
gtaagcaaaattgtgatggttgctgccttcatggagcacaaacaaatgaaaaatagcaactgtggtttctgcgaccaaagagagcagtaggtgattctgtgagagactgtgatgggacatgggacacctgacctagtctggggagtcaataaaggcttccctaaggcaatgcttgacctgcaggtgggagatgagtcatttaaatggtaggagggggtgcatagttggtgttcagggcagatgggctatttgtgcagtgacccaggggctggtgggcttgcaggttcaggaactgaaagaagggcaatggagggcaatgcatctggagtacagagcatgaaggctggtgtcaagagatgggaaagaatagaaagagctgtgttttattcacgaggagaaaccctcagaaagtgggacagggcacctgatcaagagcatgctttctcctataccctctccattctgagtcacggagaacatgctgtaaggaggcagaagtgataaaaactggtgacattaaatcagtctttcatctggcgaatgtgaagagtgcctaatatgtaggaggcattgttctaggtcctaggatgtaagagatgaaccagaaatgtcctgatttctcctcataagtctaacagtctaagtaggatgtgacaattcataatcatagtcatatgaataaacagtgcattgcaaatgacacagtgctacaaaagaacagtgtaggatgctctgagatcctaacaggggtcctaactttgcgtgtgtttggcaggaggctcaaggatggttcccactgaagactaggttgactaagagttattggtataattattagaaagttactgggaacttcaattatccctcctatttctactcccaatctttatttcattaggtgaccttgaccttcatgcttcctccctcttattaaataaaaactatgcgaggccattgttttggactaaactcctgcactgggttccaacagaccagactaaaaatcaagatggaatcacccatgctcaccaaacccaccctgagttgttgttatctggccttccaagaaatcagaagagagagatagcccaatttcccaaagagacgagtttcaatcttcaatcagcatgaaaatgatatt

SEQ ID NO: 90058 - DNA, 2000 bp, Homo sapiens
gcataaaatctagctggacaactaagaagctatggtagcaaacagtgatgttgatggaatgagaatcatgaactttcatattacctcaaaggatttttttatcagtttttttcacacatcagaaaaaactgactgtataaacacttatcactgacctttttctatgtgtagttttgccttttatcttttcccaaatttttataaagagaaattaataaatattttattacaacattgtaaagggtgctcagtttttttatctttctttattttgctctttgaggcatatctttttcttaattttgtcctttcaggtcagtgtgagtctgtagaataggttgaacttccttctgacagtatcatagagtttgtggagtttgtgttgtgtgcctgcagccacaggctcgccttgctgcaccgtaactggccccttcagactcacatgggaacaagccttttctgttgcagtttcccagatatctttaaatgttttgaaatgtatatttttatgttgcaaaacagaaaaaagaaacgagttagggaaaaagtatttctatttaaggtatttattttttcattctacctatgccatagatttctgaatcaagacttaggacatttgctgattaacaatgtttaaattaggaattgttataagaattaaaataggcagaacaagttgtgaaaatattgaaccaaaaaaaggccatgctatcatcttagagggcccatgaataaaccttagagggaatcctaaggctttaggaaaccgctgcagcttgtctgtcattttccaatatgttaattattatacttagtgtacagtatttagaatacaaaatgcttttttattttttaggaaaataatgttataaatgattgtatattttcatagtaatgtctttataattatttattaatgatagagctgaattagaaaagctcttcatccattataatatggtttctcatgaaaaacttattacaaatttcagccaactcagatattaagaacatcagtgtcaatcctcctcccctcctgcgacctttttacacttgttttggtggactaggggctccttttctcctcctttttgacatataactgtgccattaaaaacatgatttctgatgaagctggcctagagggaatgaaggagattgcgtgggtatggtctctaggacaggcgtagctgttgcagggccaccctgtccttgggagaacctggtgagctcccatattcacactagatgccatcatgtcagggggctgaagagaatggagctaatcaactctgtcatttggagaagacccccttcagaccagttctgagaactccttcttttaagagaccagagataacttgatcatttctcaccttttcgtagttgttcttttttatgttgacattccccttactgtttttaaaatgcttcaaagcattaatgattgttatgctgtgtgctttcagtactatggcaatatctttgtagcattttcccatttctgtataagcatggttttttgtttttttttttttcgtttttgttttgagacagggtctcactcttgttcaggctagaatgcagtggcaccatctcagctcactgcaacctctgcctcctgggctcaagtgatcctgccacctcagcctcctgagtagctgagactacaggcacatgcccccacacctagctaattttaaaatattttttgatggagacagggtttcactatgttttccaggcagcagcatttttttttgactgggatttctttatgatgctttgttatttaaaaaaaaaatgagaaggaaacattaataatcaaaattatctttaattggcctcacagggctaaaatctagaattattattactcttgggtaaactcatgaaaagtacttaatattcattctataaagaaacaaaaagaacctttgagatgtgtctcttattcatttccttgggtacacttaaaacgggttacagttactgct

SEQ ID NO: 90059 - DNA, 1424 bp, Homo sapiens
ttccacagagctcacaggccagggtagaggccagcaacctatgccctttagccaaatgcagcccacctcttgattttgtacagcctgtgaactaaaaaaaatttttaattaaacatttcattttaacattattatagattcacatgaggttgtaagaaataatacagagagatctcctataccctctaccttatttccccccagtggtaactttatgcagaactatagtataacatatagtaaaaccaggatgttgacattgaaactgtcaaaagacagaacatttctaccagcacaaggatccttcatgttgccctttatagcccaggcacttccctcccacccagaaaccctccttaacccctggcaacatttaatgttttccatttctgtagttgttacttcataaatatgatacaaagtaaatcatatagtatgtaactttttggagttagcatttttttcactgtcagagtaattctctggtgattcattgttgcgtatttcagtagttcgttacttcttattgctgagtaaatccatggtatggatgtgccacagtttgtttaatcattcacctgttgaaagacatcaaggttatttcaaggttttggctattatgaataaagatcctataaacattcttgtgaacagttttttccctctggcatgcatgctcagaatcatatttgctgagtcttatattatttgcatgctgagttttaaaagaaactgccaccagagtggttgtaccagagactgtcaatccagtttctctgcatccttgccagcatttggtgctgtcaatattttttattttagctattcaagtgggtgtgtagtgatatctcattttggcttcaacttgcataatagttaatgatgttgaacactttttcatctatttatttactgactttatatcctctttgatgaaacgtctgttcatgtcttttgatcattttctaattgaattgtttgtggagctttttttactgttgagttttgagaatttattctatattttattctaggaaatagtcctttgtagctgagtgcagtggctcatgcctgtaatcccaacactgtgggagggccaaagcgggcagattgcttaagcccaagagttcaagaccagcctgggtaacatggcaagaccccatctctacagaaaatacaaaaattagctggctgtggtggtgcatgcctgtggtctcagctactcaggaggctgaggtggaggatcacctgagcccagggaggtcaaagctgcagtgaactatgatcataccactgcactccagcctgggtgacagagcaagaccctgcctaaaaaaaaaaaaaaaaaaaaataggaaaaaaaaaagtattttgttgaatgtgtggcttgcaagtgttttatcccagtctgtagcttgtctttt

SEQ ID NO: 90060 - DNA, 1064 bp, Homo sapiens
aatgatggcacaatagtcatgggaggggagtgcgaacagctgaactcatttcaagttgaaatttgatgttcctttaactctgctatggcgagatgacaccaagacttgattgatgcaagataacacaagctggatgccttatggctcaattgcatgaagatgatgagcttcacaactgtttcctgccaattatgttagcttacatgagccaagagtcagtaatttcaggccactgtaaggaaatgagtgatctgtggaatgccttttatagacagactttagattaaatttgaggatgggtcacctactggttttacaaaccgtttttgtttagacatcaaatcagatttaatattttaacctgtaagtgatggcaaaattcagcaagaaaaatctgctagcatgtaatcttttctttctttgtttttattcttaacagctttattgagtataattcataccataaaatttatctattttcattttttaatgatttaataaatgttttaagtcattttgatgatttttggcaaatgtatggagttgtgcaaccatcacaatctattttttgaacatttccatcacacagaaaataccctctacctgttcacaatctgttcccattaccatcccaagcccaggcaacaacaaatctgctttctgtctctacagatttgcctattgtggacatttcatataaacagaaaaatacaatatgtagtttttttcatctaacttcttccagttagtgtaacttttttttggcattcatctatattgcagcatgtaaaagtactttattcattgctgaataatgttccattgtttggatataccacattctgtttatcctttctataatgcttataaaagattaatcttttatggtccttgttgcttttaatctacctagctccccacctccttgcctggtttcccccctggaaccaaggtcagattgagcttttctggatttgacctccaggctctatgctgaagagtttgtactccttcactcatctcatctctgactacaaactttggtccctgaagaagttgggatg

SEQ ID NO: 90061 - DNA, 1024 bp, Homo sapiens
cttttcttcctattgcaaactagcttctcatcctgttttctttatttaatacatcacacaagctgaagtccagccacccttactgccatactgcttaccaaataatcactgatatcatctctcctttctgttcaccttttaacagtcttattatttatattgctaatcattttcttacaactgttggaagcctacagttaagatgggggtggatatatatactaatgacttatttgtttattaggtctataatgccaaggacgagttcagtataacaaaccagtgaaatgattctgcttctcttccgactcactccttaaaatgtgtattgaacaaaagtgaagtagaaaagttgtattaacattgttttttttcataacttaaaatttacttttctaattattaataatttatctagtgtctcagtgttaataattgggttcatcagcaaaaccttgtaaattttgggtagagaccacaaaaaggtagtagctgtgcatgaagattacctgatagtttatctgttaagaatgcttatggatgtaagcaatgaaaatctaactaacagtagctcagagaaatagagatttatgtcctcacgtcacatggagtctggaggttggcagcccataactctgtgatgccatcagcaaccctgcttttctgcattcctaagaatggtagattcttagattgttgcttttaccctcgtgtttttctcatcatgcctccatctgccatcgtatctcatctgccatccagacaggaacaagggaaaaggactaatgaggaaaaaggcaaggagatatgtcagccgattctccttttctgtcagggtagcagtgtctttcccaaaggccccatgtagcagatttctgactatgtctctatggccagaactctgtctggcacacattcattttaaactggaaggttgttagggaaaaggaaggtgtgggggtgtgaaacaacctgccaaaagtgtcacaattgtggccagttcatttcacagtttgagatgaca

SEQ ID NO: 90062 - DNA, 1010 bp, Homo sapiens
tgttgactgatgtgtctagaagtgagggccctgctgaattctattttattcatatgtccttcacttgaaaaagaactgtatgctgccttgaacatcatttattttccatatctccccctgttttgaaacatcaagttatatatatttttcaaaattgataattggaaagcaatacctcaagatattaacagtattagctctggattatggattttcaaccagcataaattttactatagctttatttcaaatgttttataaattttttcatatttgttataatgagtgtgaattttataatcataaataaatgtatttttttaaaaaaggcaaagattaagaagctgaatcatgtttataatgttatagttttaaataaccagatgggtttaaggatctgtgaatcaaattatcaggttatataatttatttgatttgggcattctgtgcttttcacaccctcttggaatcttttgaacattgtggttaattattagaatacattaaatggaacaaaatttgtaataggcttttatttggaatatgtattgatgtttgctgtcttttacatcgtatagcttattaatgtaggtttttaagtcagtttcatcaccgttctatgtgccattggtatcatgcttttatttcagtgtttgctcttcactagtatatataaaagttacttgagaaattgaaaatatttctgtaagcagaaatagtatttttttcaaaaagtgtttcagatgcttcagttattccttgcatcatttattgttcttttacagattttaatcccctttgttcttgttatgtgtgcttttgaagcagttcagttgactactcagttatcgtcaaaaaggtaagatgaattagtttaagaaacatttgatttgcctatttttaggagatgagagtaaactttcgaagacatttcatatgattgctattaagacactgtaacatagattgtttattacaaaaatgagaaaattttcacccgtttagtcagt

SEQ ID NO: 90063 - DNA, 1001 bp, Homo sapiens
caaaaagatgttcagcattttctcatgtgtcattctctattgaattattttaaaacatggtatcttgtttcttcctgagcctttcaagtggtctagcatgtgcttagcaggtggtgggtttacggcaagcatatatagactataactgtgtctctcagctgaaaatatctatgatacacactagatccatgtttttcttttgaaaaaatcactagcagcccactacagatatggtccaccttgctcatattagggaagaggaaaataacttactaggaactgagtgaggatgacctctcaggcctcattattctcggtacacagcctcttcaatctggctgttttaaaatgcattcacaaggagttataatggaatgttcattgaaaacaattcatggtacaagtaaaagagcaaattactctcaaggtaaaattagcatatcttttctaaatgaaaaggaaatttgtatgaaatctgagttgttttgccatttccttgactccctttaggttttcttcttagtgacagcattttttggaactggaaatatagcttctattaacaggtaattttaaatgaaagtggcatatatatataactaaaaaataatgcaacctgggacttctataccttttgttctgtaccttattatttttttttctttttgagaccaagtctcactctgttgcctagactggagggcagtggtgtgatctcggctcattgcaacctctgcctcccaggttcaagcgattctcatgcctcagcctcccgagtagctgggattacaggtgcccgccaccatgcctggctaatttttgtatttttagtagagacggggtttcactatgttggtcaggctggtctcaaactgctgaccgcaggtgatccacccgcctcagcctgccaaagtgctgggattacaggcgtgagccacggcacccagcctgcaccttgctttttatactgaatgatatattttggagattggtatgtattg

SEQ ID NO: 90064 - DNA, 1033 bp, Homo sapiens
ttgttttaatattggcaaatatgatatatcaccattgttttcatttccatatgttatcaataaggtcaaacataattttcgtgtttgtgttcttgttgcgcccatttttttgaaaatttagagtgttccttttcctcttctatgtatgttaataattttacctcaagaattatctttttacctttgtcttcatgccttctttctcttttatgtatatctgtcatttgctttatgaatggcttttatatatttctattattttaaacacataattatctcaagatttcacatcactcaaaaaagatgatgttggagttaaaatttaaatattactttcctactttcttcttaagttttgtaatattgtgacttagaagtattatcaaattgttttaattttgagaaagacctcagtgtaaatttgcatttttacttattttactgtttttttcttttcatttctacctttccccacctgttaggtatgaagctctctttccactagtgttgtcttgtttgatgtttgtctggataaacatagaacaagaaactctacaacaatctggtgtttgctgtaaacaaaaggtagctggtcaaagtcatttttgtttttatttgagactattagtctctatcctataaggaagttgcaatattatttcaaaaattctttctacttaaaattttagtgttaaaagttttagttgtttggcattaataattaagttaaacttaataatagataaggaagattttttacttatcacagaaaagcacaattttgttgttgtataggttgggcttttcttagtgattacttgaggatcattgatttaaaaaagtcaatataagtgaaggaatacagaaaagaatgctttttatcttattttcttcatatttcacatccaatttttccttccgtcaatttatcttggaagaattttaatgttgtcacaagtcaatttatgaattttattataaggtgacatttacgtttctattgttgtttttcactttctggtcatcctaatcc

SEQ ID NO: 90065 - DNA, 1020 bp, Homo sapiens
ttatttgctttttatttttttatttcttaacaaccaccgtatgtccaacagattaactgacttttaaaatcagacatattgaaatgttattccttccagttaaaatatgtatcagtttattatgattggagctacacatctggaaaaaaagtcagaagctactcatctaagggtattaaaaaatgtaacttcatagtcttaaatcttgcagtgacttgactttaggtgaaattgacattacatgtaacttaatttagaagatgttgactaataataataaccacagttaacagttactaagcactatgtgctaggcactatgctcagggaacattgtataggtgaaattgtatttaatcctcacaactttttaatgttatctctatttgacaggtgggtaaatttctgcttggatcagttaatgaacttgccctatagtttaaacagttagtaagtgattcagccgggatttcatcccaacttgtctatcttcaacctctagagcactagggggattagaaagttatgcacatttccttcccagaatagagatggaggagtttatgttttgccaccccacccacttcatctgcccttcctccacttgggtagttgcttttattatcccgggggagagtcgatacatctctcatgcatggtgaagtcattcctgtttctcttttccaaggggcatactgcaactgtcagtgcatactttacggtgggaaaacttggagaaggaatgggttaggaaaaaatcagtttctgaggagtaagttgtctttgaactaagatataaatgcctaattaagcaaagagtgctaaatcttgagtaatacttttatttcattagaaaataattcatttttgggtatatacccagtaatgggatggctgggtcaaatggtatttctagttctagatccctgaggaatcgccacactgacttccacaatagttgaactagtttacagtcccaccaacagtgtaaaagtgttcctatttctccgcatcctctcc

SEQ ID NO: 90066 - DNA, 1047 bp, Homo sapiens
agctgtttttcctgctagaaataatgtgggttatatatgtagatactttttgcatgagtaagtttcataatcacaaaatacatgttgtagatactgataatatacttgtttagctatcttttatattgtaaatttttgtaaatttgcccaattcaggctaaatattatagtatttgatatgcctaaaatttttttaaattaaattatagaagcaaggtagagatacttagaaaattgtggggagaggttacaaataaccccatccagcagtatctttatcctaagattaaaagttttcttaaaatcttaaaacttaaaagttttcttaaaaatctgaaaatgtacccattttgctacttcctcttgattaagccaaatgactgagaggttctgtattagagtaagatgtctcatatttccatctgatatgtgttcgtaaatatctgaagaaaatttaaaattaattgtatttcaaaacaggatgggtgcaggcttgctggttcttctgttatccctgtgtgttgtaacatctctcatgaaaagaaaagatagctttataaaggaagagctattggtacatctgttacaggtcagttacagattttcaatactatgttatactaatgatatactgaaatgtgtcttatggttatatttaattatgttcataaaatgccattacctttatgctacttagtatctgccagctgagaagaaagctttcatttaagatgctacatggaaatgtgttctttaagaggtatgaaatagcaaaaggtccataagaggcagcccagtgatgcctgaagagcagaggttatggaaactgtattgaccaaaaagttgaactgaaaagggcttcatctggactgagattctacattgtcctcatttgggtcagggaaggtcacttccttgaagtgaaagcagcctggggtatgtttatattaagaatagccagtttaagacttcagttaatgtcccaggtgaaaataaacttcagcatggttggtggctttggtgtggtgaaaataactttgaacttga

SEQ ID NO: 90067 - DNA, 2051 bp, Homo sapiens
aatagaaccaggctatatatatatataatatatatacatatttatatatatatatgtattatatatatattttttattatgctttaagttctagggtacatgtgcacaatgtgcaggtttgttacatatgtacacatgtgccatgtagtataagaaattggcttatgtgattgtggggcctagttaggcaagtcctaaattcacaggtcaggctgtcaggaaaggcagactgaactcgccagcaggagctgaagctgcactcaacaggtagaatttctcctttagggaacccttagttttgctcttaaaggttttcaacggattgaatgaggactacccagattatctaggataatctcctgtacttaaagtccctgacctttacaccatgcagactatcactagtgaattagattgatgaattctctgttttggcaggtgattgggaatagtgcatatgactgaatgaagtttctattgggtgggcaatagagagagaagcttagatagcttgtcacattggagcttgaatagataagacattgttccaaatgataattaagtcccataccttattatggattaaataggcttttgcgagttatccagagaactcaatcaacatttataaaatattcctaaaaggaaacatgttcagaattctgaacaagttacttgcaaacaaactttaaggccatagtcacttttaagttgagaattgcttaattgcagcaattccaggttatctaggtttttcctctctaatatgctcctcaaataatagatttttttccttgtcttaatgcagctctttgattaatcatctagtagtataaccattgaaagaaagtaataggttttctttactttataaaatctcttttaaaacctatcaattaccattggtttggaagtgtttcaatgttttgtttgatttttcagaaaccaagccatctcctgccttgtagttttgtagctattggcattttagtagcattttttctgctgattcaagcctgtccctggacatattatgtatatggtttgttgccactgccaatatggtatgcggttctaagagagtaagtaatgcatcttgctgccttgttttttcacttcattgacagttaaatctgtatttaaaatgcagtagatttctgtaccataagtcatcaaatatatttataatactgtactttcaaacctccagtccctctcacttcatttataactgcataaatgttgagtaggatataaacattctttctgttgtacttttcccttttgacttcatctttatttttctgaagtggcagtgttcacttctttgtgtatcttttatagaaaaaaaatggaataaaagtaacgattaatattgatcatactatgcctagactaacttgcattttgaacttgtgtcatcatctcagattccaatatatcttcatatttgacaaagatatttgcatgttttatttccatacattttgactcctcctttcctagcgattgtgtagatctagataaattaaactttgtagttaaatctaatacggttatatttacacacagagattagtctatatttttcacatgtgctgtggttctacctgtaagtgcttcctcacaggttgtacttaaaatagagtgtattgttaacattgtagaaaacattagaagtaaggctctttggtgagtttcaaacacttttaataaaaccactagaagggagtactagttcatgctcactggcagctggagtcatgttgcagatcttattggtttctatttttacaccagtaatctataatttaaacttagtcatggatatcaaagtattttctgagcaaaccagacccctaaagtcaatgaaagaatgagagcctattataataagggtatccccaaggttggcttaacatgtgcatcgtgacactatgcataattttattctaatttttcttaactttagctttgactgcttcttccttcttttaaaacatgatgtattaaaaatatttcggagttggctgggtgcaagggctcacgcc

SEQ ID NO: 90068 - DNA, 2092 bp, Homo sapiens
attttaaaatgataagctattcttctcctgtaaaatattaagctacttaatgatgttttataactgatttgagtaatctcatatgagaaaaaatataaatatggccattatcattatttgggacctatattagagagccttcatttcttttatgagttgtctgaatatcatttccacaaacacacatatacaacacaaatagtttacatttaaaatgccctttcttattaagattaaaaagttcattttattccaaatttttctcatactttaaaagaagatcctggaacaattaaaatctgttcttaatccatcatctacagttattcactaattttaatacaacagtttggctgttaggaatttaaaattttcctttctttaaaatgtaggttttcttattatttctgttagcaagttatatatgttttttctccataggtctccctttgcaaggagctaattcatcttgcattgaaaggattgtcctattatcacacatatgacagattctttttgggcgtcaatgttgttattggttttgtgggatggatatcttatgcctctttgttgatcatcaagtctcattccaaccttataaaaggtgttagtaaagaagtgaaggtacgtttagaaaatgtgaggattcagatgatggtataaaatcactagtactgaatccagtgtaatgagtttataggatgtgcaagtcattgttctaagctaactcttgtttatctttcatttgcttttattgtattggatttttcctcagttatctctgtttcttcagttgagaaaaagatatattgataataatgatcctataacttaagaaagctataaagatagaggtgtaagtaatttaagtgctcctatgttatcaatggtgtcgaccttctgttttattttataactagcattttataagtattccatatctttctagtacaactggtcagaaaactacttcaaaacaatatgtttaattttatttgatattaaaagtttgggagctagagaacaataaaattatttgctcataatgtttcttcttaaatgatgtatacattttttaattacttaccttcttttaactttttgaagtttctcaaaatgcagatttctagacctctccaagtattcttattttaagaatttgttcctactttactatgctttcagtgaaaaaataaaaattaaaaaaatctctttaatgatacttcatattgctgagacaatataacagtatgtatatggttttactacattaaaacactttactcttttaaaatatatttctaactatcatttaccaggggcactatgccactttcatttcctttgcttcattctctttaatgattattaccatgttcaagttctctaaaaagtaatatatcctggtggtgtatttttaataatagtctgcagatatttccagtggtaacttttccaattttatattttattattctgtaatggaagtaaggccattagtgtttattataattttgtataatgctttaatgtatcttaaataatttcccccaagtaattttaattatttgagtgtatgtgaaattggctggaatgggaattgtatctaggcattcttagaactcataacagtgctagaagtagacataatttatgtttgcaaaaaaggaagctgaagctgaggaggattaagttacttattaaaggccactcagatagcatgtgagggactgagactttaatccagagcagtcgtgggccagagagtgccttttcatgtttatcttaatattcagtttattgagaaaaaaatatgtttttatattgatatgttaacaagatttcatagctgatagttcttcattattcgttaatctgataatacagccaatatttaattgagtgtatggtacaatgctagatgctggcaagggtatccaatcttttggctaccctaagccacattggaaaaagaataattgtcctggggcacacataaaatacactatcaacagctgatgagctttaaagctcattcaaagctgtcctggaccacaggtggcctgtgggctgcagactggacaagcttgct

SEQ ID NO: 90069 - DNA, 1006 bp, Homo sapiens
tacctttggcatgtcccaagttttataaatagtgcatttaggaaaaattacaaattaccctgactcctgtttctttaccttaatacttccaatataatataacataacataatatataatgtaaatatttctccttaagaatttttttctcttattcttcataagacttcacttaacagaatgtctgttaaattagcttaagtaatttagcttcagacaagctttttttcctttctttttattttaaattttaggtacattacaaatggcaacgtatggtagtctcttatttttcttccttttttaggtctgcaatattttgatagcattgtattcaaaatttattgattcattttatgtgctttagcactttgctaagtattattgtggatattaatggaatataagacattatcttggcccacatggaggctaaaatttaattgaagagaaataaactgatcattagaccactaactgaagtgctaatgatgtgaagtgagatttggagtagaccataaaggatgatgaatatttgattttagaaagcaaagaggggaacatctttatgataccagctaggtgaagcttgaagagtttcaccattatgcagctgagggtacacatttgcgataatgggaaattaagtgaagtagcagcagagggtcatcaatagtccaggaagattagaattgatgaagtagacagtgagatgcccatatcaattgtaagtgagaggatgcaatcagtattttaggaagctgagtggatcagagcaagaggaaggaggtcaactagaaagcttttatggaaatttgggaaattcaacttagatatagccttccaaaaaatgcctatgcactttggcacagtaattgctatactaaggcttctgggaaaacacttcaaaatgtgtggtatctgaaggtacagagaactggatcaaagcaacattttaaagtaacttgtttttctttcatgtgtttttgccttgtggcaccttttc

SEQ ID NO: 90070 - DNA, 1043 bp, Homo sapiens
agggaaagactcccattaatagcctttgccaatttcattggtataaatacgctcactatgatcaatctcaagctaccaaggatgatgcgactagagaaagggaagagttgtacaccatctgctctcgggagctggtgtgagcagccctcagcacgccactgagggagggagagaagggagtaaggaattgaggcaaggggagagaaagccaggtgttgagagctaatagaaagtgctttccaatattggctttgcattgtccttggaagggaattttgcagggagtgagtggggagatctgcatttccaatgaaacatcgttgtatacttatattttaatatttctttatgatgacttcttattttgaagccaaatagaagaaacttaatagtttatttttgccttacatttttcatgttaaatatattaaagaaaatgtattttagctaagggacagtagatgcaaatgtaataataaaatattatagccctctagaaataatgggcttatagaatttaatgaatattttaaacattttattaaaatattttaatgactcaaaacccacttttgtaatgtgaaaacaaaggataattttttcctcatatcaacctaaatgaactcttctacctttttttcttttcttttttttcttgatctctgtggctgcatgtgagtatccagctgtgccctgagctaacactgttacctatgcagtgattctggagttgggtagcttttccccctgatctcttatggaccccatctgttctaaagttccttgtttaaatgtaaaataccttccgtggcctagtggttttaattatgttactagctctgtggtctgatcatttaggagtttctttggcattcctcctggctggcttccagccatttctttgtttatactttttaccacaagcaaatctcatcatctccaaagatgatatctctgaaagtcctcagtttgtcacaccagtcacaagtatctgaaaagaggggaagaaaataatcaaatccttttccccaagtttgaaattc

SEQ ID NO: 90071 - DNA, 1095 bp, Homo sapiens
gatgttcagtgtctgcctgcacatacatattcaaagccactgtgtcctctgggggtctggcgggatggctgattcccatgtactggttcacccactctagagcatagtgaccagccctgcctgtagacctgtctggctaaaaatcaccacttgctaaaagcctgcaatatggtcaaaaaaatctaagataacatgagaaatggactcttgaggtcatatgaaattcaaggaacagaaccaaacctaaaaacattaaaattctcagaaatatttaagaaactattgcatccataaaacaaaagcagcattaactttgcaaaatgtagaaaggtactagatgcattaaaaataacttctacatttaataagaaaataaatatttcataagaatgcaacaaaaaacttaaagataagttgtataagaatggtccaaatgagaggcagatcctccaaattagaataggaagtgagtggacctcaaactaaatgaaatgaattttaagtagtagatggattgagtaagaagctggaggaaattaaggacatgatgtatacatagaaagcatacatttcttcatccgcccgcccatcaaaaaaaacaatgacaatcagaaacttaagggagaaagaaacatttcaaactttacaagaaagcatgcttcaaatataaagcaccctcagatgtggcatgattttgaacagttgctaggagtgtgagaaagggaattcatttgaacattgtcatgtggatcaaggctttaaagaaatagatgagaaaatctaattgtagcataaaactttgtttttcagtggacagtatttaaatagtcatgtgatataagtattggttttcagcttttagagtcaatccttggacaaagcagggaagaatgaattatgattacagaatagaatgcaaatgttagcagccttgaaaatgtacaagtgcagttaacaggttggaaggcagagagggaaggaaatgtacatggaatagtagcggtgctattgtcttcatgaaatagaatatggagaattttatctttagttgaattcgtcagaggtttaggtattagtttttgttttgttttgttt

SEQ ID NO: 90072 - DNA, 1297 bp, Homo sapiens
gctgagattacttactgtggtggacaaaccaaggtctagggtctcattttcaggcctgtggttgtagaaacttgtttcttcccagcaaaataagaatagtcttctcctgggatagatgcatactacccaagtaaatgaacatgaacatataaagtcagaatagcagtttattaatttgccattaaaaatcactgtcaaaaagacgggaatgacttgaagatcacaaaacaagaacatcccttattcatagccagaccagatcataatcagcaattgaacatagattcagttattgctctctgaattgtcagtctgttggcaaacactcctgcttcaaatctccatcaaatgagaatctctttgtctattcattccttctactaacactgtgatgtgtctgtggtgtgtttcaactttgtgctaagtctaagtatttagtggtgagttaaggcagacataatccctgtcctgggaaatgtataccttaggggtaagaacagatactcatcagtctgttgtacaaatacatgtaaacttatagctgtggtaagtactgcaacagagatttgtgcagctgtgagactgtagagtggatgtatatgatagactgtagtcagcaaaggcttcctgagaagtcgaggaatgagctgagattgatgaataagcaggaattagcaggccaaggcagtaggaggagggcttttcaggcagaggaaatgtgtacactaagttctggtgagagggtacatggtgtattaaagggtcttgaagaaagctgttatatagcaatagaaaccatggggtggtgtgaggcagaagaagggaggcgcagccccttcagggtctcatgggccttgtgaacttaattctgaaagttcaaagaatccttgaagagtttgaagcctagagagtgacacgatgtggttttttgtgtgtgaaagaatacccctggctgcagcatggagaagagattagaggtggccgacagtggattctgagggaaaaggaaaaggtgactaggaagactttggagatttccagttttctggaggatggtacctggtaatgacaatctaaatagtagaaagtgagaaagactgagagcctgggaacaaacttgatgaattccaactttaaatgagggactagcgaacgtatctgaaaaggaggagccagtgagatagaagaaactcagctgtgtggtgttgaggccaagaaaggagtggcctatgccatactgctgaaaggcctagtaatgccagcaacaattgtagctaccattatcacaggcttatta

SEQ ID NO: 90073 - DNA, 1217 bp, Homo sapiens
gcacccatgttcatgcatatgtgaatacagggtgaatcatttgccttagaagggtttatgaatctagtttatcattatttaattagcataataatcttcaaattttattttaattaattattcccagcctcaccctgccaagtaatattttattaattggttgcttttctgttacatgatttgaagaacacattctagctggggcaaaggaagtaattaggaggctatttgcaatgttctacattagagattacggttggactaggttgatagtacacaggacaatgaaaagtggtccagttctgaaatatttaaaaaaataaattattcttaaactggtaacagtattactatattatttttgactcttgccaaaatatgtcttcaatctgctgtattttattaagttagatgtgggattaacaacattatgagatctctatgaaattatgatcccctttctaacatctttttttggccttattataacagagaaaacagctaactcattatttgaacatagatgtctgaactgatagcaaagacgttgtgttggtaggtcttgagcacagatttaaacaacgtgagataatttaattttgtacttatgcataaatttaaatgttttcatcagtattatttttaaaataaaacaaatgaactaaatatttttaactcatttgttatatgtaggacttctttcatcatgccagaaacaaccagtctttgttttctaaaataaatgaagagaaaatagtttttttcttacatttattaggaatagatacaaacggacatgctcatcgaccatcctcgaggtaatttaatattgtgtttaattgtattttttagggcaacagctattctattgaactttttattataaagttttctttggaattataacaacagagctaatattttaaacaactactgtaatgtttattaagttctcaattatatgagatttccaatatagtcgtttaaatcatatgtgctgtatccagatggcacattaatataagtaaaatatatcctgtacatattacataatcttcatttactgaagcagagaaaaaaattatctaaaatatctatatattttagaaatattttcagtgaatcttgaaaatataaagcattttatggtattaacttttatatcaccaaaagatgtaattatttattccttgtgtattccctttaattagtattgt

SEQ ID NO: 90074 - DNA, 1026 bp, Homo sapiens
tccgttattggcaatgattgtcatatgtacaaccaagagttgcacgacttatattttctttttgtaggatttgacttggctgaacgctaactctttttaggactgatttaattatttatttgttctttggtcctgtgctaatttttatgagcttattatgcagttaaattcattatagtttatttgtcccaattacttattatacttgaactttttctttttgcttagatgtactttattacatatttgatttcagtattatgtcacattattaaatagtgcttattgttaccaccacaaatgaaagtaaagttgtgagttatataataattaaaaatatatgtttcatctacttgtgatcatcaaaatatgtgaaaatacatatgaatgcattaagatttaccccaatttaattttgttctctctttcagctgttcttgaagactaattagttacactggatatgctgctgttctttactttgggattgcttatacattttgtgttcttcgcctccatctttgacatttattttacatctcctttggttcatggaatgactcctcagtttacaccattgcctcctccagcgagaagattagtgttgtttgttgctgatggccttcgagcagatgcactttacgaattagatgaaaatggaaactctagagcaccgtttattaggtaagcatgtaaactgatacagagacatctcttaaaatgttattctgagttaagtaaactgcaaaatatcttactatttatcatgcactgggcacaggggtgatgatgagaaagagaatagggcacttgtacatttgcctttgtcttatgggtcagcactagatgctactttatttcctcctaggtgttatttctggtattgttgaagctgataaccggtgaattgaaatggataggcttagctgcttaagctaaattgtcctaatttcccaaacttggctcaagactcactatattatttttttcttaaaaaataagtctgctggctgggcacagtggctc

SEQ ID NO: 90075 - DNA, 1051 bp, Homo sapiens
atttctgcgtgggtcccgatagggacattttaaggaacgagagtattggggtgggggcgctcttttgcggtggaagcaagaggatcaggcaatgactgttctctctgcctgcttccaacccttggctggtgttgcacttggctcctggctcccctactggtgtcagtatctataaaatatcaagagtttctagttcactggctattacgggactccagaaggttcccttttatactagtttattgctttaagcattttcctttttctccagttacctgaatcacactaccaggaaatagtgttacctgaattgcctgcagtagttctttgagtctgagccaggagagaaagaataggacacactgctgctgtctccgaaaagtcagatgtacttaagaccctttgtctttgggacgactttttcaccgccaaaattgggttttctgctgcacaaaatttgttctgttgagataaagttgatgtaattcagtttcaatgccttaatttaagtaatgtccaaaattacaggaaatccaaggagcaaggcagacaggttctaccagcagtctgtctcaccatcccaccaccttgcaggcttttctctttgcattagataggaattgacctttttaccttggaatgatttttagcagcatagagtaatcgtttaccccatatattcgtaagcatctcttatggcttgaaaacttactgtcaaagatgtagtgtactgtatgtaggattcccagtgtctcccttttgggaggtatcttaaatattcccttactaatgtatggagatgttttagtatgaggccatatattaattctatattaacaagtattcatatagaatttttaaactgcagcctaattgatttttttttaatcactatgcttttgaatagtgccagagacttaaattgccaaacgtagacgtggtggaagcttagggagtgcattttctatcaaggtgaatcttaaatatatttcccccttggatatgggattttctcagtagttataatttccttacccaatatgtaggataa

SEQ ID NO: 90076 - DNA, 1931 bp, Homo sapiens
tttctgttgatttagatcatctttaatttctttggacaatgttttgtagtttttactgtatacattttgcatgtttttgttaaatgtattcttaaaatttttttgatgtgtttggaaatgaaacttgtctttgttttaattttggattgtcattgctaatgtataaaaatccaactgatttttgtgcattggtcccatgttctgcaactttgaaaaactcatttgttacgtctaatgtttttcagtggattcctgagagtttcttatatataacatcatgtcatctgtgaatagcagtagttttgcttgttcttttccaaactggatgtttttggtttcatggttttttatgaggaatcagcagtcattcacatcattgtttccctctatgagaacattgtttttctctgtctgcttttaatattttctctaaatttttggtttttcgctatttgattaataggtgcctaagtttctcttctctttacttaccctccttgatgttctctgaccttgaacctgtacctaccccatctcttgcctcatcagttgtggattccaattctgcatatgttagaccttttttattgttccacatgtccctaaggctctgttaattttcttttcaatcttttttgtctgtattctgcagattgaataatttccattaatccatctttgagatttctgaccctttcctctctcatctccattctgtgattaggctgtacaaggcatttttaatttcagatacttgtatttcagttctagaatttctattagcattttttacattccatagtttttgctaagatattaactcctttcgtttattgtatacatatattcctttacttcactgagcatagttatactagctataataaaatcttagtctactgattttaccattatgtcctggtatcatctaggagttggtcccattgattgtgttatttcttggagtggatcacattttactggtttttgtgtatcaagtaatttttgactgtgtgatggataatgtgtgtgttaggccgtgaagactggattctgttctttcagtaggcacttgttcaatctgtaaactctttcttaggtggcagctcaaacttctgttttgtttgtttgttttgtccttgcctgggctgcttgcaatattccctgtgtgtgcattatttgggagttggccggagatttgggcagggaaacttagttaaagtaacttgattgctgtgagcatttttactttgttctgttgttgttgttttaaaagaattcctggatcttagaattccaggtttattaactggaaataatcataagtatttgaattcctgttccttattttaacaattaaattaaaaaacttttatatttctctttattatagatcgagctgggagcattagtacccttgattctttagactttgcaagatattcagatgatggtaacagggaaacagatgaaaaagtggcaggtgagtaaaattgtaaggacagatttggattctttgacattccagaaataatgaaatggcttgaggaatttttttccttctacagtttggtatgtgactataacatatatagttattatacaaagttatgttactaattactaatttactgcaagtttgggggttccccaactttttcttcttgtggtactgagtttctggttatgtatccctataatttgctaagttatacttggagccagcagtttacaaccacacagttgtaaaactaatgtatgacaggtccaagacaaagttgaaccttagcctcattcctttgatcctccaaaccagggctgatagtcatatttgtgtaccaatacaactctattgattgttaaaaattggttttgaaccaggcatggtggttcacacctgtaatcccagctatttgctatttgggaagctg

SEQ ID NO: 90077 - DNA, 1021 bp, Homo sapiens
catacaagatagataacgtttctgctcttcaggaatttgtctgaaatatgtctatatctgtcataacagatacaagttcagtacgttggaaatggtaatagagaccttgttgattttagaacccccctatattcctgtttcaggttcacaagatccatcttttagcatcagatatgttctcatatctctattactgaattacttctctagttcacaccttaactctgttttgagatctggagaactagaactatgctttctgatttgtagggaaagacattcctgaatgctggtaagatcagttaatgtttcagatttatcacatgtcacatcaagtatcggaatgtccattcatactcagcaagtatttgctgagtgccctctctatagttcaagcattatgctactcttggaacaacggtcaatagtacagacatatgaagcctttaggaagcttacataatctagtagacattctaaaatggtctttagatttttgctgtaggatcacctgtccctgtcccctggattagaagtaggcttctcatttcttaggtaatggcctggcagcatccatatccagctttatcaggattaaataagcctatttggcttctaattttgtttctccctaggtacagataaatcttttccttcctattagcagtacattttgattttcttgatttaaaccatatctaaatcttatttcataattttgtcagatttaaaataggataggtgctccaacaaggctgtaaagaagataaatagcattttgaaaatagatttcttgttattcgtcaccatgaaattaaaataggctcagagaggaaaaaaagaatacatcattgtggtgggtggttatatttaatctaaaaataaaagtgattatatgttcattaaattttagtgggctggagaaggagggttttatctttagattaacattgctaaaagtgtatttcatgagaatgttcatttcatagggaaaaaacaaaagtgggaaaaaagaaaaaga

SEQ ID NO: 90078 - DNA, 1068 bp, Homo sapiens
taagtattatcttttcaaagtattggtaaattctaatgacatttggcaatatatatgtagatgtgcataaaaatataaattcttgccgtctgacatgggtttttctggctttctgtgccttaatcattcagtgttttactcttggtcacctaaactttcaccaattgcattttgagttttttcccagtttgtgttttaaccagtttttttttctttttttcttttttttttttttttcatatttctatcattctggcgtagggcacttctgatctgcaattgttctgtaatgtcttagaaaattttaagtgatatcaaaagcatgatatatatatttatttaagatacagttagatatttttaaatcaaaatcaattgcctagagttttaaaatgtaaaaaaaaaaaaaaagtaaaccaacatgctgtgtaaacctattctgtacttaccttacacactgaatgtgtccagtcttacttcaatgcaactctaagagtttccggaagtgtaaatgttaaggaaaatgtttaactttgttgcacagaagtatttgcagatcagcattgctgactaccaaaaaacataaagtaacatacgatgtcatctgatttttagtggtgcttccatgttgctgcagttaaattctgtgcatcaaaataattggcctttgtgtactagatgtgattcaattacatcttgtttttattgaaaatgtgcaaactgagtgaatcctaatttttccatatatttttatagctgtggctctgataacatctcatttggcatcttttttatgtgtattagtcagttaggaaaaaattgcatctttaagatgaaaccttcagttccagtttttatgcagaatgatttaactactgtaatttcttaatattcatttgtggcaaagatcacttaattttcccagagctttacttctcagaaatatattttttctcaagtctaacattttaaagagcttattaaaatgtttcctcaatattcatatttatgtcataatcacactctgtgataataggagaaatcctgagtttcactagtacctcttaa

SEQ ID NO: 90079 - DNA, 2010 bp, Homo sapiens
acaggaacgaaaaaattacaaatcaagtcctgaaattcaggtgggtgacagaagacaaatgtaaaattaatcttccacattaaatggtaacataaatattgaaggaggaatacttatgatttcctgtttgcctcttattttgcttccaggagccaatcaaacctcttgaaaagagagctctaaacttcttagtcaatgaatttttattgaagaataactataagcttacatcaataaccttttcagatgaaaacgatgatcaggtaaagttactttttgtttttacagtgatttttttctacacttataattcactttttcttttacgtagtttctttttttttttttttaagttatatatatagtaaaattctacaaggctagttactagaacagcagtctcttgcctgaagctaattctattagcttacagactttattctttccctgttgctttctacataaagacttttcattctttctagattcctttttactactcctcagtgactatatagtccactcatttttgcatatattcataaagtatgctttttaaagacatactttatagtataggttcttgtgtacttataaatccagtttaactataaacctcttcaattccactgtaacaattaagatgttagataaatatatgacagtatttaagagagtatattgtaaatgagagtgagaaaatcagctgtatctctctgaataggggccaattttagaactttattattattttcctgataaaatctctttaagcaaaaaagatgtcttattttagtgtcatctctcaaatggaatattttgacttcttagtgctaatggattggtttgaatcttacaccttaaaaaagtaaatgccagtgaatttattatttaggaatctgaaggccatcattttaaatcaagattattctgttggttcataaaatctcctatagatcctttagcaaaaatagaaattttctgagtaagatagttcagttaacccctcagttattagaatatatttggcaaaattaaatgcaataagtatctagttattttttattcaatggtagtgtcactgaacatgtgctatgtaagagacattaaactaatatttaacatgagtattatacaatgctatactatggttatagtttaggttaatcatgttttttaaatgatcgactaaacagtgaataggaaagattttgaatatgtgagaaacattgagaggtcaaaaagaacacagaaaaagaggaaaagaggagcaaaaaatagatggaatacatagaaaacagataataaaatggttagattaaaacctagctctatcagtattcactgtaagtgtaaatgattagtccttctcgaataaaaatcagaaattagagatgtcaacaatgctctctcaataattaatagaacaagtcaacagaaaatcttttaggatatagaaggcttgtgctatgttatcaaccaatgggcataattacaattttataaaaatgcttcatccttcaacagtgaatacatactctttaaattcaaatggttcacttacaaagttagaccatattatgggttataaaacaagtcttaagatggtgaaattaactagcaattagtaacaaagttatttccaaataacgcatgagttaaaaaagaaaagggaaattatgaagtattttgaactgagtgaagatgaaaacaaaacatatcaaaatttgtgggatataactaaaatagcacttagagggaaattcatagcactaaatgtctatacaaggaaagaaaaaaattcaaatcagtgaaatcaggctctgccttaagaaactaaaaaaagaaaaccaagtgaaacccaaagtaagtagaagaaaggaaatgataaagatgatagcataagtcaatgacacaggcagcagaaaacaatagagaaaaattaatgaaacaaacaagtagtcctttgagaagatcagtaaaattgataaacctctagcctaactgatt

SEQ ID NO: 90080 - DNA, 1053 bp, Homo sapiens
gtaacaattttgatttgtattttcaatgaaatctaaatctcacttcttactggcatttttgtggaaagtaatgatttttttctaaaattcatatgaaaaggaaacagccaaaacaactttaataaagaagaacaaatttggaggacctaaactacctggcttcaagtcttaaaagatattatagtaaagatattatttgtcatatttgtatatagacaaataaattgatgaaacagaatagaatccagagatggacttccacatagatgatctgttgaattctgacaaaatgcaaaataccttccatgcagaaagggtagtcttttttttacaaatggtaatggaaccatttgcctaaacaaaataaacatcaaaccataccatatacaaaaattaactcaaaatggagcatatacttaaatatagatcctaaaaagctgtaaggcttctagaggaaaacaggaaaaaaaaaatcactgcaggcttggaagataggcaaaacatttattagatatgacacaaaaagcatgatgttctctgtcagatttgctctcatcaaaattaataacttctgctgtttggaagccacttttaagtgaatgagaagaccgagagggtgaaaatattgcaagtaacatatctaataaaggagttatatccaaaatttataaagagctctctaaacttaataatagaaaattaatctattttttaaaagaatgcacaaaaattttaaacaggtgcttcactaaggaagttatatggatggaaaataagcacgtgaaaaagattctcaacatttgtattcattagagaaatgcaaattcaatcacattgagataccacaacacgttaattagaatgtttacctatgaagttttggcaaggatatggagcaactagaaattatttctagttctaagctcaaggtagatacatcttaaattttggttgaatgatagatagatggacatttgaattatgtgtaatgttcatttaataagttttttttttttaagttaaaagttgtttagttcttgtgggccaagcact

SEQ ID NO: 90081 - DNA, 1037 bp, Homo sapiens
atttgtaacagtgatagtggagaaagatacaaatttcatacttcctctggttttctctaaagcccccacttgtaatactcatatctacctcgatttagtcctcaataatagctatctcatcattcaaataaaccgtcaaaggattaagaatatcacatttagaatgttcaaattaatatgccaatttcttagaggttctcataggttataatctatcaaattagtactaaattatgatatattaaaggaagatagaatggtgagacagtgtatttacgtgcaattgattactcagcaattttatgaagctcttctaaagatctttctctacagaatgcttaagttgctgtgcttttttgtacttttaataaaactgttgcagttaataaaactgttgaacacgttttaatacacaacaaattgaagagtagctatttggattctgaaaattgccagaagtatttgtaataatatgaattatattcaaacatttacagcaagaagacatgcagattaaattgtttccctacccattagagattacactaatatgtattaagttggagtaataaaagaagaacaaaattaatgatttgagtttacttataacctataaataataggtacaatttatgtactgagacttccttaatctaaacatgttttatgatgtcatgcaaatatttgagcatgttttatgagcttaaagttaatataaaacaaagtaaagagagtttatatttttaagagatataataaaaaaattgtgtaacattttgatacctaagacaattaaacctattgatctagaaggtcaggaaacttacaagaataatattggatactggaaagtgtaaaataaatgtaagaatgttatttactaacttggaacatacactttgatattataacaaaattatgattatgttgggttttcaatatattcacagaggctggctgtggtggctcacacctgtaatctcaacactttgggaggccaaggtgggaggattgcttaaagccaggtgtttgagacc

SEQ ID NO: 90082 - DNA, 1041 bp, Homo sapiens
agacagacaagcaataacactaaggtatgaaaagtagtataataaaataagtccaacttgctttgggaacatgtaatcaaggcactaacctagtcttcagagcaggaaagtttcatagaagtgtcatccaagacttgaagactatgtaagagttaacaagcaaagaggtaaaagaaagagtgttcccacatgcacaaatgaaacagtgctttaggggaacaaagaagggtttagtgaggcttaagcaaataatgctagtgaaaggaaggatagaagacaaagttggagaagtaagcaaagtctaagaagtcatgtaagcttgcgttaattcattttagaggttgggacatgatggtatctaagctttagaaagggtcctctgagctagaggtaattggaaggtagcaagactgggagcaaggaaactatacgggtatatgttggaagaacccaagtaagaaatgatggaggcctgttctatattcagacattggtaatgggaagggaaagaagtatatggatctgcaagattattagaagttaaaagattgaatggatttggggtgaagataaagggaaggaagccagggacgatgggatgtgcctctaatcccagctactcaggaggctgagatggaaggatcgcttgagcccaggagttctagaccagcatgggcaatacagcaagaccccatctcaaaaaaaaggatcaagcctgatttgaggtttctgacttgggcaagtggaaggattatggtccccctctgagggaatatgagaggagcataaaacagcaaaaggctcaagctttgatacagtactctataatcatagaaattactgagctccattttgtggtgtatactaaataagctttattatctaatttttggtgttagccttttctttgcagatttaagacataaagtacaactcatagtcataattttatgaataatactacatagagactggtgttgttttagaaatataaatgttttaacctcctttattaaacataaataggctaatattttcaac

SEQ ID NO: 90083 - DNA, 1068 bp, Homo sapiens
ttctacatatatagaatcatgtcatctgcacgtagagagatagttttgcttcttctttacaatatagatggcttttattttttcctcttgcttaattgctctggctaggatttccaatacaatttggatggtaatgttttgagaaagcaatatccttgccttgtttctgatcttacaggaaagcttcaatctttcaccattgactatgatgtttgctatagaatttttataaatgccctttgtcatattaaagaagtttccttttatccctagtttgctaaatattcttatcataaaatggcattgaatttgccacatgctttttctgcatctgttgagatgataatgcgatttttcccctttcgttctactgtcatatgcctgcattatttatacattgcctgattttatgttaaaccacccttgcattcatgagatacatcccatttggccttggtttataaaccttctaatgtgcttttggatctgtcgttagtattttgttaagtatttttttgtctatattcataagggatactgttctgtggttttcttatcttgtgttttggtatttggtattggttttggtattgggctaaggctggcttgatagggtataggaactcttcagtctgtttccttgttataagtctgttgggattttctacttaatcagtttggtgatttctatgattctaggaattagttcatttcatcttgattatctgatttgttgatgaacagttgttcatagtattaacttatatcttttaatttctgtaacatcggtactaacatccttgctttcatttctgatcctagttatttgcatcttctctctttttcagtcagtctagctaaacgtttgtcaattttgtttctcttttcaaaaaccaacttttgttttgttaattctctttattgtttttctagtctatgtttcatttatctctgtaatctttattatttctttccttctgctggccttgggtttagtttgatctttctgtagttccataagatattgaattactgacttgagatcttttttaatgtaggtatttatag

SEQ ID NO: 90084 - DNA, 1030 bp, Homo sapiens
ctggaataaggagagctagcagaatgaaaaaaaaattaaaatatgcagtgttttcaaatttatgttgaagacaaagtaatagatttgagactattgaaaattgaatccatgtttattataagcgatttttttttttttttcctgagacagggtctcactctgtctcccaggctggagtgcagaggcacaatcatggctcactgcaacctccaccttcccaggctcaggtgattctcccacctcccaagtagccaagtagctgggaccacaggcatgcatcaccatgcctggctaatggttgtattttttgtagagacagggtttcgtcttgttgcccaggctggtcttgaactcctggattcaagtgatctgcctgcctggactttgccaggtgctgggattacaagcatgagccactgtgccgagctgataaatttcacatatcaataaagcacggtattcactggccatttgcaggattgaaggattgtttgcccaaacttttgtggtttcaataatttccagaaactcttcaaccatagctcataatacatcctgatggacaaaatgtaaatgtatatgttcctgcaatatcaggccctgacttttctgtaaaatgttttggaaagctgccattacctttgtgcatggtatgaatagtgttaatcaacagattgacagccttaaaagcattttggcattaattactgcttcactcaatgtaagttcacaaaaatgcatgtataaagctcctgtatatacatgtttataaaaatgcatgtataaagtttcctccgtaaactttgctgcaaccctttaaactttttccttataaaggcattgtgatgaacttagcaacacattttattccagtcattttgttttaaaatgagcaaatttgttaataatcctcagaaagttggctccagtaaactccctcaacagttaaatcccagtttctctttaattatgaaagtctttgaagtttgaagttatgtattaattaacagaggaaacgttgcccaaattt

SEQ ID NO: 90085 - DNA, 1027 bp, Homo sapiens
acatggctttatttacaatagcacagtcacttattcttaagaaaaatattagtctctggaatatcactgaagtattagtcatttatagtcctattcccaagttctttgggcattcattttttccaccaaaataaagtagaaaccctagattcaatagacaaagtaaacattacatataataataactacctgtcacaatcccttataccatctataaattacagtgcatactaatttagggtgaggttctaatcacttggagtcaaaataacttgggtacaatatatccatataactttcaatttacaattctatacagttaattgtgcacatttaattttttatattttttccattttcttttgtctttttcttttcaagtgtacaatttaatggtttcagtgttgtgcaagcttcactacaatcagtttttaaacatttttgctatcccaaagacaaaccctaactgcttgaattcggttctcctctttcaagattattttgacggttccaggtcccttgaattttcttatgaattttaggatcatttttcaatttttgcaaagaagccagctgggattttcataaacaatgcattgaatctatagatttatctagagagtattgccatcctaattttatatattaagtctttcattctatgaatttaggatgtctttccatgcattgggtcttttaaaatttctctcaacagtaatttgtatttttccgagtagtgtacgttttgcccttttgttttatttatttctaagtatttcatgcttttggatgctattgtaaatagacttttttcttaattttatttttagtttgttcattgctaatatatagacatacaattgatttttgcatttcaattttgagacttactgagctaaagaaaagcaaacgaaagtttatgcacagccatacgttgacattcaaacattctacttttgaggtaactacatctggattaaatttaattcaaagatgtcagttataaacatctctactgccacctctt

SEQ ID NO: 90086 - DNA, 1552 bp, Homo sapiens
ataaaattccaagtattataatattccaaatctctgatttagatactttataatgtatcataaggatggcaggtatgtcaactttagtcatctggggatggctgcctggtttcaattttgcagctcagaggagagaatgctacacttcagttatagtatctgccacagctttctggcaggaaattggcaagaggtattctatgtttaccactccctctctttggtttgctcatcagtggatacatggcaaggctaggattatggatggccttctttcttgcttaaaaatatgttcttaatttattgaaatttttattactttttattaagtgttttattttaagtttatccctttaaaaatctacatttgcctttttctcattgacagggttttgaattgttgctgtcagccttgggtgatccctcagaaagagtagttagtgctacacatcaagtatttttaccagcttacgctgcgtggactacagaacttggaaatttacagtctcatcttatacttacactactgaacaagattgaaaaacttctcagggtaagttcttcttttgtttatatagtttgtagaaacttaaaaggtctgtcctaagccatcttggaacaatgttagagaacagagacagaaagtgcccttagcttaacatactaatacattaccagttaaagatgctgttggactggagccaagaaagagatttgaggaagttttgctttgctgaagctggaggaagagaaagggcatgatgtgcatttgttaactgaaatgcaccttcatggaagtaactcctacattattcagaaagccagctctttcttgacccttctgagtacttaaatattttacacaaaccatcaactctagttccagaatgcagagaaaatgagtctctaaagctttcttacatagtgtcaaaattgctttaactgtggttattccactccagtagttcatttctcatttttaaaatgaacttttaatttttcccacatacaagaattaaagaaatgttgatggaacaatagaaacttcttgatctaatttttgtattaaaagtttcttttagagactagaagagaaattattatttgtgtagtgcatattatgtgccaaatctataaaaagagataggaagtaggagaggggaagtattatagcatgaaatgctgctgggttagcgtttgagcatttctatatgccaacagtgaataagctaaaaaaaaaatcaagaaagcaatcacatttacaatagttttataaaaaatgcttaggaatatatataaccaaagagatgaaggatctctgccatgaaaactataaaacactgatgaaagaaattgaagaggaaatgttaaaaaaaaaagatatccatatttagttgttcatagaagaattaatattgttaaaaatgtgtatactacccaaagtgatctacagattcattgcaatccctatcaaaatatggaggacattctttaagatatagaaaaagcaatctgaaaattcatgtggaaccacaaaagaccctgaataacc

SEQ ID NO: 90087 - DNA, 1034 bp, Homo sapiens
aactttctgacttttaacagtagctataaatgttaatgttactataccttcatttaggttataatgtatttattataaataaggatttattatatccttatttagggtatatccatatgtctatatgtccgtttatatatacacacacataaaatttgggttataatttgttatgaatgaagatttgttttctcataaaaatggtaacccacacaaatatttttagtaccaatttattacacaacatgaacaaatatttatgtcaggcattgttttagacacttaggacacaatcatgaataaaatagataaaaatttctgctcatagagcttacattctgctgtgggaataaaatcttttgagatttgttggatttgttctcatatcacaggaatttcttgattttcctaaaaatgacttaattagtgtatttcaattttatatttaaaatttacaataagaaagtaattaaatatgaggagaaaggaccttattttcctttcaacagaatatctaagttcccaaaatgccaatttccatatgatttattttgcttcttttatgtgtagtgactaggtttcctcggcctatgtcgcctcttcaagatgtgtccactattatcggaagtcgtgagcaattggcagtgctgctgcaactttatgactaccagctagaacaagagggtacaacaggctgggagagtttactgtgggttgtcaatcaattgtaagttaccacctccatattaatttgaatagatgataactcttatatttagccttggccctaagaacaaaatataacaaaacttttaaaatgtaactcggcatcatttttggtaaacacctttaggacacagaggattcacaccattggatatgtaatttatctgagaagaagatgttgctgtattttatccgaatgatctatctgccatcttgtttgtccaatcgtggtgatggattttaaactacatctagacttctcatttttgaggctaaaatgatgccatgtaaagccaagctcttgtgtg

SEQ ID NO: 90088 - DNA, 1021 bp, Homo sapiens
tttagcctaagcttagttcatatccagacttggatataagctttactcattgtagatatcctcaaagattttcaatataggaagtgtcagctagggaactcaaccacaatcctttgaatgtgctgctggtacttactgtctatcacaggttcaggaagcagctgtttgctcagcacactttggtaaaaacctcaagcgattatggaaccacagcaacttatatataaaacttgctgcgaagatgccacctcttagaatagcatggacactggagataaattctacatgtttcagtcattaccaaaagtatcatttgtcacatttgcctatccaggttattttgtagtttcaaatattaacattggaatgtcattagatcctaatttattcattaatcctattaatccatttgtcttcataacattttgttaagccagtactttagagagctaataaaaacataaaaaggtgtagtttctataatcaaatgttaataaacacatttaaaaggtaagcattttaattattaaatttaatttagtgtagctctttactattaaatctatagttgaaacatttaaagtaaatagtatgctataaggaactggacaaaattcagaagacttgggttatggtcctattatctgttgactaatgtttatgatctttactatttaagttaaattatgtgggcttagtcttttcatgtgtgaaatgaagaatttgcttcagtgtcttttaattctcttagcgcaattcagtacatgaaccttttaacattggcctttctctcagtttaagctaaatatataaattaatgtgcctcacctacagagaggagggcaaaaaccagaccttgatgttattgtaggaaaaagaaaattaaaattattttgtatttttcactagcattcagttgttaaacaaatataatttgattttcctgttatcaatattggcaaaaattgtttgatatctccaaaacaagtagctatttttttttttagaaaagcaagtagga

SEQ ID NO: 90089 - DNA, 1023 bp, Homo sapiens
gaacataaatatcacaggatgaatatgttacttactaaacacctgaagtgactggaatttccttttcgttttttaaaaatacaggcaaatgcttttttcgataattctaaccatgtaatatctacctaaataatccttctataaccaagttcagttttagaaggcagtaatttcaaccacttaaaatcatattggaaattattttaatttaataaaagaaaccagaggccattcacttgttgacttgagttgattttttcaaaaatttatccttaaagtttttattttcattaatttgactcttctatcctaagcctcatgattaagaattattacatttctgaccacttaacttagtcatctataaagctaaataaataaatgaatagtagtagcaacagtagtaaacatttcatttaatcaatttgcccattgaacctgagactttttgaatcttctctttgggttgcttaggtaaaacctcagttccaggagattttaagactatctgaagaaaacattggtgagtttgttcattattacttttaaaaacaattgcatttctttatgcaggaaaaatactatattctccatatatgtaaattgtataaatgaactagcaactacaattgaaaaggaaaacttatattatggagttcttggttttataactgtgtcacatctaatatccttcccattagtggcagtgagattaatccctgtcaatctgattgtgaatatataccttcattgtaaccaaattgatataaggctgagctttacaacctgggtactcaacctttagaggtctgaagtagtatattcaagagactgacaattataaaataagctgcatctaattcctaattagttctataatacttttaaaaattaaacatagtggaaaagaacggtatataagcatatatgttttcaaaatgaaacatgagagaaactacagacttgaatgggtagctccagctacttcattgatagttttcactcatctactttaacgagtct

SEQ ID NO: 90090 - DNA, 1075 bp, Homo sapiens
aaaataatcagggctctgtctggctgaaaaccctactgaggatgcaggaggggctcaggaactcaggctagtactgaaaactacctcatatctagaaatagatcaaataacatatatctatgtgcttttaggtgagtgtgtttacattttagtaaactgcaaattgaaagcataaaaattttggacaacctgcctatagggacgcttagaagactttcaagaagaaagttctgatttccaattatggaaatcaagagtataccatctcatttgggttattaaaattctttgccatttatcagaaatgtttatgctagtggctcttcaggaaacactaagttgtattttacaaccaccaataaacatatgttttccaaagtaatgataatacttacttgtaacctagtaaacagttgtaattttaaatataatcgcattatgatttttttctttacacttaaaatatacttatgtttttttaaattattttaataattttagattcctcagcaggaaatggggtcctcactaaagctacagtccccatttatgcaacaggagtccttacgtgttatattcaggtaagggaaaaattcttactctctagtaaaaggctttccatttagaaaaatgcctagtattgtgtcttcttaatgtaagtgacattgctaccaataaagaaaaacaatttacttattttattcaataaataatttataatggatagcatatttgaataataagggcctgagtaaaacctcagttgaacaaataaatttagagattatgagctttttgatattttgttagaagtgttagattgtacttacttagcagagtttctttgtgttccatgataagtttttcatagataaatgataagcagaacacatacgttaggtgaactaagctacaaagcactgtagaacactataccttatcaacatttttagctaagtactttttaataaggcaggttgagtatcccttatctcaaatgcttaggatgaaagtgttttcagattttggattttttttttcagataaaggagtatttgcatatacataatgagat

SEQ ID NO: 90091 - DNA, 1013 bp, Homo sapiens
actttattatgtatttattttctgacagactatcagattcccttcccatatacatttaggttaatttaacataaaacattattttttttactctcttaatttagcgggttttctttttctaacatattttctgattatgaaagtaataatagttcgttgaaaaaagtttgaaaaacacagattattttttaatcaaggtgtgcatctgtttcttaaaagaacacagtagtctatattttactaagtgtgcagttttcaccactaggatattgcaaagataatttcttagaaatcaattttctactattttttctacaacggggtaactattctagtagtttgtattatatagagccaaaatttatgggaacaaaaattcgtaaggtaaattttaataaaagattatactttttaatgttctaaatcaggaccaaacatccaaacttttacagtgacggaaataatttacagctgagttgtccaatcagctaggcacttgccacgtgtgtctattaagcctttgcactgtacccagtttgactgaggaactgaatctttcactttacataatttcttatttaaatttaaatataagtagccacatgtggctagtggctactactatattagaccacaggtctaaattaaagtatcaagatagtctgtcttcataccattctgatgatagatatgcttaataaatatcttttaattaaaatagcttccaaatttggatattttccccttatttggtaacattttctaattatagataggtaaatatggtatttagttctacttgattgtttggaaattcagtatcagtatttttcctctgtaggaagaagaccgaaaactgttagttggattcttagaagatgtaatgacgctgctttcattatctcatgctcctcttgatagcctgaaggcttcttttgtggaattggggtaagaaataacagcttatagtttgctaaaaggcatataaagtttttagattggatttatagagt

SEQ ID NO: 90092 - DNA, 2798 bp, Homo sapiens
ctttgaagcagttggagaaataaaatgaagtacagatttgaagaaaatttagtttcccagaactgaaaaaggagccccaagtgaaagccagcttgtttggctcctgttttcactgtttgatttgcttagtcctgctcatcatcacatcatctggctgctaaaataattttatctcagtctttactgaaaacacactcatgcatttgttaataataccacctttcatttgcataggcttcacagccaacatacccttccgtatagatggtttgagttgattttatttgattctacaacaaccatgtgacatacataggacatgtactgcttccccaatttttatagatgcagaaaccaagacccacagaagttgtaatttacccacttgactcttagtccagtgatctttcctttttcctcatggagaaatttgtttcttcataattttaacttgcatgctattaaaaagagtggaattatctgtcacaattgtgaattcttagagaagttacaagtgtgatttctgaatatgctaaaagattgtggttgtataaggaaggtgacatcttttttggagaatcttagttgtttgtttctatgttttttgagacggagtctcgctctgtcaccaggctagagtgcagtggtgcgatctcagctcactgcaacctctgcctcctgcgttcaagcaattctcctgcctcagcctcctgagtagctgggactacaggtgcgcatcaccatgcccagctaatttttgtgtttttagtagagacagggtttcaccatgttggccaggatggtctcgatctcttgacctcgtgatctgcccaccttatcctctcaaagtgctgggattacaggcgtgagccactgcgcctagccgagaatcttagttgtaacctatgtaaccaaacaaagtaattccatatgttctgcaaatattattatcattaatattccttataaatatcgtgtttttcagttcactagtaagggactgtggctctcaattttaacactgtttttttttttttcttctagtgcaaacccagcctaccatgagttactattaactgttttgtggtatggtgttgtccatacttcagcactcgtgaggtgtactgctgctagaatgtttgaggtatgtcaacacatgcctctgttggtttcaattataatgatttttttttttttgcgaagaagaagggaattttttttaataaaaaggctttgcatatcatgttatgttgatatatattttatggctttgaacagtgtctggttgtgtactgtgtgatggggcagaaatttagctttaacatatttaaaaatgttttctcagcttactggttccttgaatgttattcaattatcacttttatttctcaaactatcttttaaatcttattttaatttctaacttatataactctttctgactatactttttgatttactgaggtaaataaactgaaacaacataggatatctttcaagttgtaaaatatagttgaatttatcagtagcattagaaaatcaattattgaaattatggaaatgtttattttattggttactcctacgtcactattccctaacatttcatatgtagaataacatcccaatacattaactgcccatagagttgcaaaagagaggagaccaggtaatttacctaaattgtactaaattgctacctacccaagttaagtatgaaattgaaataactatgttttgtacccatcatatagcaaattatgtcatagccctagtatgtgtgtaggtggggagcagtgaggttgaggtttagaactttatttgagcactaaaattggtttactgtttcttattgatttccagtcttgcaataaatctaggctgccttggttcagtttccatctctgctacctagtgactttgtaaattacttggacaaggttgagcctctctgtaccttagtttcctcatgtacaaaagaaagttgataacaaaaagtatctgtctcaaagtatcagtctcaaaggatttttgttaatattaaactaattaatgcttgtaaagcccttaaaacagtctctggaacataataagtgcttatatgtttactgtcattatcattattttttccatccatgctattacttcacaaaatatatgatagtaatagggaacatatacttatccaaactaaaattgccccaatattcatgtgtttcttaaaatacctaaacatttatttctataaaaagaattggttaattcaaatcttgccgaatatcagaatttctccacaatttaagataaattgcaattggagatggggtactgatatatttaaaatatatgctttctaaaattttcaaatacgtaaattagatttgtgaattccagaaaattccattgttatcaggaagttgaaaattctccatccatgttattccctcagttatcatacagaagcaacttttaaaaagccgtaatcaggttttttgtgatgatgaatgccaaagccactatttggttttatgtctagtacaagttccttctggatataaatcgttttgattattcgatatgctgaaaagggggcattaccatgaaagaaaagtcattcatcagtctctcctctccccaaaaagaaaaaagtatctttttaaatgaagagctatttctttaatatactctcttcctatgattttattctaagctcataaaagctatttctttttcttaaatctttcatctctaaaatgtgagtgtgcactggtgaatcaaaccatgtaaatgaaaataag

SEQ ID NO: 90093 - DNA, 1004 bp, Homo sapiens
tacgtggcttatgtctggttttggtttctctgtttgctgtcagtgctggtctggaaactatatctatctatgcttaagcagttttcagtgtcctctcaggttgttgatgaacttctggatcttgtttgagagactatttcaatgtttttcaaattcattaatgatacatttcaatgagcatgtcagtaaaagttatcagtaagagaaattaaagttccttttttgtcagtggttcttatttgaacaaaattgtgttaaaagaataatgggtcataagatttattttgatactgatgctttataatttagaattatgcctgcttaccctaaaaaagttaattcaaaataaaaacataaaaaaaacacattctttttttaaaaggtaagaccagaaagaaaagaaaatgagaaatgagaagaaaatgaggcatacatataccaggaacctaatagggtatggtcactgaaattcactaataaattgagtttaatttttagacagcaggacaaaaagagggaacccaatcaatcatattattcccattgttaaataagggaatataaattactttttgaagtagcaaattaataaaattattttataagaggaatttatcatgttataataaatttcccaaaagatgcagaaaagagcttcatatatattttaatcataaggaaattgaacatgtaacattagagcacaactcaaagaggtcatggactttaagtcagatgggacagagttcctttgcaggccctgcaacttagacttggacaagttactttccgaagcctcagtttcttcatctgttaaaatattgatgatatttgtacttacttcatcaagtgaaaagatcaaatgatatattgtgttaaagtgtataacaattgatagctcttaaatgtactttgtgattttctagcttaataaagaaattgaacttaaaaaccctacaccaatgaaaaattaatttgtcctctacattacctcttttttaatg

SEQ ID NO: 90094 - DNA, 1181 bp, Homo sapiens
ttggtaaatggtgaaaaatcattgcaaaattaagaatcttcacataaagtgagttactttctctgatgtgttatataggaggaataccttcacatatgtacacaatggtagatttttgttacaaaaaattctgtgacatctttgatcttctgtgaggactaagtactagctactaggtaaacagattggtgagcatttaggattaatatgtgcttacattctgaaattgagaaggggattgcccttctcggttgaactcataaaattcagtaatatttatcaaacaaaatgtatacggctcagtattgttctcttgtattgcaatttagcattggttgctaaatgaattgttttgtgattagattatagagatctagttctactcatcttttttattttacattttatttgaatttataagaaatctaaaacaaagacctatttagatattaactgaagttttttaaattagatcatttcttccaaacatattacaaatcatatattcttgcagtaatcaaaataattaaactctcatttcttgaatgcctgtttgtcaggcacagtatttaggtatgttatttgcaaattcatagcacaacagccctttgaggtagataataatatcaccattttcagatgagaaaacttgcgtttcaagaggttatggaaaatactatgtatctaagaccacatggcttatatgtggagaactgacgtctgaacccagatctgattcccaagtgtaatactttccaataggcagccttatatctctgtacctcaaaagagaaggctatattatttaaaagattaggaattgtcctatatggttttaaaatacacttgctatagcacaataataagtggtttagtggtgactgctactcctgtgagtttggtttaaaaacagcccagtttgtaccctgttggtcatgataaaagcataccacccttactttgagaattttaaccatagagcacaatatgtgtcaaacaagctaaaaaagtattcttttcagttgcattttgatggacattgaaattgcttagactctttgaccaaaagtacaaactgctgttaaactggtgacaaaatctgttttcatggacgctaggctacttaagctttattttcctcctaagcattctctgcctttgtaaagcactctagcagcagt

SEQ ID NO: 90095 - DNA, 1577 bp, Homo sapiens
gttgttccttccttcttcccgtggcgcactgtgtttgctctttccgtgcatcacctgtgaataccccctgtgctgaccaatcagctgttggtgaagggggtgaatgaaactctggtagctcagagggttgttcctgctctcattactctctccagtgaccctgaaatgtaagtgtcatccctgccttttatattcggcatccctttcaaaatgtgcctgtcaagaaataaccatcagctcttaaatttattgaagaatctctttaaattaataatactggattatgcttatttgattttaaactttatcacattattctttatatatcatggttctttttaaatcaaccctcaccataagtgtaatttggaggccacgtattgaaaaaatatattagtaacattagtgctcaataaatacttccagaacctaaaatatgctgatggactgtttctttcaagccaagaagggatgctctcctaatctcactaacaggttgttaccagtaagtgtagtagcatgaaccaatggcctaacattttaatgtctcgtgtggatgactaaaccaagaaaggccaatgagtctgcctgcccatcctcagtcacagctaacccagttcttattccagtttaccaaaccattttttattgcatgttgactggtttacagctgactcttcgaggcatgagtgaagcgttagttgacaagcgggttgctccggcccttgttaccttgtccagtgatcctgaattgtgagtttcacagactgcgaccttaagttatcctgtctgtctttttgagcattcttcttggtctgctttttttaaatttatttaatttgtcattgctagagactaatacagtatatttaccttgtacttactttaatatacattttaataatactcgttgttcatctcaaatcttcagtttctttctgttttaattctaacagctctgtcaggattgccacaattccagcctttggcactattatggaaacagtaattcaaagagaggtaggaataattgaaatttatttatgtctgtgtaatattgatgtggtcatgatacatgtatctggtggtaggctgcagggagcatcttaccttttattttgtgccctagttagttacaggccagaggaggatctcactgtgaaaacatggtagcctaaccaaggtatatttccatatcctaaggaaatctctagtctttcctctcagtcagaacattaagtataggccaagctttcagggatgtccaagggagagaatatagtcatgggttcttagtttctctttctgattgggccagtaaagccccttcctcttccctcttttctacttatcactagagacagaaactaaaaaccccggcttcaggctgctaaaagccttaaacaaaacaaaacagaacaacaacaaaataaggtgtattggacaagcttgctagatgttctattgtaagctgagctggatgttgcagttttgaataatccttcaaatcaggtctagttccaaagccttctattacccggtaggcttctggccaatctacataaattcttgattgc

SEQ ID NO: 90096 - DNA, 1076 bp, Homo sapiens
ggattaaaggataggctcaacaggcaatgggtctttggtgtgtgccatgttgtcaagttaaatgggtatttgatatgttgtcatgttaaacgggtctttggtgtgtgcagtgttgttgcattaaatgggtccttgctgtgtgccgtgtcatatagttaaaacttttctagagcatgatttgacctttctatgtatattcaaaagaaagactcatgataatctgggaagaatccatctggattcttataggatctgctccaattattttgttgattcttcggaatcttttttcagtaattctgggactatagttatttttcaaattaaacatagtgtcaatatcttaatttctctttctagaattttcaagaatatctaaaaataacccttccattttatttgacagttttattgtagaatagatacctacctatcaaatttgtaggagttgttcaagaggaaaaaatgaattttcttctcataatggcccccaaataacaattaaaggttgttttgggaacagattgaggtgagaaattcccactgcttgaatagttctagtaaaccattatccttaaagcctcctgcaacttactgtgtacccacaagtatgtcttatacagtcttctttcacattttggtacaaccagatttttttaagataaaaattagcctttttttccacctttgtacttacttcccagtcaagtggcttctcttttgctttagaacttaccctgaggaatttagtactctatattaataagataaatattgaagtagaacctgtatgaagaatgcgatagtgttattcctaagtatttatagacaattggctttgggagtttggaggatggacagagaatttctgggtggtaacgtctcccttggagtggcattttgggtatttaggtatttgcccctctatttcttggctaatagaggacattagttctttcagtggcccttgttctttcccaattgttagttatcacaggacctttggtcttgtttttatttttaggaaccagttgttttatctggaacaccgtagagttgttttttgttttcagcta

SEQ ID NO: 90097 - DNA, 1047 bp, Homo sapiens
cttacattaagcgttgtagaaaattgaagatttgatttgtctcactccactccttcttctagccatctcataattttaaaagataagtttaagtcctctgtgcttttatgttctatagttttgagaattttgatgaagttcttaacctgaagtttttatttatattagttagctacataactgagcaagaaataaagggcagaaagaattacagctgagacttctgttaatcaaaaggaagccttgtatatatgacttggcatttaggtttttcagtgaatgtttaactctcagtatccagtggaatattatgagtatctcttagagagatatcacacattggacaagtacagggccaacaaagctaatgatctccagtgattgtagaactgggagaaaacttagagatcatgtaggtccatgtcagtgactgtaaatgattaaactaaggcttaaagacatgaatgccttctgttttttatagttaaaagcaaaactgtgactggaacaaagaactttagccattctgttaaatgttctgtttactatcctatgcctataaaataaaactaagaaggaagtaaagataacgatgggcaaagtgaactcccaacttttaggctcttttatttaaaaggcagaagggttgaagaaaggggaaatgagagattgaaaaaagagtgaaaggctaaatgctaaagtacatgctaaacaaaaaacagagaacaaaggaagagtttcaggattattatatgtggttcacattgttatataccagtctgatgagtttgatgtaataagcaacatgaacaggtaattttaaatgagataaatatgccataaaatattactaacagtcattgacactggattctggactagaatgtaccaataagaagttatttttgttcagaataaaccaaatagagaaagtagaaaagtagagctatctgtgaagtagctatgtgtctttggaaatactaaaactgaaagttggatgcatggttcagagcagtttatgttggaaatctattacaaatggcctaa

SEQ ID NO: 90098 - DNA, 1049 bp, Homo sapiens
tctgatatgcactatagagtttttctagatttttatatttttctcaatcgtttacaattgtcttatacgtaatagttaaacagcaatgttttaagcaatttgcatttatcagtttttcccaaaactttcaacttagttgtcatggaaaacttactttttatacttttttcatattcattgaaacatctgattgggttacatgacttaattgttacgctcactttatacatttccatgacattctgtaatttaaatgatgaataccactgacataaatagctttgtgtgaataaacacaattgactcctgataaataacttactctgcaaatgaggattcatgcttgaggggagcctgtttaccctgagtgatcactatgccataggtatgatataagaaggcttctcttttatatgtagtaactcggttgttctgttggacataccaatttggttttgtttaattcccttaactaccttgtcccaagtcatttcagaggatttaatggttaatcactttttacctggtctcagatgtttacggactgacatggaacatctctctccagagcatgaggtgagccactgtgattaccagtgccatattcatgttttaatacctcatatatagacttgcagtcttctctatgtgaggcttatgatatgctgtaatttttttaaatctagctcaatgtcattttatcgatttatttactagatgcgatatcttcagcaactcctttcacatctttaagcctctctttaattgtctacagtagggataatacactctccttcacttaatataatgagactttaataagataatgtatgtgaaaatttttaactataaaatattagttctctctgaccatcaactttcttaagtgcagtttctattttccatcttcatttcttcataactattttatttcattctatttgtctcctgtttcccctcgtttcctccaaatccctgtttatcatttattttctattctgtatcttcaacctatttttccatcagcttttccttttacgatgtttgac

SEQ ID NO: 90099 - DNA, 1037 bp, Homo sapiens
tattttaatagccatggtgctgtacctagtctcagctctagacattaaaataagggatcttgctttttgcaacctggagaaagcaaaggggcgtagaacaggacagcttttactgggaaaatatgtgtgtgaccatagtgtgtgtgtatgttaaatatatagatgtatataaattttacttttaacattagaagatggtgagtaagctaagggagaatagaaaacatttagaaagaagactagtgaaaatcaaaataaattattgttatatgattgagattttttaaagctacttctgaacctagtctagcaatctaatatgaattcctttaacaaagtaactgccaaaactaaatttttaattaacatattagcttataggaatattaaaaattaaaacattagattaaaccatagtattttactatgtaaactgtatttcactaaggtaaatttttttaatcaggttattttaagttccatgataaaagaatgtgaacaaaaagttgaaaacaagaccgtccaagagcctcaagggtaagacattaattctttttttaaggctacatgttaactttaatttttctatctaaatttgctgtcaatcagtgtaatgtgtcattttgtgttacgttatagtcctttgtttggaagacaagaaaatgatttaagtcattggttctcaaatcctggtccataaactatctcatcagaattatctggggaatttaaaattcaggtctccaccccatgccctgcgccttctctcaatattctcagtcagcctagggatctgcatgtttaaaagcttccaacaaaattcttttatgtagctgggttgttcactcaccagtcaaaagaatgtctagaaacttgtgacaggagttgtaagatgaacaacgtactgcataaaggactatcaacttgggaatgttctagtcacatgcttctaatcaaactaattggaatccaaggattcagtaaaattaaaatataagcatagacgtgaaagagtattataacgttggagtttcagg

SEQ ID NO: 90100 - DNA, 1545 bp, Homo sapiens
gacatgttgagcacctgcagcttgccacacgttgtctttgacatgttcaaacacattatcttacttaatcctcagaatattttacaacagaaattgcaagctgtgttttacagatgaggaaactgagtcagagagagctaaagcatgttggccaaaggcacaaggcaataaactagattccaagtctattacaggacagttgtcaggtcattgaaaaattgtgcttgatcagtattctgtttctgttcagtactatgataaattagcaatctttagaggtcatttagattgtgtttattccctacagagcaggttggtgaaaaagaaagaagaaatggactcgaaactgttgattgaaatcaatgcaactggcaattcaggacatcccccaaaaaaggaatatccccctaaaaaggaatataccataggattattatcagcacagcacaaaacttcattgcaatttaatttactcatttgtgaaaatactgataatatttatcttccaggattgctgtaagaattaaatgaagtgataaagaataactactaacaattacatcatgctattatgtgcctagcactatactgagcactttacagttgtgttaatataatcctaataaccctaggaggcaaatactagaatcatcctcgttttacagatgagattaaataatttacccgagctggtaaacagagccaagattcagtccagtcccagacttgttcctaaccactacacatactgcttcctttactatagataatgaacatgaaagctcctaacctagtatggcatatacaaactaccctccataaatattagtttcccttttgtgacgccaattcagagtgtgttcgttaatgatatgctactaaataaatgaaaaatttttatttttttaattgctttacatgaattttaaattttctttcctagctcaatgtcaattgctgcaagcttagtgagtgaagatacaaagaccaagtttttgaacaaaatgggccagttgacaacatcaggtgccatgttggccaatgtatttcagagaaagaagtagaagcaggaaagaagcccccagtaaacactaagatggacctcaagccgactggttccttgtacttgaagtacttgccttttttgtttcctcagttttatgttcttgcattataattttatcctaacctccaaagatatttgcactgcttttaattactgctgtatatttgttgattttggagttacaactgtggtgatagaaaattgagttgatggtctgtaccaagtcccttgtctatgttcttgtctttcagaataatttttatataaatatatatatagtgaagaagttttttttaatttttggatgggatattcgcaaatatctgtattatacactaagctattacaatggtacttaaaataatgtaaatttgaagtcattgttataaaataataaagtggagattacttaagtatttaaattatgaaagaataatgcagactttttattgtttcttaactgactagaaagagccacc

SEQ ID NO: 90101 - DNA, 1050 bp, Homo sapiens
cccatggggagacccctccgaagaaatcccccagggtgtgactctgggtcatagggtgggtgggtgctctgtgccacctttcctcctgccccccatcccatccgagaggggagacatggatatatgcagtcatgccttgtttggggagcacagacacagatctgtgggcttacagttcattttgctgagaaatatttcaaatgcctcccctgttatttcctttctaccacttccccctaaaatggcaaacctgtaataggaacatactccctgtgttgataaggaaatagcttgctttttcagttatctaccagaacttcttacatcaggaaaactgaaacaataaaaatgtgcctttggaggtcaataaatcagtgttttatgaggacatgaaaaggggagttccaaagcagggcctcctctgcaaagagtgttgttttaagaaggggtagtgtggacttcatctgccatgtcaatattaaaatttcccccattgtattttcctatttttgaagttcatggaaaaaaaaatagtgtttttcccacatgctgtatccagtggtctctaggaatgttgtctaggccattttttggtttgttttttgtttttttggctgatgtgagtctgcagcccatcctgatggtacgcaactgtccaggtggttcactccctagggcatctgccccctggccaggtggcccatggcctgactgctgtctcctcacagcatcctggccttagtccacagggaagcacacctgcctctgagcacacaggctgctgactccagctcagtgcaccccaggactggcatgggtaggattctgcccagcaggtgatttttcctctgagtaccctttcattctctgcccggattgtgggacggcctttctgtgtatttccctctagttgcagtgtggggctttctatggtgtccactgctggaaacacagtttaagttcagctcaccctttgtgccccaaaacgctaagcttgaaagaaccaagaaggagccgtgggtttcagcaaaatagccttgatccctctga

SEQ ID NO: 90102 - DNA, 1025 bp, Homo sapiens
gctttcaacaattttactatgacttatccatgatatgtcagtggttattctgtttggaattagttgagctgcttgaatgtgtagattaggtttttcatcaaattgagaagtttggggcattatttcttcaaatattttctctgcacctttcttctcattctggtactctcattatacacatggtatccttcaggtctgtgaagctctgttcattttgttattctttttcttctgttctttagattgaatctacttccaagttcatagattcttcttctgctatctcaaacctattgaacccctctaataaatttttcattccaattactgtacttttcaacttcagaatttccatttggttctttttaataatttctctcttttcatcagtattctctatttgatgaaatattgttgtcatcctttcatttaattatttaaacattattttctttagttatttgaatgtatttagtctttgtctagtaaatcaaacatctggcccccctcagaggtggtctctattgagtgcttccatcctccccttccactgtgtatgagttatacttactgtttcgtagcatatcataattgttgaaaactgaacattttagataatgtgctataccaagtttgaattctggtccccctcaactgcaggttgttctgatttctgttttgcttgtttgtttagcgatttgcatgaactaattctgtggaatctggctccctcacaacatgcagcagctaatgtttctgctcagttaatattattattgtcgttatcattgttttcacttcatgcctaatttcctaagggttaccctgggccatcatagcttactggtcagccagtgagtggtcagaagttgtgcttaaaacatcttgatctaataaagcttctactttttaactgacagatttgtgtttaggtgaagatcacatgcagtgtacaggcagtttacaagtctaccctgcttttattttttttattttattatttttttgagacggagtctcactct

SEQ ID NO: 90103 - DNA, 2902 bp, Homo sapiens
cgggctccgcgcacctcacctccgccaatcagcaccgcgaatcgacggtgacgtcgctctccccgccccctggggggccgcctttctccaggaagccacgcccaactgctggccggccgcctccctctcggcggcttccgtgcggtcctaaaggctggtgctcggcaggaggaggacgcgggctggggccgtggggcggcgtgagggtagcccgggagcggtgaggagcgtgcgaggcccacgtgagcggagggacgcggccgctctcacctttcctgagggccctggcccggctttggactcctgattctcctctgcttgccagctgccgccccgcctccgccagtggtgcccgggctgcctgcgcggccggagtgaacgcgtcccgggagcaggggtttctccgaagtgagtgcgccagccccgggacgagctcgttcgagtcctcaccgcccagtgcacttcctgaaagccggcggtgggctgtctcccaccttgtgaaactttgccaggtgtcgctcacaggggactgggtccggacgcgggtggcggcgctggtttgcggccccggtttgcggccccggcgccgcgatcccgggccgcgcccacgcccaggctggaggcaccgtgcgcaggtggggacgcgcggccgggaggtgcgcagcgggacccggccggccgagggtgagcgctgctggggacgctcctagtctgtaacgctctgtgaaaattatttcctggatagtttaggaaaagcctctcccttccccgcccctaaacctctatcttttgggaatcattgatttgctaaatgacatttcggtgcctaacccattttgaatccttgttctgctgtgaatttcatgtgactggaggaatttaataagctaccaacttgacaggctttaaacttaaaaaaaaaaagttttgttacgtttttcagatttaggcttccaagatgtttacactcgcactgttacttttttttttttttttttttttttttagcaacatagtccaaatttttaaaactcagctggatcttttgagggttaattaaaaggtgggttaaaaaaaatcttaagactttaaatttagaagtcctactacagctatgtagtaggagtatgcagaaagataagaatcacattgtaactctttgcggtggtgctggaacatctgttgggagagcatatgctgaactctgttcacctcacaagtttatgtcctaagaggctcattcacagttcagtaaaagggtgaactgaagcctgaatcagtttcggggatgaaagggtgagagggagaactgttttcagcacatttgaggttggcaaaatatataaaagtcactctttcttgtaatttgctagttctttacagtctttagatgtaatttacagccaagaaaactttattatgaggacttatacgtcattgcccttttttgctgtcaccctcaactaccctgggatcttctactcatatctcatctcctgttcccacttttctaaagcttagggtgaaatacttaggcaactagtaataatattaatcttgctagatattcacaggttcatagtgagccagctgtctagatctggatatctagtgagcaaataaattctttacctccgagttgatttttgttttattgatcgattgacacagtcttgctctgtcacccaggctggagcacaggctcaagcagatcctcctgcctcagcctctcaagtagctgggaccacaggcacgtgacaccacacctggctaattgtttgtatttttttgtagagacagagtctcaccatgttgcccaggctggcaaattgagttttatatgtgacgcagtcaaaggggcattttccttggcaataagaagccatttgatatgaactctccacaatagttgatgcatacattttataccagaattcaaatttgtaatcaataatgattacttgggtgtttatagctttggccaacattaaacaatatagtgatcaaagcttatacacataagtgacatataccatgatttaatgattttggttatccatcagctggacaatttgttgtttatctccgtctctgcatactgcagctcacaaggaggcctcaatgttttttccatgttaccataagtgagagaacacattcagtaagagtgaaaaaacgctagtgcttttgagggaggggccccgatggaagtcccactgtgacatgtgagtttttaagctgggaaaactaccctgatgattctagtaagactccctagaaagggattcctcttagccagcctacctgttgagaacacctgctctagattttctgatttttttttgtattccctgcataatcaaatcatgtgggccagataacattattgtgatagtggtgagtgtgtggtttgtatccaaatattttataaagaaatatatcttgtaacaaaaaccaggacacaaagtattattgtctcttgtccccagatgatatatatatttttaacttcccatactacactgatgtacctagatgatgtttaatgcacattcagtatattgttttatttgcctttttaatagtgaaaggtgtcattattcatataccatgccataccgtaatatagctggtattattgtccaagtatttatatgtaaccagaaaactgattccaagtgaaggtttggatgaaggcactagtgacggaggaggcttttcaaccctcctttttgcagctgggttgctgcaagacatttcaccaaaacctcagataactgggtggttcagggcagcctgatacactaaaatatatcaactataaaaaggatgcccagatacgtccacttctacttcagatatcctgaaacaggcagtctgattcatatcaagaatttgttcc

SEQ ID NO: 90104 - DNA, 1116 bp, Homo sapiens
tattacatgctttgaagttgactgggcccagcaactgttagtgacatgccatggttacaatgttaatagttgaggtataacacgtacacaggttgccggtagaatatatactttttaggctacattggaaatacaggaaagctcaacaaggatgtttttacttttaagagtaacatttctagagtttttctattatttggatgactttatggtaaatattacattggattacaacttaaatgtcagcagtttttttaggaggcttgtacataaatctcacattcctcacacaactgcggtggactgccagtaacttgtacaaaattcagcaaagaggccagggagcagtagtgaagtcactcactactgtgagtgtcctaggaactctgtgtgattgttacaatcctgtgttaggaagttacagactgcttatatagcatagctgaaaacgcttggtttttaaaatgggtgtcttcctattattaggaagccaaactataaattgtgtgttagcaacaaaaaaatgcctatgtattttaaaaggtactagttttgttgctgtttcattgaaaagacaggaagcaagacatgcaagcaatgtttgcatacttaaagacattcgttaactgttcgggaaaatgggtattctcattttggaggtttagtccccaactagcgacacaaaggtataagaagcataaaatatgtagacgatcatagtagtggttattgattaatatggtatgacgattctctggagattgtgtcaccaagatcttcaaagcttaattgcttgactaacagtactaatgtttgaatgaaagataaaaatgtaaactttcgatactaaggcacaaaattatcctatgtctttgtgttatttgaactcacaaaacatatttgagttcatcatttgaattcacaaaaatcaagtagccatgagtccttcacttactaaaagtagtgaattaaaaagaaaaccttgcggccaggtgcggtggctcacgcctgtaatcccagcacttcgggaggccgaggtgggcggatcacgaggtcaggagttcgagaccagcctggccagtatggtgaaaccccatctctattaagaaaaataca

SEQ ID NO: 90105 - DNA, 1295 bp, Homo sapiens
tttgcctaattttttacagaaaaaaatattaatgtatgtttactgcagatttgtaaaatcataattgattcttaaaaccaagttgattttgatatgagtagtgttttgagattctgcacataaagggaggggataaggtgcaagctgtaataaaaaactgtcataaggctatttatttacttacttaatatgatgttgtaacagtttgtatgtgacagtgcttgatttctggcgagctgtttgtaagtttggcatcacctttattactccaagcatcggatctaggagtcaaagttaccccggttcactagtgattggctgagcaaactcagttaggtttagagcacccagttgctgttagatgactgaaccttaatggtaaactccctgcctgtacatattcttgtttagaaatccttggcatgtattgatgatacctttcataagactttttcctaataaagcatctttttagactgttattaaaaccaaacaatgaataaaaatggtgtagtgattcttgtaaaaagtacacatgccgttccctatggaggattagtgtaaagggcaccatttgttatgtgttcctttgatttggattcagaattgacatcattggcaactctgtatattattaagcaatttcctgtgtcccaagaaagctaggacagtcaataattaatagagtgctcatcttctgcttgcggctctcacactgtgcctttgtgcccatagtgtgcagtcacctattggacctctaaaaattgccactaaaatggttgttagtaaaatgagaagacctaaatctgtgattattactcttagtccatggtttaagttaacgtatctccctctttctcatctagaacaactctgctcatggtgattacatgcaaaataacgagagcagcttaatagagcaagctccaatacctcaggacggacttaccgtggcacctcacagagctcagcgagaaggtatgctctcttttttgtaaacttaaagcattaatacatcaaaagattacagggtgctctttacgctgattaactctaaactttttactctcctttttgaagtggagaagtcctactggtcctaggcttcactcaagagccagtcctcctagttctgccatctgcacgctgggtgtttcctgcgccacagccctgcttgtcctagcacgcacacagtcattctgctctgtagtccattgtcttggctgaatcttaaacctggttgcatgcttctggggggcagagacccccagagtatttagtatagtgctttattt

SEQ ID NO: 90106 - DNA, 1052 bp, Homo sapiens
acaccagacagaacttgaaattatcactgaagctgtgttcccatgtcctgtaatgtcatagtggctttttctgctaagcaaaactgggttctgaccaaacaaaacccaagatcccctacccttgaggggaccaatgatttgcagaagtagagctgctttatttctgaatataagattagttcagaagatttttgttgaatggcgtcatcctttaacttaatataacagcttttggaaacagcataccctcccatcaccactttggctcttatcctattgcacagttctaaggagttacaggcttttgcctggctttttgagattttccgttgtttccatcctcaacatttctggcccgcaaaggggaaactggcccacaagcaggccaccaaacactatatatttgggaagttgacacaaaatactggtaatgttatatcctttgtttattataagtgtcttttcccctgtgtatttctgtatcttatgcttcatgccttctcactgcccaccttccgtggtcttttaacagtcttactcctcctctatgcttttgtcactttgtgtattccactttgtctattttaacttcttcctctaaggcaaaatgaatgaatgccccttttttcctccatctcctgctctcctgaatccaacagtgtaccccccacacccattctgttgagttactttcctaacctcttctctgtaacctttagcatattcattatcagcctgatattacctccctcattatcctgaaagtgtggtttcttctgttcataccctgaacagcagtgtctttaagtccttagagtagagtacgctttgtagattggctcttttgaaattgatttatttcctaaggtggtacttttattaaaggtgtcgtaaaatggatagttgggggatttatacatttgcttacttcatgaataaactgattatctagttcaattcagagtgttttaaagtttaatataatttatgtttactattttatctctgtaatgtaaaaaaattttgccacaatgaacgtttattataatgtt

SEQ ID NO: 90107 - DNA, 1031 bp, Homo sapiens
acaactattcagctgtgcacttccctgaaatagttctccatttcttccttctttgagttccagctcctccccacctcaccccccatatgatagaatctccaaactactgggaataagaagataatagaaacatcttattacagacttgccagaggtgaaaggtatcttagatcattttgttcaaaccatcacctgtttcttttatactaatctgattttatcgaaaagtgaatagttagaaatacatatcaaaaggagagaataggtataaatggttgataaattattctttctcagtaagcaaatattttaaaatttattgttagtagagagataaagcagaaagtccagaaacaaaacattcccaactgacttactaagttttggttacaagtgtagttattaaacatataacatacgatattatgaggctagtgctagttttaggttgtctgcttgtcaccataagtgtgttcttttcagatcattcttaaatctatgagagacttttattcatcaacttgtagagctttgaatagcacattagatgctggttctttgaggaagactgtcaaagtgtgaattccactggatttcttattagtccctgtgaatgaagtagcacccagggatgacttgaatagttccatcttcctgtggtttattataaattaggctctgtcagttaagggctgaggacttctcctcccactcattagtgacctgccttgggtaagattaggggatgagttttactcatttccagatgctagaggccactgcctgtgacatgtcagctctggacaccttggggagagagatggcataggtctgtgagcttctgtctgctgtgctcagtcatggtaacagtcgtgagggtgccagagaagagtggcctagaccggggcaggctccatctgccaggcagtgcaccccattggagaaaatgagtgcctgaatgacgttctaattacagaggaggctaagcagggctgcctcaccccaccgccacacacttttacaagcccttc

SEQ ID NO: 90108 - DNA, 1160 bp, Homo sapiens
gtaatcccaggtactcaggaggccaaggcaggagaatcccttgaacccagaaggcagaggttgcagtgagccgagatcatgccactgcactccagcctcggtgacagagcaaaactcttagaaaagaaaatgggtaggccaggcgtggtggctcacgcctgtaatcccagcaatttggggggtcagggcgggtggatcacgaggtcaggagattgagaccatcctgactaacacggtgaaaccctgtctctactaaaaatacaaaaaattagctgggggagggggcgggtgcgtgtagtcccagctactcgggaggctgaggcaggagaatggtgtgaacccgggaggtggagcttgcagtgagccgagatcgcgccactgcgctccagcctgggcaacagagcgagactccgtctcaaaaaaaaaaaaaagaagggtagattcagacctggtggtcagagggcatgattcccacagcgggtgtgtagaatgccgacagagtcttctatctgaccagaagggacttcattctgacagagcatcttgatcttgcaatctactgtacccacaatgaggaatgctttatgctacctttgctaagtttctcatttctgaattgactcaaaatacttacttttcagaagaaaatttacttcggacttctcaaagctcaatatgtaaatcaacaatttgtatagatttttgtattcctgtggcttctcagatattgttaatggttctactctgaattttagtgaaagtgccagtaataggacagattagttatcaaaagtcaaatttaaaactgaatttttcaaagacttggaaagttggcttatgaataatcaatttaggaatttttttaaagtaaactggttaaattttgtttaaaacctaaaagttttattggccaagtgttgatttttttgtggtttctagcacattgctctgagggcacctcaatcacatgaggcacctctggcgtgtggtttttatataaataagtaatattgagggtttctcacccgtctctcatattcagttctttatttgcttcatagcactggtgatctgacattgcctgagagtaaaacgtaaaacaggaggcacaaaagtgctaagtgcaaaggcagagataacactccttggaatactattcc

SEQ ID NO: 90109 - DNA, 1056 bp, Homo sapiens
tcctcctgtcacctgttcccaattgacctttccagccgatcagacagaaaatgttagccctgttcttctcactctgcctctttgttttcatcacggaaaggacaacccatactagacaaaggatgtcttcctttatgtcccttcgtcaccatccctttgtttacagttaggcctttctttcatgcacggactattaaaggtaaaccctcactcttttctcagattctagtttcccactctgatctatccctggattatcacaaggataaatgtgttaaattcctgcttggtctgaaattcaggcctcactgtgaccttccgggagcttccttctgctccctgtgctctgtctcctagcatgcccagctgttgcctgccctgtgtctttgctcatttgtacccttacttaaacatacatccttttgtcatagcccattaaaatcacacctgttttaaggcccagctgaaacatcacctcttccacgaagctttgccagtttttcttatgttccgtatgttgagttttgccctcttatttcacctttcaccactgtctgccttgtgtttaattttctacacatctacctcagcctgccttttacaaatattttgtcagtaacattggcgtgtcctttagcagaatttctgctgaacttcaggcatagctatggcaaggaacatttttcttttttaaaactgtccctctgctctcaagagagtcattttttcctgtatttaaaggggaaagaaaaacacatatttcctcaatttgaggtgtgagaaaaagaggtgcaagaatagtatgattgttacacgggctaacctttaaagtttctctaattaagtgtgttaatgctaacgtaattatcaatccgaattaaaaatatgactctttgtgattagttgaccaagacaaaatgtacaacttcatgattaaatttatgtctgaatgataacaacagcatttattaaagagaatcctgatcattctgtagctatgtagatttaaccatcagtgctttccccctgcgccaaatgtgttttttattgaacatg

SEQ ID NO: 90110 - DNA, 1757 bp, Homo sapiens
agacactgagagattaacaatttgacagtgccacgttattttattgtattttacaaaagtaacgatccacagcaaactgaagatttaaaaaaatgaaaactgaatctttaccacaccacagatgtttaagaagcacctttctactttatttcctcattttgcacatgagcacactggggctgacagatatgaaatgacttgtccaggtcagtcgctcttcagggaacagctggcctcttgaacacggttcccactcacagtctagtgctttgggctgtgtcatcttgccttctcactagtagccatgttttcttcaccactcaccctccattcattttccttaggtaaaaaaacaattattatatttgttttctttattttaattttcctaaaaagttaatagtattgaatgcttcctgcagataacttacaatcctctctgaagacttctaagatattagaacacttaaaagaagacagctctgaagcttcaagtcaagaagaaggtaaaggtagattcactagagtaaatcattctgcctgctgatagcacatggatagaacatttaaggagtgaagaaactgacatataggaattggaatgtgacagaggttgcattacaaataagtggagaaggaatagaccattcaataaatggtgtgtggagaaagaataaattgttcaataaatggtgtgtggacaaagaatagaccgttcaataaatggtgttggcacaattgattttccatatgaaaaaataggtataattagattcccagttacatcatgcagaagacattcaagtgaataacaacttatatgtaaaatgtaaaacttaaacttttcaatgttaatttgggaggagaagcctttcttgaataaagtagagcatgaccacggtagagatcttaataaattagagcttctctgtgacaaaaggaaccatatagccaggagaccatccatagattgagagatggtgtttgcaagatatttacagataagactatatccagactatggaaggatcttcctaaaaagtcaatgagacaatcatcccaacagaaatataggtgaaagacataaataggtgattctgagatgaggaaacctgaacagctattacataatgtgcagcctcactggtagtcaggaaaatgcaaatggaaacaggtgtcatctcacactcagcagattgacaaaacattttggagtctgacatcaaggatatgaagcagtgggaactctcaggcactgctgatggggatataaattgacagaactattttggacgaaatttggtgctgtgtagtgaagttggagataattatatgctgctgtccagcaatcctgcatctatgagaattgttacacacctgcaaaaggggacatgggcccgggtccttgaggcagcattgtttgcaagggcaaataccaggaaattgcctgaacatttcaaatgttagtaatgttataaataaataatgtctttgtactaggtagcaattaaaataaaggatatttatagtacaattggctctccatctctgcattggtgggtttaaccaactgtgagctgaaagtatttgggggaaaaaattctttttcttgtcattctctaaacaatacagcataacaactatttgcatagcatttacattgtactaggtattataagtaatctagagatgatttaaaatatacaggaggatgtgcatagattacatgcaaatactgaaggacagttgtatattga

SEQ ID NO: 90111 - DNA, 1032 bp, Homo sapiens
atgttgagaaatgcttagaagtgcttcataccatctgtcaccagtggttatgatcatacaaactagtagcatcctactgttggtttttgctgcagcatttagtgtaataagttactttttcctctcttctagatgtgttgcagcatgccataatccacaagaagcatactgggaaaagtcccattgtgaagtaagtatcctctttctaaaacaaaaagtgctttggtatgttttaaaatcaatgtaacatttaattaaatttctgatgtatttggctataattctgtcattttgctatttgctttttatttcttcactttttctgtttccttttctcactttttttgcctccttttgggttgtttttcttctgtggtttttttttgttttgttttgttttgttttcccctatcatctttgatagttttacaatgaaagttcttctagtggctaccctagagataatattacatatctttgacttattaaagttggatatttgtgcttgtactggtcccaaacaatttgaggaccttagattactgcaacatcatttatttccccctaacttgtaagccgtggctgtcatgcattttaattctctgtataattttaaattccatgaaacctctttgtagtgtttgtgtactcattccttcctgtgtctctgagcatccacctatgatcattttccttccaactgaagaacacttgagtatttcctatagtcacatcggccagtgatgaatgcactcaaatttttatctggaaaaaatgtttattttgccttcatttttacaagatactcttgccacatgtggacttctaattgggcagttactttccgtgagcttttgagagcatagtttccttatcatctggttctccctttatttccttgcatcttattctctccactcacctccagtttctcctgcagatcccataaaaccgtctgtgatttcttactcataccacattagcgctgtgctcctcaagtatgagccgtgactttccatgttccgccttagg

SEQ ID NO: 90112 - DNA, 1007 bp, Homo sapiens
gaagcattttattattttaaatactccaagtaattttcattgaataggcattttggcagcccttttcttcttgagttcttttaaagaatgaattttccagcaagctcttaagagttaaaatatctagacttagaaagtagctcaaagtgatattattggacagaccctgcaaccaaccttaactcgttttttctttgaagtcagtaagattgacttattctgtgcattgttttaaggatatatttattaagtattttctattagaattgtaatttaatcagtttagatcaaggacaagcttttttagatggttgtggggaaactgaagaaaatatagctaaaattaatttctaatgattcaacttagaaattaatttaaaatgacttaacatgattttttaaaatagtgttgttatttttagatgtgaatttggacattggctctggacatgacacatgtggagaaacatcttcagagagttacagttctccatctagtccccgacatgatggaagagaaagttttgaaagtgaagaagagaaagacagaggtttgctctttgaagtgggagtattgttggcatggcaggggtggggaagtggagggaaatgtgtgttgtttcttcatgtcaaagtcaaacaaggaattttatgatcctataaatgccattaactgattttaaatgtaaagtcgttataaaggatgtcgtatagatcattgccttagaaattcctaacaatgttgatttgataaacatatttcactgcatatgaagttaagtaggatgaagacaggatcataatgaggtagagttagtgtagaaagaaggaaaatgtgtcttgttagatgcatatgtatgtttatgctctttacgtcctctcgattgattgacccttttatcattttgggatatccttctttgtctctagtaacaatttttgtcttaaagtctattttgtctgagaatagtatagtcgatccagcattctaggtactgcttgcacag

SEQ ID NO: 90113 - DNA, 1049 bp, Homo sapiens
gagctgttttgaaacttaaatgagaggatttttttcgtcttctttttttaaatttatgagacagggtcttgctgtgttgcccaggctggtcttgaactcctgggctcaagtgatcctcctgccttggcctcccaaagtgttgagattataagcatgagccactgcacccagcattaaatgagaggatttttatgccttacccagaatagacaaactttcagtatgtttcattgtacatttatgcttgattctctaggataagcaggtgactctgtggctcacactgcagatttggccctgtccgaagtgttagtgtacatctgtacacttgggtaatgacagcatccctcttctgccatcagatggcacaagttggaggcctgtgtggaggaacttggcttttttcaaataggctgttattaaatatgaaagaatggcttagggctgtcttcacccaaggaaaatatccattatggtagagagttttgatcatttttagaattctgagtggatgaaaagtctcctttgaaaagggcgtgggtggctttgctgttgctctcctgggtagtgatggtatttctgtttggggctttacacttaccgaaatcagtgcacaaaagggtgagacatgtctcagcatgtctagaggagtctcaggatgcttagaaaaccaactgggagcattaaaaatcatgaggccatttgctatttcacatagaaatttaacgcacttcttccaaaatgtttctgcttctttcagacttaacatttttatctttgactgtgcactggtgtgatgatacagataaaatgccttcaataagtttggattttgggatagtttttattttgcaaagtttagcaagaaataccccaattattaatctattaggggaagtttatgctagaaccattcactctttgagtttcttctaatataaattaaaatcattgaattagtaatactgttgatgttctgtgtcagtaagtagctttcatttaatctttcttcaggaagacgaattcgtttttagtgttctgtttgaaaa

SEQ ID NO: 90114 - DNA, 1083 bp, Homo sapiens
aatattgtcttgactgagctctttgaaattgtatcatttatctgcgacaaattgaagaacttgggttggcagtgcagaatagaaaccaagtggattgcctgaagtttattaaggttaagagtgtctgatgctcttctcagtacaaagatggtgttacataaatctctttgttttatactatgtttcattcagactccaactagccttttatgttttgttttctgtttatatccccgtattttaaaaataaagcgttgatctaatatcgacccatagaaagccgaaagttaaagggaggtcagcttggacagtcaggaaacatagagggacactttccaaacttgagttactttgaggtatactcaatgtttatttctagcaagaaagatgggagttatgcccgtgttaatatctctttatgtttgttttctttagacacagacagcaattctgaggattctgggaatccatcaacaactaggtttacaggttacggttctgtcaaccagactgtcactgtcaagccacctgttcaaattgcttcactaggaaatgagaatggaaaccttttagaagatcccttaaactcacccaagtatcagcatatttcttttatgccaacgttacactgtgtcatgcacaatggtgcccagaagtctgaagttgtcgttcctgcacccaaacccgctgatggcaaaaccatagggatgcttgttcctagtcctgttgctatttctgcaataagggagtctgcaaattcaacccctgttggaatactagggccaacagcttgcactggagaatcggaaaagcaccttgagttactggcttcccctttacctattccatcaaccttccttccacacagtagtactcccgctttgcatcttacagttcagaggctaaagttgccaccaccacagggatcttctgagagctgcacagttaacatcccacaacaaccacccggaagcctgagcatcgcatcaccaaacactgcctttattcctatccataacccaggtagtttcccaggctctcctgttgctaccacggaccccatcacaaaatctgcatcccaag

SEQ ID NO: 90115 - DNA, 2425 bp, Homo sapiens
attgctttttaaagtgagcggattggccatttggagtggcactagagctgacgaaggtgccttgtggagagcatgcccgtgtgatagcttgtacgtagtggtttgtgatgacgtttgcttgtaagcggtgacttagttctgtctttcccattttaggcacttacagactgagatacgcacctcccctccccccttctaatgatacgttggattctgcagactgaaacgagtaaagcttgcctacttaatacactcaagtgtggggagtcatggggtgtggaggggaggaaaggaaaggtattttgtttctttgtctatacatttcctagatttctatgcagttgggatttttcatttctcttgtaccaatgtccaaaacaagaaagaatgcaatgcttttgagcctctggtctcctggttcaacaacaggcttatatgtatgatacatgtaatttaaaccttcagacaaacttaaatgttggtgcgtgcttttttttttttttttacactgaatacttgctgtgtgcaatgtttactgaatctttaaaactgtgtatttgaccttttttttacaacactggtgacagtcatatggttttgaaaaaaaaaagaaattttgcttcttcccagcttttctcactttcaccctaaacgacacttcctccccagccagcctcactctgtctccggcccgcagcaggagcagccagcagtgcattcaccccacttttgtaaactgctctgcatataaaccaagggcagaatgtttcaccctgatcttatgggaggaatcaaactcccaaaatagtgtgtatatatgtaataaacagcgtcacgtaaatacatatatgcagtgcttgttgtccaaatagaaatgaaaataagtggaagagagaggaagaagtcaaaccatatgaaactgaaaaaatatgacgtacgaaatggacaaaaagctttttctgaaaccaactttttacttccatcatccttttttagcctgttgcttcagagagacacaaagtgaacacactggtgtgaatgtcgctctctgtgtgcttgtgtttgtaatgaaagtctacagccaattttacttgtctaccaccgtgttgtgctcaaagagacactacttgagtgaagatttcttctttccctgtaccagctgttacagtgttacgttgtgtttaaaatgtgtatggtttattgcaatctgaacagagctatgggtttctaccataagtcaggttgtttgttccctaacctgtctctcatagcaaagtcacttttataacagtttaccactatgcttgattataatgtgaaaggcggaattctgagtgtgttaagatggtattaatcatgtcggtgtcatgtcactaagtttaatgctgctgtttttaaaaaaaaaaaaaagtttttttaaaaagccaatctatgtactaaattgcttccaggtaatttttgatttcctaaagtgcactgaggttatctggaagattgggtgtattttttggtgactgctgcattcatcagcaatgaacagtttccactgtatagtcctaggggtcagggggtgggggtttcattttccattcctcagcacagagcagaaatgatagatttttattgtttggagtaacgttggtatgcagcagaggaacgtaaacatttggtcttggttcagaagcctaacagattgctagacaagagaaaaaacttgaagaaaaaagaagcttaatttcatgcttcataagtagcatttatatttatagcaccaatgtacattttgaaactttctttcaggggtgggagttatggggaaggggtgggtgtgaaggggtagatgaaagctttaatttagaaagaaagttcaagtaaaggaaattattttgattaaatatattttatttgatctgggtatttttggaccacattattaaattaattgttaagctgcagttgagttgttcaagtgagagttttgataagccacttatgggccgcgttgtgaatcacttgccagttgtactttatggagcttattttatgatttaaaatactgtactgtacataggaggtatgttaccttctccttatttgtatgtttaccatatactttgatatttgaaatgttatgtactggaaaggccacttatatttctagaacagattggattttatgcaaccttttttccttgaattaacagcaataaaaaaatgaaaaacagcttaagaattgtgcctcattgtaaattttgtaaaagtggagataggacatcatacatggcgatttttttaaagttttatttaggtatgtaattattttggggttaaggatcaatccatttccctgcagggtgggcagtgaatcccaaagttatttaccatctggatgctcctcagttcttcccccaaataacctttttgt

SEQ ID NO: 90116 - DNA, 1051 bp, Homo sapiens
ctcaaaacctcatctcaatattaaaaaagtctttcctggttaaatcttaaaatgtttggcatgatcttttaatctttttgttttgttctttatgaaaagcagtaattgttacctcattctgcacttactgccttgtttctatatgtacagcataaatgcatgtatgcctctgagtatgtgcttacatatactcagatgtgtgggggtgccacacaaagtatccaccctattcttgaacatgaagccagtgtacaggtgtcctagaagaaaaatgcctgattgttgcgaagttgtctaattgcttattttggctttaaagcaaagttgagcttattttaagcctaagttaatataccagacatctctgctgttattcatttgcagtagaacaaaatttagtgtatggtgaatccacttgaatttttgcaaagaagttcagttattgatgaacaaaagcgtagtctcatttatggaaacgttgtcaggactccacatatagtgaaggtttgcaccaggctggaagtgattcctagaaatgatctctgtgttccaacagaatataggacacctcaacaggacagagttacattttggtagtagtttttttctgtaggaagaggataattaatgtttgttttagatgacatcttttacagggtttttgaaaattctgtaccccattggtaattttatacataacttatttttaaatttattgctgcatgttgttttgtttacgtatagttggggttaaggatagctaggaagttgctttcaaattcttttgaatatttttctgcatttaaattgagcttatctactgtcttgagggtctgctctcttgaagatcacctttctgttcaattttagtatttataacctgactagggttgttttttagaggctttgaaagccatttgtggttgctttgaatatttaaatatttatctgggtaaagtaaaatgaaagtctttaatgagcgagaaggccctggataaaggtactatctaattacagagttgttaatgaaaacttggtttgaaaattgtta

SEQ ID NO: 90117 - DNA, 1356 bp, Homo sapiens
agtttggtaacttgtctagatttggacagtgagcaagagagaggcagaattcaagttcaggcatcacatgtcagagttaacttgtaagtgtcccccttgatttgctgaatatggaaaacgtatccctaatgagcttctgtggtcagtttgggcacatcagcatttgtgaagcatagactttaaactagttaccacctggacttgagttctggctgtgccactgacacggcttttctgcattctttcttacctgctgcacgaggttgttgagaggatcaagtaagataatgaatgaaagtgtctatgacgacagtactagttcttacacaccatccctccacattttgggatgtctgttgctgctcttccttggggtggaaagagcactggagcccttctctggtctttgtgcttctttacatgatgtgagacctatagtaaaccccttaacctccttcagcctcatttattagagagagagagaaaaaaaaaggtgattttaaaaaaatctgttttcggccaggtgcagtggctcatgcctgtaatcccagcactttgggaggccgaggcaggtggatcacctgaggtcaggagttcgagaccagtctggctaacatggtgaaaccctgtcactactaaaaatacaaaaaaatcagctactcgggaggctgaggcaggagaatcctatgaaaacgggaggcagaggttgcagtgagccgagatcgtgccattgcactctagcctgggcaatgagcaaaactttgtctcaaaaaaaaaaaaaaaaaactgttttgaagaactttgtgagattcagatttgatgatacgtgtggaagtgctttgtaaactgtgaatgttatacaaatgtcatgtggttttattatttttagcaatgggaaattgccacagatgttaattagagttaattagggctcattaaggaagatgggatctactgttgttgggcactgatgctcagttacatggaagactgtacaggcataccttgttttattgtgcttgcttttgttgtgctttgcagatattgcatttcttacaaattgaaggtttgtggcaaccctgtgttgagtaagtctgttggcaacgttttttccaacagcatgtgctcactttgtgtctctgtgtcatattttggtgagtcttgcaatatttcaaaacttttcattgtttataattttttaaaaaaaatagggaacgtttcatgaatttgcatgtcatccttgcacagggaccatgctaattttctctgtatcattccactattagtatatatgctgccgaagtgagcacccttttcattgttatatctgttaaggtgatctgtgatcggtgattt

SEQ ID NO: 90118 - DNA, 1178 bp, Homo sapiens
gagcatctaatagtttcttacctagcatagaaacctctgcttgtccattcctgattgatggttagctggcctctgcttgttgactgcattgtgttgagccttggccccttgaaatgtggtctgtggaccagcaccatcagcctctcctgggagcttgttagaaatgcagaatctcaggccccacctcagacttactgcataatcggcattttaacaagatccccaggagtttcatctgcatggtgggagtgggagagagtagaagttgaaggaggtaaaccactgtgtggttcaggcgagacactgagggcctgagctagggcagtgggagggagtaaaggagattgatgtggatattatcctgggactcagtagctaactggctcttttggcaacagaagctccaagatgacaagtttacagttgggtgatggaagaattgtggatcagttcataaaagtaggaagcaacagattgtgtagcggatatcactgattaattcagtgatccttgaggaccaggcactacttaggagttggcgacataatgaatgaaagtgtgtcctctgttcttggtatttacaatttaacattgaaggactggttttgctgaggcatgagtttgaaatggtaatacatgttaagctgactgcagccatctgtttagttggtaaatgggcctggctcaccacccagcttccaaatttcagtggaggtttgtcactttctactggttaccatatgtgtggtaactctcaggaagtgatatagacattatttatttacttggttttcttctaggagccatttatttttttccgtatacaaaataaatgctagcactagctatggctatcagacagaagtgaggaggtataaaaagaatatgtattacatttatgaagctcttaggatgtatgtcttttgaatgttgagtttttcctatctaatgggaggtgacgtttacataaataataataataaaacttgaaatgccttattggaggcatttacacagtgccaggggaatccagaaaggctgacataccagctccctggaagtagaatcctctggaaaggattcctgggaaagattctctgagaaaatgagagactagcattgcatgaaaagggcatgccaggtactgcagcatgaatgacagggctcgatgtgggtgg

SEQ ID NO: 90119 - DNA, 1052 bp, Homo sapiens
ctctatttaggtagtacttttgaagcctttggattgaatgaaaatgctagacagatagtagttttgaagcctttggattgaatgaaattgttagagtgaggaaaggccttaggaagcaactccgaagaatgcctatatttaaaaagtagtagcgagttatattgagtgaaataattcagacatgaaggagatacaactctatgattatgtttatatgaaggtcagttagctggcaaagctaatttttggtgacgtattgtagtggttacctttcagcgggatatggatgggaagggacatgaggagccgtctggtcttgatattgctctttgtattgatttgggttttagttttctgggtgggtacatatacaacagttcattgattggtacccttatggtttgtgtgctttattagatgtaagttatatctcagtggaagaagagaagaggccctgaaggcagaaatttgaacagtatttctatcctgaagggagagagggagaaagaggctaaggatgatggatgaacagaggggaaaaatttaaacaaaggaaagaaagaaataagcaggcatggagcatccatgaaggagttaaccctaggtgggaagagggtcgtctgtttccataaggcttttaggaaggatggataaagagattcttgtaagagctctggaagtctttgggtctcaattggcctcagttttcttagtgaattagaaggtaaagaagagtcacatctcaatatttattgtaatatgctttttctcgagctcatcaaccaagtaatcatagtgtataccatctgttgtgaattcatgagtgatttcaactactgctgaatttttggaggattgatccttccttgggccatcctaaagcaccttactgcactggaagggaaacggggacaaaggagaggtggaggagctgattgccaaacttggttttacaggttcggcaatgcttgcattgggtaggtttgttttgatagcaagcacagcttgtagttccctgctcctaatctgtaggggtgtgtatgtgtttgggc

SEQ ID NO: 90120 - DNA, 1019 bp, Homo sapiens
tcctttggaagtacttcagtcaaaacgatgacactgttattttcttaaaaattaacactaattcctatttttcagcaattacctagtcagtgatcaaatttccattaatcttacatttttggtttgaattatgatccaaatgtggtccaaacctagtaattgcattttttatgtcttttaaatttcttttaattttaggtttcccgcctctccagctcttcttccctctcctcttccaccctccccctctccctctctttccttgcaatttacttgttgaaaaaaccaggttatttgtcctgtagagtttctcacagggtgagtttttgtgactgcatctctgtggtggttacattgaaattttggacatatatgttgataggctttttaatttttttgagttttgcttaatgtttactactttgatgtggagaggtaagttggatcttcttttgctggatttagagcagaggtccaaaactggtgccgtgggacacatgtggctcacaggtgtgttttgtttggtaggcacaattggaaatactttaaagttaattgccatgagttagacattgtaaagttcccttaagaatcaagatttcttctttttttaaattctgttttaaaaaatcagagtatctgggcaccccagcttctgtggcaatgcctctggtgagtggtggggctccttcagagggcgcatgcccgcacctggtgcgagcacactcctcatacaggcttcctgcctggtcccagaggcctgctgggtttgtgaaccctgacttagaggaacagagattacctttatttgtgtggtgtctctgaaattcaatgcattttttgcctcatgttttctccaagctggtatttgagctgtttcactgtctaagaattgatgtttattcagagagtggtcagagtgccagctgaagttcctgctgtgcttcatacctctgtcttaagcctgactccatgcattgcatgaatttgttctcatgtgcctctcccttggactgtgg

SEQ ID NO: 90121 - DNA, 1046 bp, Homo sapiens
tgtaatgttttaaaacctggcatttggatatcatttaaaaacaataataattttaataccattgcattttagggtttagtaatcttatttgttatactaatgcatactttgaaattagagttgaggttttaatttttttggtagatgttaagcctgcctgaacctttacttgctgctgacaacctttgataaaaagtgtgggtggggtcaggttctgtaccctttgactccaggagaatatttagtttatcatgattaagagaacaggaaaagtaaacacgttaccagttgcatgttctagtataggctaaattcttattccctagtggttattacatgaaaatgtagtttgaatgactccaaacaatcaataaactaacattgcattaagaaatctagctcattttatactgttaaaaattgtcaacaagtggtactattaaaagtgaggtgtttcaattttaagcagtccttcagtggcatttgtgggtggtgagaactctcattgagagcatgtgggtgccttcacatagtgcagtggtgagtgacggggatgtgctatagtgttgcaagaaattagaggttttttggagtaattttaatagtaccaccgttctgtatttaccaaatactttacattttttaaaccatttcagtattgaaattataatcactaaaccaaatctttgaaaaattcatgattaaaattaaaattcttaatgttactcttgcctcttttagtgactgaattgaaaaaagttactggtagtaaatgttggccagtgttctacatatgaatctatgataagaatttttacaatctggaggaaaactataaagatttgaaatccaaatactgtactagtatatagtgaactgtgtcagagactgggtcagaggtgttagatctgaattgctgaccactggatttctttctgggctcccaaggggaatactcaaatgcatgcctaatatatgttatataagtggaggaagatggaagaaaaactaatttttttttttttgagacggagtttcactcttgt

SEQ ID NO: 90122 - DNA, 2712 bp, Homo sapiens
ctccttttctgacgtcgctgacttctgaaactggcagtgtgctggtagaggtagactctgtctattatagcttaaatataaagctataaacacatgtagtttttcttctctaaattctttagcaagacacctgtggtcctcagctggcacagaatacctggttgccttggtgcttgcttaccttgggccacccttgtgctgttttccagttttgcagctctttttgcggcttgctctttcacctgcttgcagacctgtgtgaacaactcaacctgtgaatatttcctgcaaaaacgttttcatcttgcccatttggctctgggcccttaaggtgtttgttttcgtgagcaaggcctttttcactggtgtgttcggatttgaaagaaatatgttcaattagttttcagctgtggaaagttctagtttagggacacttttaaataaaagctcgtcggttatagtgtggtagaggcagcatgcatttcgaccccatgagcggagcttctgcaaatgtaaaatgcctttttctccaagtgctctaaaaaatatacatttaaagtttattattagcagagagtagaaatctttttccctattctaagaaaagttgttgcactttggatggtaaaattgtaattgtaacttttttttcttacccctatagggtacctttaccaaagtaaatcattttggcttccagtgattaataacatagcttttaaaaagacaaaatgaaacacctaattcaggccagtaaactgacatttccaagataagggaaaagcactaagtaacttggaagctaagtaacttggtgaagatttttgtcatctagtaaatgggtatcctttcgtgctcaacccatgctgttatgatagtattctctccttactccgtttctttagataaaagcaaaacctttatttctttgtgcatctttgggtagtcacagaaacccctaattagcaagcaaataaaaaaaatttagcttctttttgctaaagtaaagagcctctgacaccttaactaggtactgttgagtggattggtctgaggcagagatgtgacatcttgttaagtttgtaactttccctagtaaatccatttcagaaaaaatttcagtttatgactgcacttgcattttgcatgtggaaaacccgtgccaccagagtgaaggatttccttaggagttgaaacaaaacaaaacaaaacaaaacaaaaaaacgatctttccacctctttgaaaattgcttccttttaaggataatgaaccaaatgcaaattaccttcttttcacatggtgattgcaataaggggagaatggaggctcttgttgaatccaagtctttctaaactaaggaaaaaggaaaattttgtgtttaattcctgtgtaatgtttacagagccgactgtgatgttctggagtcaaaaacaagatttatatggaaatgttgatttgttgaatttgtgagtctgctttgtgggaagtacataggatagagagaacagtccttaagacaacttgtagctactttaaaaaattacataaatatgacagagggtgatttagtactatgtggtgggatccgtatcaagggtttgcatgcctataatggtatggagtgtatcagatggccctgtcattcagtgagaagactgctgcagaaaaaacacaggtaaaaataattgtcttgcaacctcaaaaagtttgggaaaatgtttaaaaaatgtaatcatttccatagcttaaaaaaatctccactcacctgttaaatgaaaactcttttcagccttaggtcagtgtgtacttttggagattctgttgtgtttgcagctaaaatgtttctgaatttattcacaaagatatttctttggaaatgcaacagacagaggatgcatagagagatgggaagagttagctatattgagtatgttctcatttgtgtctttggcttaagtaatatttgtcaaaatctcttgaacatactaaatatttgtcttaatttcaagatcttgcttgaaatgtaaccacactgatatgcttactttcccttggctatgctttgatggctaaaattaaggactaataacgaaatgactaattctacccacccaaattaatcttgttcagaattagtgatatcttcaagtttctgtaactggtggttgactgactcagttaagagcgggttttgcctgagcattaaaatcatcttaccatttatgtatcatttcatcattagctatattgttcctcccctcccccaacccaatcttctcttttgcagccttgctctttctttgggaaatagaaaactaaaaccctgggaatgaaatatatagttagtgactaatttcatcttggcttaaatggatatgattcatctagtttttataatcttccggctgttctcagacctgtgtctctttgccccttgggttccatacttgtctttgtatttctgtttctattagaaatgatagtagtgcccccagaatactggaggttgaaaactggcagttctaagggatggatactagtggtctacagatttatattgtttgatcagtggtgtgtttaatttttaaaaattaattgtcagtatgaaataataagattatttccagtgtctcttgaaaagaagcacaaaatctggcaacaccaggcccacattcctgcatgaagtgaagcagcagctgcctccgtagatg

SEQ ID NO: 90123 - DNA, 1071 bp, Homo sapiens
ttttcttattgggttgttattgagttgtgaaagttctttttatatgctggatattagtccttgttaggtatatgtatgtattgaaaaatattttatcctattctgtggtttcttatattcttatttatattatatattttattatatatttcttacatattatctaaagggtgttgttttgaaaagcagaagttaaaatttttttaaagcctaatttgtgaggtgttttttgcctactgtaaagtcacaaagatttttcttgagttttcttctagaagctctgtagttttaagtctgtgatccatttttgactttaccttttccgtcactgtctatatttggatatcacttgtaatagatttctgttttagaaaggactcatccccttcccccaaccagtaaggactctcttttagaatatttttgttaaagtgctcgttgtttttgtctctcacattaaaacacccttctcattggtgtcctgcatatcatgtctgccttctccaatctatttccataatgccataatgtcataggttattactttaaaattactccaatcattcgtgttactaccctgctgaaaaatcctcaataactgtcaatttcccaagagttgcctaaatctaggtgatgtcacttgttggaatctccatgtcataccatatgacaaggagagagtgaatcagccagttttctatgtaaagaattaatcaatccctaacttggaggacttagccataacttctgttattatatttactgcattctattgtcattattttgttagattgaactctttttaatgtattacctttgatattcttcccagcacctcctagaccattgtgatacaggagactttttttgagggaatagttgaggaaccttggcagttaaaaagacagcgctggaaatcattgacttgaagggcagactgggcagccagtaaattttgggtgctatgttgtttttaaaaatcattttatacttagaggggctaacttaaagagaataatctggaagactaaatatagcctttagtttaattaggaaatagcttctgttgaa

SEQ ID NO: 90124 - DNA, 1030 bp, Homo sapiens
gaatgtcatctgtatcatcatcctcactgaagtaactgacagtcagaaacaacttgtgactaaataggtactaattgatatgattgtctgtttaaattactcagtaattgattcagcttttcattacgtagtacagaatttaattatggtagaaacagatactgtcttttgtggctggagctatgcagattacagggttctgtctcgtattcaatttgtcgggtcatgatttctcatcatatcaattctttaatgtagctaaataatactcttcttttggttttaagtttcgattaattccagaggtgttttgggacttgctgaagtatcatcaggccatgtgttctgttttttttgagttaaagcttggctgaggcaggctggtagattgagagctctctgggctggaggtcaggaagcccagcctctggttttagttctgccagtagccaactgtccacatgaatattttggccctcagttccctaatttataaaataatagagttgaatgaaatggtctcaaatgttagtctttttttaacagtgtataattatgtaattctgggcaagaaccagtcattttgcgcttgtgggaatttttataggttgtatgcgtatgtggtatatatgatagttgtccagttaccattacgcttttcaagaaggaatagtcgagtttgttttacttaactgaacattaaaacatctgaaggattcagaagtggtctagtttatttcagtttttgtttgttttcatttttgttagtggctgcaataagaaatactgtacatgatttattgggcatattgatttaaaaattggcagtattatttaagtggataataaagttttgtcttaaggatacttatttggccttctcacagtttgaaggttctcaacctttttcttctttggaagtcatttgagaattttatgattgacttggcctcatgtgtcctactttagcacatcagttttacttaaggttcatatcattcttcattgacattagatatgcatcagtttt

SEQ ID NO: 90125 - DNA, 1016 bp, Homo sapiens
taggcacacctcacctatttagtgtttggttgtcagtcagcgatcacttgcaagcacaaccttgggccaggaggctagcgaaaaaagacctctaagcagcccaaacagacactacagaatttcaataaaacacgtgggaggaggtatcaaaagtagcattcataaagtaggagccagcagtctgggacctcagtagtatccatggatgttttatgaatatcatttattatactctaatataaccccataatgatgatgacctaaggccatcaagaaaaggtacttgctatttatttgatttttgaccaggcaggacaagttatgacatattcaaaagtattgaagtaaaacatattgccaaaagaataaattcttgggcatctataaagctcagtaatctagaataccacatgactcccaagtttaggaaagccaatatattaatattattgttagcagctatcaggatttaaaatgttttataaaaagtcacagcatttaagtggaacaaatgaaggtacccaccatgattcctggtggtggcatgcatgctggtggtggtatgtggtaggaagaaactgtggatagaaagattagttatgtggctcttgccgttagttgagtgggagttaaggtcatgaatctgagtctggggactgagaggaagggatggatacaagagatgctatgatgattcttgaggatgaagtggttaactggatatacatggcaaagagggagggagtatttaaaagtgaccccaggttttgcagctcatgagtctgggagaatgttgtttactactgcagaaatgggacaggcagctgattttgcagggaggaagactggctttgttttcggtgtgctgagttgaggagctggcgacagacctggccggagcttggacttaaaggcctggagcactaagaggctctttccgacagttcccaagacaagcaaagacaggcatgctttcattattgtcctagcaagcgcttaataattagtggttgatt

SEQ ID NO: 90126 - DNA, 1050 bp, Homo sapiens
ttctttgtcagagttatttataaagtcccaagcattggtaagggtagcatcaccatacttataggtcagtatttcttgatttttaagtgatatgttaataaatggaaattaggatttggatgagaaaatgggtcattgggggcacattgagcaaatattttctttttctttttctttttttttttttgagatggagtcttgctctgtttcccaggctggagtgtggtggtgcaatcccagctcactgcaacctctgcctcccgggttcaagtgattctcctgcctcagcctcccaagtagctgggactacaggcgcatgacaccatatccagctaattttttgtatttttagtagagacagggtttcaccatgttagccaggatggtcttgatctcctgacctcgtgattcacccactttggcctcccagagtgctgagattacaggcatgagccactgtgcctggcctaagtaaaccatttgttaattggttgtctaaatgtctgatctgtttcaagggttgtaagtgaaggaagtaagaccacatgtgtatggtaataaatggttttgttgctcactgctgtgtagcaagcacattcttgtagtctttccttatgaataaatagcctatgttagttttttcctctctattctagtttcaagaaggctaatacttgatcattttcaaaaataggttttggtcaggctgtgcaagatgcgtttagattgattttagtcgttcattttgaaaccaatgctgcttaacttttgtcggagcattgaagagttagtgactgatatactaagattttgccctgtggatggatggattactgaaaaaatactcatctgtattaccactataggttattaaaaatgcatatttaatgtttgatactttgttaggtcaacagtctctctctttgtgatgctgggtgtttgcataggcaaatctaatataactattcagtatcctctttggggaaggcactgtgcttggcaccccagaaatactaacatagctaaataaccctgcctgcctttgaagag

SEQ ID NO: 90127 - DNA, 1013 bp, Homo sapiens
aaaatatatatatatgtatatatataatataatatataattatatataatatatattttataatatatatatataatatctagtgcttttgtgtttaatgtaaaccagaatcacattataaataagacaaataaatgctgatatttcaggtaacctgtgtaagaatgtttttatatctcatttagagaattaagtgtaaaataatggggtggattgcagtccttagtgccttggtttgggtgttgtttttgaaatgacaaaatctctctagggtgccaggagcattacaatggaatatgctttcatatttttgaattggtaatttaacttgttatccaagttcagtgtgattcagattgctgtgtgatgtaattatttgtcaagtgaatgagtaagggaataactttggaaaacagttaagagaaaatttgagaacagtatctagaaaatcattttgaaatactggccacatttgaattaccaggtaaaaaccattgcctgatgatgagatatcatttaggagagttggtttctcttccttttagagaagaagcaatgggtagagagtttcggttgatagggcttagaaaattctctcaacctaatagacaaatggaggttctaaatgtgtaaggcagcactcctgcagggaaaagtagggaagaggacccttgtccttcagattcacatgtagaattaatgtgatattagaagtatacttgtctggttttaaaattattcatatgtttacaaatgtgaggagatgaggagatattaaataccattgggcttttatatttataatttatcatttttattgtgcttttgtatgtatttatatcaaagtggttttatgggttgaaagcagtgagtcaattgcctacgctctgctttgttcagaataaaatgcctaactaggatcaaagtgcagcacatttctttctgtatagagatgttgatattttaaatcaacttttaaattattaactttttctttattttggaatactttt

SEQ ID NO: 90128 - DNA, 1428 bp, Homo sapiens
gttatttcagtttagaactatttaattttattttctctaaagttttataatccagttttaaacaaatggcaaagatacctagtttgcttatcgtctcataacaaaagaagcgtgtttttgtgaagcagtgctcatttgtataattagactattaccattttaaatgcatcccatgtacttccatcttccttcctcctgtcttctcatctcttcccccttctttctccagctgtgttggaattagccgttgttgttctcactgtccagcaaggagagatggggagagggagggaggaaagagaggactcttctgtcttttctttgtgccaggcactaggctccatgtggattgccaggacctcagcaaatggaaacgtgttcctcatgtgttcttggtggaactctggaaaatttttcccaggaaaccttaaagaagtttggttgggatctgtacttctgttattagtactttaaaatacttgcgggtttgatctgtataatgttatctttaataaaataacttctagggctcaagggaggaacttacagctgcattttaaagttgtaaaatgttgttttaatattggtaagggcccttgtaaggtagttgacaagaagcgaatattaatattaactgcagttttctaaaataattgtgctaccagttatttgacattttctttgaaagcattctttagtttaaccttgaattctagtcttcaacaacaaacgactcttagttcagagacttaagatttggaaaagaccagactctcacaccatcccacccatgtccgtaggcatttccaacatctgtagtgtctgatgtgacagtttttccttataagtgagctgaagtctgtttcctctagctttgactcattgacccgaatttttctatctggtaaaacgcaagaaaattcgactccctttcctatttaataacctctcaatattgttgagttaccaggatctgtgcccttgcactgccctgtctgctccttagcagtctattttcagcagaagtatccctggcaattccaacaattccttctgttgcttggttctcagatactttatctcatagatttttttgggtgctctgatttgttgacatccttgcagatctcatctgatcagcacagagtatgtgaccgttattttccttgctttagacattatgtccaaagtgaattagttacccatttatttgtgaggtcagccctaaaagaaaatatttttgctcttttgctccctcaacttgttgacatattttctaaacaatataattatttactgtatcaaattgatgctatagtgacaacaataatgcacatagtaataactaacattttggcaacttttaccatttggcaagcactgttgaagatactttgtagtagccctgtgaagtaggtgctgataaca

SEQ ID NO: 90129 - DNA, 1014 bp, Homo sapiens
tttcttccccagcctgcagttgtttccatactcttatttttgggtcttttaactatattttaacaggtacctcatagcctatcattttaaaatcatagatcctacctctcccacatgctcttgccctcaacagaataccatctctcatatttatttatttatttttgagatggagtcttgctctgtcgcctaggctggagtgcagtggtgcgatcttggctcactgcaacctccgcctcccggattcaagagattctcttgcctcagtctcctgagtagctgggattacaggtgtgcgccaccacacccggctaatatttgtatttctagtggagacagggtttcattatgttggtcagactggtctcaaactcctgacctcatgatctgcctgcctcggcctcccaaagtgctaggattacaggcgtgagccactgtgcccagcccatctctcatttttaacctattgatgatagcctgtctggattttcctgttgtattcattgatttgctatgtcattacctcgaatcattttaaatgttgtataatttgcgtaatcttttttcttttcttttttttttgagacaagatctccctctgtcacccatgctggagggcagtggcacaatcatagttcactgcagcctcaagcttctgggctcaaggattcctcccacctcagcctcccatgtagctaggactataggcacgtgccaccacacctggccaattttttaatttaattttgtagagatggggtcttgctgtgttgtctgggctggcctcaatctcctggactcaagtggtcctcccgcctcagcctcccaaagtgtagaaattacaggcatgagtcactgtgcctggcccttattttattgcttatatatctttttccatctcatttaaccatttaagaaaaagaaatggtgagattctgaaattccaggtagaatttcataagtataaaactggtagctttgatatgcttttattggaacattatgaagatatat

SEQ ID NO: 90130 - DNA, 1138 bp, Homo sapiens
aatgatttgatttggaaatggtagtgttagtagtagtactagtaatagtaatagcagttaacatttattgagtgctttttctgtgccaggcatgtagaagtaggtaccatctttatacgtgttatacagatgagaaaactggatcttagatcagtgatctattcaagttatctcagctcctgagtggtggtgctgggctatgaatctggacactgaactcagaaccatacacctaaggactacgttctactgccttgtgtaattaggaacagaaacctggggtttggtaaaagaaaaagagatcagactgatcacagagaagcagtgaagtttctgccctaaagctttggtaaagataaatagggagaattaaccaaagttttagaactgtactcccattgcctctgtgaggagagaaaaccaagatgtgtggaggtggggctgaagccatgtgctttagcataaattggcactgtgttacctacaatattgggaagagcatttgagaaatacagggtggtcagtgcgttttctgcttcccacataaaagttggtctttagccctgagatcctggctgtgggaggagtcatttaaccaggaaggcattgaacatctggataaatatttagacataaaataagttttacataaaatacttacatgaagcaaagcacaatgaatttgtaagcatttcactgaaactgggagaggcagcctgaaaagtttgtagcagacaggcaatggaatctgattctactgtaccattaattgaagatgtgtacaaggtcagtgtaaaggtcttgttctttttctttatttgtgctattttaaatcagtatatacaatggcttttatatgttcagtttagatcttagtatctgtctcttgaccgtgtatttactcgatagctctgaattctctttctgtcggagagaattattccttatgttttcaggaataaaactcctgcattggaggagattactgatatcactaaacctgatggaataatctatgttctttccagcctgtctcctatgctaggttactgtacataccctccaggcagggacattttcctgcttttataaagtacttggctcaaatactaagtacagacatgcatcacttaatgac

SEQ ID NO: 90131 - DNA, 1111 bp, Homo sapiens
ggttctcttcttgcctaatgctgccgacctaatttatggcaatgatggcccattttcttattccctcatatagtacattttgaagacggagctcagaaacaaaatatcagccaggctatattaaattagtttgccctgttgactttttgggatagtttaagatgttctttaacatttattcccacttaaatagaagggagagaggctggtatcttcaaaagccttggcttgattccaattcagttattgtattctgtccacttccattctttgagctctgtggagctctttgccgtattctctgagctttaacttaactgcaagagtttaatgccaacactgtatttgtagatatttgctattctgagtggtaatcaactttactctgcacagctcctagtgcatagtaataagtatagagtaaaaggaccaaactgatgcttattttgttgatggtgaagtgtcatcataacttgggacttgggaacataattaacatctttgctgatgacttctgaaataattctttggttgccggtatgagaatgctgatggagaccaatactcctctcctccctctctctgctacttcatgtcaaataaacacatctaattctggagctcattcagacaacacacgcatgtcagttttgaaaactaaggacccatgaaaatgtctgtttttatttagtggctgtaattttgatgtcactcaccatgctctaaactaatggagctttgaatgggaggagtcacattcctcttgtcatttctctggagtggtgaggatgatgacaccagaactggcaggatatttgacagtgacctctgtaaaagcagggcacacccattcctccctggtgatgtcttttggacgtataattaataagaaaaccttggggaaaggctgactttctaaatagctgtttttttcccctaattttaaactttgtcagaatgcatatttatactcctcatattgtgtgtgtgtgtgtgtgtgtctggaagtgcaacaaaggggagatattatctgatacatgtgataaatatgtgcatgttcagatgtactatttcattcaattcaaagtttttcataggcaaataccagtgt

SEQ ID NO: 90132 - DNA, 1296 bp, Homo sapiens
attacagacatgagccaccacacccagcctaattctgccttaatacttaaaatcaaagctagtggagtaatttaaggagagtcttgcttagtttctctaagtaaagggccacttttattcaattttttttccctttaaatggaaatggtacatcagattgattatttttttctttgcattgatgttgtttgagtttgatattatttcttctgtggcatcattaataattcctcctcccttctcctctttctcctctttgtacaaagtgtggctgttacttcttggtcagttctctttctatccatgttttctgccttgggggttgcatatactctcaggcttcattttcacctttcatcttgatgttaatcattccccagtctttccctattccttctttgacttcttgagaccagttccacttaagctgccagctggataacttcttggttttccctattcacacatttaaccaaatacatgtaaaacagagttcagtgtctttcttactcaaccaattctttctcatggatttctttttttgctgatagcaacaccacctcattggttttccagacacacaactcttggctgattctgtcagctcttcttttacatgagtttctgtcttttatcccttcctttttcttctcactgtgactgttgtcttctacctgagccatttgcttccattgtgcagcctcccaagcaagcacaattttgctcagagcctgcggttctctagttcaaggtactcaagccctcatatttggtttcagcccactggtatgtgagtcatttgaggatgaggctctatctctgagctgctcatgtgtgggcctccaacctgtggtggcaagttaactatttgctacttttccacaatgagatgtgtacagaagttaagactaatattttagtaacatataatgatttgacattgccacaatatccaactgcattacgagttgattcttgctgtacagggaatcaactagttttttttattttgttttatttattattattattattattttttgagacggaatttcttgttgcccagactggagtgcagtggtgtgatctcggctcactgcaacctccgcttcccagatttaagcaattttcctgcctcagcctcccaagtaactgggattacaggcgcccatcaccatgaccggctaattttttgtatttttagtagagacagggtttcaccatgttggccaggttggtctcaaactcctgacctcaagtgatccaactgcttcggcctcccaaagtgctgggatt

SEQ ID NO: 90133 - DNA, 1030 bp, Homo sapiens
agtttaatttaacctaaagatagggtctcatgctgtcacccaggttggagtgcagtgatgagatcatagctcacttgtaaacctcgaactcctctactccagcagtcctcccactgtacccttttgagtagctgggactataggtgcatgccaccatgagcaactaattttttatgttttgtagaaatggagtctcgctttgttgcccaggctgatctcgaactcttgggcacaagtgatcctcccataggcgtgagccactgtgctctgcctcttccttactttttctttatttcttctccctatcacaattcatcttgcttctagagaaaagcgaatccacacattctttcgatttatgcccttggtactttggtattttatttgaggttttatttattctttgtaatcaatttgagtttagaaccacatttgaggacaaattcaaccaattacttttatgttcttgcatttaggaaccgcttagaaaatgtgcctgagtgggtatgtgaaagccgaaagctagaagttttggatattggccataatcaaatatgtgaacttcctgcccggtgagtattacagatcaaatgagaggatctcacaataaatgagcaattttaaaaattgctgattcagtgtttaacttggtatcataagcctaaaagagtttgctttaaaaactaatatggtgtcttttaccccatgtggtgtcttcaagttacacacttgcttcatgcagtgcagtgaggagtagagtgaggctttgactgtcagccagacttttcaaaaccatgcaggcagtggtgcttggtggaaatttttaagtaagccaaaaacaatctttgaagcaaacaatatgattggcccacttctggaatcttaagtctttcagaatcttccacctctgttcattgacttaacatgtctactttaaccataaataccttttgttctccctagactttaactttgacgggggaaaaagatggttaggtcatgaaacctagaaagagcaaactagattctc

SEQ ID NO: 90134 - DNA, 1033 bp, Homo sapiens
acaggattatgtgaagggggtgggataaatttgattagctgtttttttaaacctatttttgtattagttcacttgttagaagataagaaaaatcatattttctaatgatttccaccaaattattgcctttaaaggttaatacttagcctctttgcacaacctcaataatggaaatttttacctacctatttttaaaaattttattacttttttttattgaggcataatttaaactcaggaaaattgacaaatatcgtgtatttggtttgatgagtttgagggggaaatgaataaactagtactgacagttgttgaagtaggccaacccggaaaacatgaaatttaaaatattaaagacagtttttaggaaagattctttgtgactggcttcttgcaggtggtttcagttgtgatttgtttttgttcacatggttcaatgtagcagacatctcaatgagtttaaatcactgtgctggatgcataggacattgagaaatgactaaacataggaattatcctcaagaagcttacaatcgaatgaagagtttaaactaactgcacaataaactatagtgaaaggtaggtttaagaaggtagaatagacggaaaattacacggttggtctagtataatttaggctcatggtataatgagcaacattttgttgttggatgatacaaagctgtgtgtttggcaaatagctgcaggcattggtgagactttgcttcagttgcccttccattcagtttgctacttaatacaaatcttaaaaatatggaaattccttttttatatttttttgtgataataaattatggttacagttctgtgtttcgttatataactgaggaaagggctttatatgtttcagtggttcgtgttctgaagtagaacttgcactaccaagtgtcaagagaaatatcagagaagcatgtgttgttggacacagagcagaagaccatattttgactcatgagagttttcctttgctctgaattttgcctgctaaagccagtctcatagttttaattac

SEQ ID NO: 90135 - DNA, 1029 bp, Homo sapiens
tccccagctttgcaatgtgcatttaactacatttcacaatcaccgtggaggatttttttttttttgggcaattttacttatcttagttataaaaccattctttatattttatccacgtttctttttctttcttttcttttttttttttttttttttttttttttgagatggaatctcgctctgtcgcccaggctggagtacagtggtgcgatctccgctcactgcaagctctgcctcctgggttcacgccattctcctgcctcagcctcccgagtagctgggactgcaggcgcccgccaccacacccggctaattttttgtatgtttagtagaaacagggtttcaccatgttagccaggatggtctcgatctcctgaccttgtgatccgcctgcctcggcctcccaaagtgctgggattacaggcgtgagccaccacgcctggcctttatcctcttttcactctagcatctgaaaagtgtggcagcaatatattatcttgtttgtttgttttaatgtaaaatttatttaagtacaatataaatacagaaaagaggccagatcataagtgtagcccttgatgcttcgtctcaaagtgagcacacttgtgtaaccagcacctggactaagaaacagaacattacaatatttgaaacgttacacgccgtctcctggatactgcctcctttccctccccacctaagagttactgccatcctgacttctgttactacagagtaattttgcctgactttgaactttatatagttatgggatcatgcagtgggtctcctcttgtatctggcttcttctggtcattatgtgtttgtgagattcatcctgttgatacatgttgttttagttctttattctcattgctacatcatattatgttgttttaatagagagcaaattatctcctgcacttgtgaaagccagtaaaatgtgctttggactttatactgaagaggactcaagtcactatgtgatttagttgcattgtgatctaatacctgttttattactataag

SEQ ID NO: 90136 - DNA, 1110 bp, Homo sapiens
agactagttttttttttttttgagttggagtctctctcgctctgttgcccaggctggagtgcagtggcacgatctttgttcaccgcaagttccgcctcccaggttcacgccattctcccacctcagcctcccaagtagctgggactacaggtgcccgccaccacgcccggctatttttttgtatttttagtagagacagggtttcactgtgttagccaggatggtctcaacctcctgacctcgtgatccgcccgcctcgtcctcccaaagtgctgggattacaggcgtgagccaccgcgcctggccaacccagactagttttgtgtgtgtttgtttttaactctggtttcagcagatctttctaaattcaaagccatgcccattctaacaaaatattgcatacattttatggaatagcttatgtatctataaagatgaacaattagtccttcatgaactcatgcattttagaaggcatctctttagagaggcttctggagaaaggagcaccatgactcagtcctcagaagaagtgatctgtgaggtggttactgtggtgctcttcagatcctgagggcaaagggaagtgcactcacgcacccagaaatctgggagatgcctggaatcacttgtaaatttcttttcaagtctctttttcagtctaaaaatcatgctcattttatgttctactttttatcatttctcttttttttaatgtaaaaataatggctctttcccttctcaatctgagtaaaactaaagcccccagatgcatgtgccaggcatcctgtaactttgtagtataccattgagtacccccaagggcacacataattaattttttttttttttttttttttgagacggagtcttgctgtcgcccaggctcgagtgcaatggcgcgatcttggctcactgcaagctctgcctcccgggttcacgccattctcctgcctcagcctcccgagtagctgggactacaggtgcccaccacctcacccagctaattttttgtatttttttttagtagagacggggttttgccatgttagccaggatggtctcgatctcctgacctcatgatccacccgcctcggcctcccaaagtgc

SEQ ID NO: 90137 - DNA, 1049 bp, Homo sapiens
tttcccagtgttttagttttctattttggctggatgtggagattgtggttaataactgcttattgaatgtatgtgtagatatggattcataatcttctcttatttcccatgcctctttttccccttctgtcactgacatttaaaaataaactcatcagaagagaagcatgtaggaaggcatgtgtgaagcataatttgtgctcatccttctctgcttatcaaaattggctgttggaaattagctggagtcagtttacctgcccttaatctgtctggagtcatgaagaaagagacaaaactgagttaggaaaatcttgaaataagcactgggctgggcctggagcaggaggatgagtggactcagcacagaagtgtggttgccttgcaggttgtgtgtcgcagccctgtcggtgaataacttctgtgacaaccgcgaagccctgtatggtgtgtttgacggagaccggaatgtggaggtgccctaccttctccagtgcactatgagtgacattttggctgaagagctgcaaaaaacaaaaaacgaagaagaatacatggtcaatacattcattgtcatgcaaaggtaaaactcagagttcctgcttacctgctgtgtgttttcttgctctttgagtgtttatcctctgtttagaaaagcaggtgcccaatggtctccaagccatgttttttgactatgagtaccaagatgcattcaggcaagtttggtgttgcccaggcatcaggaatggtgctccggtttgagacatactgatgttcagacaactttgtagaaggctcagacaatgacaaggaattagtttctctgagaactggacctcactggcctgtgttgattgcagattttcatcagattgtttgcaatgccatttctcctcccaaatcatgtgagctgtaggggctttttagactttctgttgtggggacctctctttgaaatggaccgtttctatcctagtttcttggcccttatgaaatactatcactggtttgagatagtgcaaacctttgtgaaatcaagatggtcagat

SEQ ID NO: 90138 - DNA, 1050 bp, Homo sapiens
cgggctaataggtagtgcagccaggacctgacctcaggttgtgagactcccttcaaaggatgttgtaactagcaggcacatcagctttcctgtttttaccacccttttgttctagaaaaacagcaagcatgtatcatatgcacacacatacacatgtgcatacagaccacagcacaaacacatcccttcacaacccccaaaaggtctgctttttatgcaccctcaagcactgggtaagaattaaaaactgagaaccccagtctcggattacttgctatactttttacaaatcactgtgcctgtgaaagggagaaagtagagatgccttggaagggtctagagccaaatatctgaaagttggagtttaggaacctaaactataggcccttctccagggtcttttgtatgtctcttattttccctatctgttaagagggtacgggttgtgtggtgagcttttggtccttaggggaactggtctttgtgcgggatttcctaatgcatgcaagtaggcagccctggtttccattgctcttcttgccagttgcttaccttacacacgtgataggagcagacagtacctgagggtctgcccttgtaaaacgggaggctgtttttcttaactttcttgctcctgtaccactcaggaacagcaggggcctgggcagtgttaccatttgtggggcttgccatagttgttcatgaggccatgggagcaataatggtcttttgtccgtctctgccatttctctcccttgataatctgccagaacaagtagctttgtaagaggggtttttgatttttgattttcagaatttgcaggtgctttctgtatttggtaggtctgtggattctcatgattaaaaagataaatcacaagcacttggtatttgattactagaatgtcctttctatgagttttctagaatagatggtgctggtccagaaagtctttactatatagggcaggaacatgaacactccaatacttcaaggctgctaccagcaaacacccttataagggggagagggttgtcaggtttttctaa

SEQ ID NO: 90139 - DNA, 1124 bp, Homo sapiens
tctgcaaacccttgttcttccaggatggcaaggtgaacggagtgactgagtccacgcgcatcctgggctacaccttcctccatcccagtgtggtgcctcgcccccacgtgcagtccgtgctcctgactccccaggatgagttcttcatcctaggcagtaaggggttgtgggacagcctgtccgtcgaggaggccgtggaagccgtgcgcaacgtgcccgatgccctggctgctgccaagaagctgtgtaccctggcccagagctacggctgccacgacagcatcagcgctgtggtggtgcagctcagtgtcactgaggacagcttctgctgctgcgagctcagcgccggtggggctgtgccaccacccagtcctggcatctttcctccctcagtgaacatggtgatcaaggatcggccctcagatgggctgggcgtgccgtcctccagcagcggcatggcttccgagattagcagtgagctctccacttctgagatgagcagcgaggtggggtcaacagcctccgatgagcccccgcccggagccctaagcgagaacagccctgcctaccccagtgagcagcgctgcatgctccaccccatctgtctgtccaactccttccagcgccagctatccagcgccacgttctctagcgccttctccgacaacggccttgacagtgacgatgaggagcccatcgagggcgtcttcaccaacggcagccgggtggaggtggaggtggacatccactgcagccgggccaaggagaaggagaaacagcagcacctgcttcaggtgccagcagaggccagtgatgagggcattgtcatcagcgccaacgaggatgagccaggtctgcccaggaaggcagacttctctgccgttgggaccattgggcgccggagggccaatggctctgttgcgccccaggaaaggagccacaatgtgatagaggtggctacagacgcacctcttcgaaagcctggaggctattttgctgccccggctcagccggatcctgatgatcagtttatcatacccccggagctggaagaggaggtcaaagaaatcatgaagcatcaccaggagcaacagcagcagcagcagccgccaccaccccctcag

SEQ ID NO: 90140 - DNA, 1004 bp, Homo sapiens
gctataattatggtgaccacattttccatggcaaaaattaagacacgtcgtctgacaaaggattcttgtgccacttctaggtgtgagaccacccatacttagattttttttaaagcaggcttttttaggcaggccctataaaaatagaggtttgttaaataggtgtgtttttagacttttcattaaaagcctacaatacaaacagtattttattttgtatctgaatcaacatgttatatcctaaagcactattttacagcctaagggtgtgtgttagtctattcataaaaacatactgctgcatagagcaataatacctgccattatctaggtgtaataaaaaggtcccaagtggtcctctccaggtctttaattttccttttgaagataaagctccttctttcactttcatggttcaagatttttggaccttgcaagtgattgctattgaagtgtgccagatgtgagcagttgtgagcatagtactttaaaagaaggtgaaggagtgactttttcttccttattgtctcccctactaccatctgtagtttctacacatgtaacttttccaaaacagcaaggcatgggaagggataccagccagggccgccacagtccaggcatgggacttctgaagtgaggagatagagatgaaagcggcctgtattgataaatgacagatgatgaaaccaaggcctgctggaccaagattcaatgacttacccaaagctacacagcttgttggtggcagagttagctcccaatccccagctttgtgagcaagggaggtttccatccccactatgatgttttcttggtgttctggggtcactctggtcgatttccatccactgtgatgttgggtatgccccctccatgtgactacataattctagaatcataattctaaaatgatatatcactgcactatcatgggaaaataagctggaagagctggagaggcgatgcctgccaccactggctcttctatagaggtgaccttg

SEQ ID NO: 90141 - DNA, 1651 bp, Homo sapiens
aatttttgtatttttaatagagacgaggtctcactatgttggacaggctggtctcgaactcctgacctcaagtgatccacctgctgtggtctcccaaagtgctgggattacaggcgtgagccactgcacccggccgcgaaacttctagaaatcttgagagtgactcttccaatattttgtatttcaagtagaagttttcagtaataatgaagttgaaagccagaagagaggagcagataatgttctcatgaagcctcagaagacattaggagcatctatctcgatattagattgaattgaaaatttgtcatattagtcccttgacttattcatattttttctcttgagccattggtttgtgttctgtaaacacagcctaagaggctattttaaaggaaatggagatcaggtgttctccatagattcccatgctcgatttcccggagtgggagcaggagagaattatgagcaaagagtttcagccctcaccctgggacattacccctcctccctgcacagacttcacagtgggatgctggtgaattttttaatgttaatttttatttttaaatttaacttttattttaagttcagcggtacatgtgcaggtttgttacacagataaacttgtgtcatggggctttgttgtacagattattttgtcacccaggttttaagcccagtactcattagttatttttcctgatcctctccctcctcccacccttcatcctctgataggtcctagtgtgtgttgttcccctgtatatgtccatgtgttctcatcagttagctcccactaataagtaagaacatgcagtatttggttttctgttcctgatgttagtttacttaggataatggcctccagctccatccatgttcctgcaaaagacatgatctaattcttttttatggctgtatagtaagtattcattccatggtgtatatgtaccaaattttctttatccagtctatcactgatgggcattgaggttgtttctgtgtctttgctattgtgagtagtgcagatgctgatgaatttgcacttcatattcagtgattttcgccttgaagaacataccttacccaatccatgttacttgaagacgaccgtaactgaggtgtaggaatttgtcctaaattactgtaaacaactttttggggcatttcacaatattccagcgcctctccgttccctttcattgtcttctccacctgatccctctttcaaactcttgtctttatttttatacatcttaccccaaacccagattgcagtaagattcctatgtgcattgccacatgcattttcagcaatttgaaattttatctaatatcaattaagctggtataaatcataccacttcacatacgtgaagttgtttgctacagccctgttctggagaacggtgagaatgccctccttgttttgtggcaggggtgaggggggatgttttaatgaggagagactggtaataagggattgtggtgaactggcaggggaggaaattcaataaacagaagagaggaactcaggatagttgggcactggagtgttgcaaataaagcaatatgtgatgctctccccatggaatgctcacctacgctatactcagaatccctgacagccgttttgcactctccaaca

SEQ ID NO: 90142 - DNA, 1032 bp, Homo sapiens
gggtcagcagggacagagagaaatagcatctgtcagctgggttgaagtctcccgcatatggagtcagtcactggttctttgctgagggttcagctaatgagacttgattgcttgtggcactcttgtttccaccaaaaagagcctaaaaacaggatgaacttgaaaacaagaggaagtggtgctatgcttccccatgactttagctccagtttgcctttgagcaagggggaagcagaaggaggaacttcttacgtacctgcacggtggttcataccaggggttcatcaaccctgggatcttgcccccttctctgcctcctgtcataaatctctgtttcaaaggaaagaaaggggatggttgttaaagcataaacctccaggtcagctcttgttacattagaccccaagatgatgtccaaaaccttttgttgaactgaaatgctagcttggtttgaaataactgagccattcattgcctagggatagaaaatctttctgttgtaaagaggtggttggttggttggtgtgtggctttgtttgcaaatacagaaagtgggatggggattggaatagtattggccttgtgggggctgaatattgaaagcagcaaaactggatgtacctaaaaactaaagttgaatcggcgagttcatccatccttttagagctattttcattgagatataatttctttcagttgcttgaagttttcagcatcagatcaagttttctttcttgctctccaatacctcttttgcttgtttgccatctgttcatttccactgcaaactgctctttacacaatgttactcggtgttaattagaacacgtgtctctttgtcattcatctggagaaggggttaatgatgatttatgtccctttaattggttttcctccaaactgttaggtttaatttattattttataagaattccaagagactgggaaagaggaagagtgcctaatttttattcttcatgtctttaactatatatctcttttgctttaaaaaagagcaatcttggcctaact

SEQ ID NO: 90143 - DNA, 1031 bp, Homo sapiens
cactgtgtcaagtgaagctttaatttttcaggggaggttttctccattgagaccaatacatcttttcttgtgacagatccagttaccatatttccttatttttaactgtcgaaaagacagttaagctgcaacagagtatggtgagtttaccaattttaatacttgaagcaccaaacaaaggatcagtgttgcaggctgtctcttcttgactttttccagctctccttagcagataaccaggatgatattttttctgctttacaacatgatgaatgctatatctctatattaactctgaaattgaattgcagccaaatattcctctcagctgcattagaattttctaaaagaacatgagacacataaacttagtcttcttagttcaatgctatatctcagatatattgatatctgatttacaattaaaataggaataaaattaagtacaaattatatcatcagctttaaatattgatttatcttcttgaaaaaaaaaaagcgagtccataaaggatggcagcattggcatttctggatgtaaaatttcagggctatctcctagccatatcctttatggattcctgccagcatctttaaaaacacacacactgaagacacacagagaggttttgaggtattttataacaaaattataagaacagggagacaaagccacttactaaacattaaagtgatagtataagaagaaaatgatttgaagaagtcctaattgagggaaatgagcaattgtccacaaaacttaaccctgggttcccaggaaccggggtagtgatggtcatggagaggggttttagaatctggttatttaggaaaacatgcacactaacttgtttcattgaaaaaaacatttattgaggccctacaccatgcaaagctctatgctaggtgttttagttaagcgaaaaaatgtctaagataacttttgccttcaaggaacttaccaatcagtaggagaccaagacaaggatacaaatcactgtaatcctggacaatgtgtagtagacagagag

SEQ ID NO: 90144 - DNA, 1034 bp, Homo sapiens
agcgggggctcttcctttgagcaggggaaaaaaaagcttctgttttgttttggtttgaggttatattactgttctatttatcaagacacttctacgatgctagttacagaaattcacagtccattgtaacactggcatttgccttcggacttttttgggcttgtggtctgttcgtttaaatggagactgtaaaactttcaaaatgccaacaaagctgttttcacttaaaaacatatttttatagattgtcacttgttgttcttatatatgcccaattctgtatatgctatagcactatttctctgccctccatttgccagacaaaagatacacccatctgtccttcagtgtgaataaggattgaatgattattcctctctcttccaagccatgggactttctcataggtgccaccacccctgtgaccatcccctacctgccttatcattccaccggtgagggacctctcaggtgtagctccttgttaacttccaattagtgatgggtaggatttacctgaagaaaaccgtaatgcgcttagatactagcaaaagggagcagaagtggggagtctaatcaaagtgagaggataaccctcaccccaaacttgctgcaggcagctgggcaggtcaaaattctgtgaccagacactatccttttcctctagtgattataaactttaacctgtgcagagaaaagatagtatctgctggcaaaatttgtacttactttgattcctctagtgcaagattatagtggggttatacctgagacttcaataaatgtttgactaactaaactaaaatagcttagggtaaggactacttccccaaacgcccttttaaacatgtgagaaagggaatctccctgacatactggtatggccatttgtagcaatatactgagagtgacttgggtgattttctggggcgatcaaccacattccatgagcaggttaactgtggaagacacctgcccttgagcatcgcgtttgggccacatgcgtcaatggggaaatttgtgtttccattctg

SEQ ID NO: 90145 - DNA, 1031 bp, Homo sapiens
atgttggccaggctggtcttgaactcctgacctggtgatctgcccgccttggcctctcaaagtgctgggattacaggcgtgagccaccacgcccaaccccaaattatgttttgatttctgttacactcctgattttataacctccattttgcctcatccatcatatatttgttgggtactaatgatgagcttggtatcaggtgctggggatacaattatatatcaacaacttgttccttcctcatggcaattacttttcttgtttcttcaccttctcccatccttcatccctcagatggctctgctatatccttacaagtctcttagacaaagaggaaccattccccattttcttctttggcttggagcctctgaattttaggcttcaaatctttgtatgctaagcactgttctaagctggaaagactccaaggaaaaataggatccctgccctcgaatagtttataatctagtgagaaggatatatgccagagattacactgatctgagaatagcggtgattaagataccataaccaacactgaaaacaggtaccagtcacttgtgagtgctttacatgtattaactcaatgaaatcacaagctaaccccaagaatagtactacttatatttccatgttataaatgagggaacaggcactgaaagcttaaatacttggctcaaggtcacagctactcaatggtgaagccaggatgagaatcttgattctgatttttaggcatctagccccgtactaaatgtcttctagcagcacagaaggaatgttaagacggcccagaaacagcagggatggctttacagaggaagaaattcttcagccaaaactaaagaaatgaatttgtcaggtgaaaaagctgggtaccattcagggagaccggcagatgtgcaaaagcgaaagacgtgagagaccttggcatattccagaaaccacaaaaagtggatatagttgcaagaagggaaaaggaagagatgaggggtagggaggggggtggcaaaggattgggccagat

SEQ ID NO: 90146 - DNA, 1032 bp, Homo sapiens
atatttctcatttcttttagttcttagtaagtcagctttaaaaagtacctgccaaccagaaccttccatattctggactaaatcttgctcttcggattatacttcagtgcagtaactgtggatttgcaattttgaaggggagatagtagctattatattttacacttgcttgatgtgataactctaaagactttttaactgataaaagcgcacatggctattttgatacacaaagttgtgtttgctactttagaagcttttgtggcagaattgtaatctaattttcataccttgtatttctgaatcacaacaaaaaaataaatggggaacaagacttacagatttgcaaacttatttatctagaagtttgtgttttttaagagaccatttgggcaaaacataaatgttttctataatgttatcctgactttgcatcctaagcatttcaccaggcctgatttttatcattttttaggaagtaatatttgtggagtaaatacttggtattctgagctcttgtgtcaagtaggttctgttcgtatcactatgatgtgggatatacgagtaaaagtttaagaaatgtgaatttagcaaaatttcttaaacaagtacgttttctatacaaatatatttctcatactttaaacgaaaacctgatattccaaccatgtaatatctcccagatcctgatgggcagcaaattatacaagactgatatggaaaagaacatgcctcgatatttatcagttcgtaaacagaaaggttttggaacattgagaagagatttcttggacatcgtggtttgcaagcttaatctttctttacatgtgagcaatttatatacataaatggcatgtgatattatatctgtaatttttgtttggatatttaaaggacaaaattatgtgttttgtttgtttgtttgtttgtgatggagtcttgccctgtcgccaggctggagcgtagtggcatgatcttggctcactgcaacctccgactccctggttcaagcaattgtcctgcctcagcctc

SEQ ID NO: 90147 - DNA, 1107 bp, Homo sapiens
agtattgtactttatatttatgctacttcattgtgacttaattttccctgaagaaatatccatggatttgattataggttttcccttagatgctgtggaggtgttttgtaatattcaaaatatgcccatattgcctttttaaaaccccaaagattatgaattctgaaacacatccagcccagcgggttttggataaggggttgtaggcatttaagcagcctcacataatgggctgacttcatccaaaacatgaaaatattacaaggcaaattctattttttatattttttggttcaatgcttgaacaacttgtttttctgctgggggaagaaaaaaagaaccaaccctgagtgtgattgttacggaaactaatgactttgtttttaaaggatcacattgattcaacaccttctattggacccagaagtgcgtaaatattacctatggtagtaaacgtttaattatcattcagtttaaatgttggccttctgtatgtagccaagaacagctcattttgtgaatttcagtttttaagtggctgctttttgatttggttgtattattttattataatgtatttgcaagtatattaaaaaattaacattgagccataaaaatccccaaatatgttcaaggacttcataattgaaaaatatatagaaaacaatccttacttctttttacaaaaacaaaatcatgggaattattcttttctatatatttagttataaatctttctctgggccgggcgtggtggctcacgccagtaatcccagcactttgggaggctgagacaggcgaatcacgaggtcaggagttcgagaccagcctggccaacatggtgaaaccccgtctctactgaaaatacaaaaaattagctggacacggtggcaggcgcctgtgtgtggcgggcgccagctactcaggaggctgaggcaggagaatcgcttgaacccaggaggcagaggttgcagtgagccaagattgcgccactgcactccagcctaggtgacagtgcgagactctgtctcaaaaaaaaaaaaaaagaaaaaaaatctttatctggatctgttaaaccatatattattgatcattgcaagtgaaatt

SEQ ID NO: 90148 - DNA, 1387 bp, Homo sapiens
atcagtaatcacgggtctcaaccctgaggcagtagtttcaattttacttgtctttccagcctgagaataagctcattgagggcagggactgtgtctctcaccacagtgttcacagcacctagtatagggtctcgctttcatgctcagaacataaattgcaaaccaaaaaagccttgattgtagtttggctatttgagatgctgcagtgggtctttttaaagctattataaccctaagactgcaagcaatatatattttattctgcttatggtttgaatttattaattggacaaatattttgttatgtatctgggctgtccagcggtgcagagcacacacattctgttctcacagcttactgacatttacagagttttcattatattcatccttagagcagactagaagatttgtcttagaaactgtttgttagagacctaggtaccttgaaatagtcttgtaccgttggatgcactaaaagctctctctttatcttgcaggtggtcaccatgggccttttccgcactattgctttgttttaccttggaagttttgacagcatagttcgtcgctgcatgatgcagagagaaaaatctgaaaatgcagacaaaactgcctaatcttcttaccccttggaagaagactgtttccaaataatttgaacagcttgctgctaaatgggacccaatttttggcctatagacacttatgtattgttttcgaatacgtcagattggaccagtgctcttcaggaatgtggctgcaagcaaggggctagaagttcacctcctgacagtattattaatactatgcaaatatggaataggagaccatttgattttctaggctttgtggtagagaggtgaaggtatgagaattaatagcgtgtgaacaaagtaaagaacaggattccagaatgatcattaaatttgtttctatttattcttttttgcccccctagagattaagtccagaaatgtactttctggcacataaagaaatcttgaggactttgtttaaaccttccataaaaaaacaattttcggtttctcgggttctctctctctctctctctgtctctctgtctctctgtctctctgtctctctgtctctctgtctctctctctctctctctttctttctttgtgtattttattcaagatgagttggacccattgccagtgagtctgaatgtcactgacagccctgtgttgtgctcaggactcactctgctgctggtggaaactcatggcttctctctctctttgatcccataaagctacgagggggacgggagagggcagtgcaatgggaagtaaagagatattttccagtaggaaaagcaatgctttcttgtctttagactcaaatgcttagggaacgtttc

SEQ ID NO: 90149 - DNA, 1434 bp, Homo sapiens
acttgtattttctttgtgtattatttattactgcgagtgcgtgtggtagtagaggtgacaatgactcctagtacagtttggcaagaaccccgtggttcttgcccatgtctctgcagttttgcagaggcaaaactgtattttccatacaacacactgtggaaaagacaatgaatgtcttagtgttattaggacaatcatttgtccttgggggcccgcaggggtccgtggactcacttgttgagaactgccatctgccaaggccgtgcgtccatttctgagtgctgatcaatgctttgtgaccattttatctcacttaaagtgaacgagcacactccactgtttctgatgtgtccgactgatttctgtccacattactaggattccctctttctcttctttttcttctcttttagcaaggaaatttcaacagttcccttggctcagatgggtacatgctctcggccctgacctgtgggatggctccagtaacttctattactgaggggctccagcaggtaagctctgcctaggctagcaatcagacaggccgatggacaagagaaaaactgcctttcatcaaaccttgatgagaagaggttaagggaaaactaagtaactttatttgacaatgtatttttatggagctatcaacttttcctcttcctccaccaggaatgagtaaataggttaaagatataacttcaggaatttagaatggcaagaagtcttcagtgccgggccttgcagatagagaaataaaacaccgtatctgctgttgaggtgttaacctggattttcacctaagaaccactgctccaatgtgttttgaaaatggaatactcctctagagtaaggggtagccttgcttaaaaagtactgggatattagactagaaaaccttttctaggtgaatcaggtcacacacagctaaatttagtgagacacgaatcatggattaaacagttgcttcgcttatagaatgtattattttgtccaagatacacagtgtttcattggtgtgctaggcactgtacttgctcatggggaatcagatggaaggcgacctctccagcttcaggggcatacagtcaagtggaatgcactgaccaaaaaggtgatagtagtccgggcgcggtggctcacgcctgtaatcccagcactttgagaggctgaggtgggtagatcacttgagatcaggagtttgagaccagcctggccaagatggtgaaactgtttctactaaaaacacaaaaattagctgggcatggtggcggacgcctgtaatcccagctactcgggaggttgaggtaggagaattacttgaacccgggaggtggaggttgcagtgagccgagatcaagccactgcactccagcctaggctacaagggcaaaactctgtctcaaaaaaaaaaaaaaagatagtagtgcagtg

SEQ ID NO: 90150 - DNA, 1083 bp, Homo sapiens
tagggcagcagattttaatgaccccaatgtattttgtggatgaaatcaacacaagagtatcagaagcagtctgaaggaaaaacagatgtacagtctggtgaagaaaggaggggcagactggtcccattgccttgataaagggcttggatgctgtgcagtgcgtgtgggaactggactctttttaaaacactgccctcgtcggacggctcccagggcctctgtctgggcagcaggagtggaagacactgcaaaggaggtgacttgccatactttagggccagctgttttctggggtccaggttagggtgagctttttgcctacattctggaatcatcatggagaggggtttctcaatgcaattggtgtagttccccgcctaacagaatcaccccattgttctcaccgctttttgggaatcagggcagccagtgcaggttggcagtgtaggacctcagtgtgtcttgtttactgaaggtacacgtgttgttttgaaatgcaggtgaagccatataatgtctacatcacagttgcttacccaccagacacagacacacctggctttgccgaagaaaacagaacaaaggtcagtatcctacatgtcccaatttgaacctctaatgtttactgcttttctgattttctttctactcttcagctcacactcgttttcaccaatcaacaatgtttgttgggtagagtgcctagctggtttctgatgaccttgagattctccaggcaaatattccttctttccttcctcttttccctcactttattttcttaaagtttaaatttctaccagattttttctctatagagacagggcctcactctgccatccaggctggagtgcagtggtacaatcgtggctaactgcatcctcaaactctcaggctcaagcaatcctcctgcctcagccacctgagtagctgggcctacaggcatgtgccaccacacctagctaatttttaatttttttgtagagatggagtctcactatgtcgcccaggctggtgtcaaactcctggcctcaagtgatcctccctcctcagcctcccaggtgctgagattataggcatgag

SEQ ID NO: 90151 - DNA, 1038 bp, Homo sapiens
aaactgtctttcagaaagtactacccacaaacatgcagtatactttttataaggagaaaactaactttgaccagttttcaggaaaaacattaactgctgtcatggtcagaatgcaagactagactgaaacagtcttcaaatggtaggtcctgagtcttcaaatgctaggtctcaaatcacatttcatttatatcatcatgtcatcattcattcattcagcaagcctgttgggcttcccagtcacttgagcttgcattgaagaactgaaatccagaaagcagactaaattctccatgtgcacagccttgaggcttttgacctcatgtggcctctttgttccctgcagaggttaatgagcatcaattacctgggcagcgtgtaccccagccgggccgtgatcaccaccatgaaggagcgccgggtgggcaggatcgtgtttgtgtcctcccaggcaggacagttgggattattcggtttcacagcctactctgcatccaagtttgccataaggggattggcagaagctttgcagatggaggtaaaagttgtattcatttttgtatttattcctctccgctcagcaatatacattccgctttagttttatagcttctttacatgtgttgttgtattaaattagagatttttaggtttgacattggtgaaagagaattggctcaaccctgagttttgcagttaacatttttcattgcatgaagactatagttaacgacagatgcaaaatggtaatgggatttttgcttgtttaacttaatacacaaaatattagtgatatcttcatagtgttattagtctaatactgtgtgaatgtgagtaaggttaaccagatattttattttatagagatttttctttaacaagaagtttgtccttatgactgaataatacgtgaaattagtatatgtttgagggaagagcttgaatcagctgctaatttttagcttttagacaagtcatttaacttgctctcagtttcctcatctgtaaaatgggagggttggaataaagcaataattt

SEQ ID NO: 90152 - DNA, 1011 bp, Homo sapiens
attgctttttttctctcctttgcaataaacggacatgcatatagacggtcatcacgactaattattctgtattgctttcaggataagctgctgcaggcaaagaaagaaattgaaatgcactctattaatgacaaacaggtaaatctctgtcttcagaatgcattttctgtataactcagcacagctgtataaaggaaaaacagagttacttcacctgtgaatagttaattgaaagcatatatgtactgttttttaaaaggtggaattgtttgaatggtctagtaactcagaatatcacacacacgcaaaatgaatagactcccacacacattcatatctacaaatggtcaaataacagaatgttttactggcaaataatttcattttaattttttttttaatgaactttatacaaatgcttaagaggaaaggaatatttaaaatttatttggttatggaatttttgatgaataaaatgctatttatatttcagtataaaacataatagcaaattaataatcacacacccatcacccagcctaagaagtagaaatgatcagggtctctgaagcccccacagcagccttgtccctcttttcttgttcctagaggggcaaatgccaacccgatttttggtgttaatcctttctttttcttttcttttttctttcctttttttttttttttttttttttgaggcagtgtctcaatctgtcatccaggctggagtgcaggggtgcgatctcagctcactgcagcctcgacctcctgggctcaagcagtcctcccacctcagcctccctagtagctgagattatagacacgtgccatcatgcatggctaatttttgtatttttggtagagatggggtttcgccatgttgcccaggctggtcttcaactcctgggctcaagcagtccgcctacctctgcctcccaaagtgctggtattataggagtgagccactgtgccctgcctctttttctttttaattttaccatatatgcacat

SEQ ID NO: 90153 - DNA, 1047 bp, Homo sapiens
tgggtgcagtgcaccagcatggcacatgtatacatatgtaactaacctgcacaatgtgcacatgtaccctaaaacttagagtataataaaaaaaaaaaaaagaaaaaaaaaaagaaaataagattcatttggatttggaatcagaggcagactaatgtattatttatgagctagacttatagggcacttttccaccagtgaactcagaaaaatattataggtgtgcaatttatggttccataagaaaacagtcaaagcagcaggccttgctgatagtatctttcatgcttacacttactccagtcattaagtttgggatgaagaagttaacaacagctaatcatttagttcttgtagattcattttaagagcctgtcatagttgttttttataaaaacttcctacagaggggagatttcaagtgctaagaatattttatgattttgttttaggttacaggaggttccagtggcatcgggaagtgcattgctatcgagtgctataaacaaggagcttttataactctggttgcacgaaatgaggtaaggcttctaggttcattattactgacttgcttcttcgacttgaaattagtcaaagaggctgtgctaaacatcttagcattcacacctagaaagcgcttcttccttgatgtgagatgtgtttcctgaactactgattctctctagtatttaggccaaacacttctctgttgaaatcaggtcggccccacaagtatttatttagtaccattggcatattaggcaacatcatcatagatactgcagatcctgagatgggagaggccaaggtctagttgaaggagcacacctggccattggaagccagggagggcccttggccaggtcagaagtgctggaagcagtgattctggagctgatacctgaaggtgtgtaggtgtttctctataatttttcactacgatttgcttaggacatgatatatatctctagtgaaatctatacaccatagaggaacctcgtccctccttagaagtttagcaaaatgtgtttttctgtattaagt

SEQ ID NO: 90154 - DNA, 1801 bp, Homo sapiens
ctgggaggcagaggttgcaatgagccaagatcacgccactgcgctccagcctgagccaacagagtgagactccaactcaaaaaaaaaaaaaaagaatagggagtttatcgttagtatcttatggcagactgcaaatattcatatttaaacttaggttaaagttcatagcaataatgataatatgacggttttttattttgttaactctattattaatatcctccctacccttctttttccctgacagtcggatatgttgcggtcactatctaacacaaaacctacagtcaatgaacatgacttgttgaaattaaagaagtttacagaagattttggtcaagaaggctaagccaaagacaaggaagatgcttaccatatgtattctttctttcatagatatttttgtctatttggatcgcattaattgtttccagtaaaactcttttaccacagggaaatacacatctcacttcagagttccattaggttttatattgtacttttcctccattacttattaaatactcctattaacaaaaggtacaaaataacaggttatgaggaaatgagcgatatatgaacggcataaaaacagaaattacccagtaaaaaggatgtcagaaattgacatacaaatatttacaatttttatgaatggtggtctttgcaaagagcatttatattttcttttttttttactaaaatgatatagggtttattttatattttcaaaaaaattgttaaacatcattcttatcaatgtaaaatttacgttattaaaaaattacaaatgatagaatctttactcagggatgggcaataaaacagcaaagagctttgtgattgggtttgaaagattttgaattatagacagtgctcttaatagtttttaataagttgatatttttttctgtgtagatttaaataatttctttaaaagcgtaagctttggctgggcatggtggcttatgcctgtaatcccagcactttgggaggctacgatgggtggatcacctgaggtcaggagttcaagaccagtctggccaacatggtgaaatgccgtctctactaaaaatacaaaaattagctgggcatgatggcgagtgtctgtaatcccagctactcaggaggctgaggcgggagaatcacttgaacctgggaggcagaggttgcagtgagctgagatcgcgctactgcattccagcctgggcgccgagatagcgccattgcactccagcctgggcgactgaataaaactctgtctcaaaaaaaaacaaaaacggtaagcttttatatttaattaactgatacctttcactgtgcaatctcaagaggaagattttctaaattagacattgtctttaccttaaagaagaaaattgtctatttcagtgtcttttttagcaagattgaccaaaacaggtggtaggtgtgtaatttttaactgtcatgaaatactgtaatgcgcacctttgctaataaggaaatggtctccctttgaattatgggaagtttcttgtctgtgatatggggtgtctgtgtacatatatgtatatttccttttttaatacaggataataatatggggtcttgtccttcaccttttaagttcagggaacagtttgtcctgaccacacatatgttatcagtgtaatgctttatgaagctttagaaatgagctcatgactcattaaaaaataataaacgatgctattttaatattttcaaataaataatctgaggatgtgtttcatactttagcatcaacgctgagttgtgccttgtagaattgcattgtcta

SEQ ID NO: 90155 - DNA, 1038 bp, Homo sapiens
tgcagtgagctgacatcgtgccacttcactccagcctggtgacagagcaagacgccctttcaaaaaaaaaactaaaagcaaccaaaatctatcccattacccaggggataactactttttgttgtatattcttaattttttttccaaaagtaaacattctaataaaacatacaaaactattatacattttaactttcctggtaatggattaagtcttaatgttcaattttgtttcaaatacatatttcagattactgtttatttcaggttcgcggaccttcccgagctgatcctaaccatcttgtagatgatctgctaacaccttgctctccaggtgaccctggtgccattgaaatgacatggatggatgtccctggagataaacttttggagccagttgtttccatggtttgaaattttgtttgtttttaagaaaatattttaaaacattatacttcataattttcagttatataagatttgctggaaaatcttagtataaacaggtgtattttacttaatattgttgactcattaaaaattatgaagttaattgaacttaaaatataaaaagtcattatttttaaactattttcttgggtttagaggaacctttaagtgaaaaagctattttttaaagcacaagattctgactttacaggtcttatagctagaatatctccaaaatgctcatatatagtataattattgtaaagacctaactaaaaaatagggttggtgaaatattttttttcccctgcatctcagattttttaaaataaccagaagtcacctgtaatcccagcactttgggaggccaaggcgggcagaccacttgaggccaggagtttgaaactggcctggccaacatggtgaaatgccatctctcctaaaaatacaaaaattagccaggcagtgtggtgcacacctgcaatccagctactcagctgaggcaggagaatcacgtgaaccagggaggcagaggttgcagtgagccgagattgcacaaccgcaccccagcctgggcaacagagcgag

SEQ ID NO: 90156 - DNA, 2179 bp, Homo sapiens
tgcacctagggaccactcagaacagtctcacggaagcagactttcgggaacttgggaggaaaacagatggttattcaggggcagatataagtatcattgtacgtgatgcccttatgcagcctgttaggaaagtacagtcagctactcattttaaaaaggtaagtcatttttatctatcctttcctatcttttttttttttttttgagacagtctcactctgttgcccaggctggagtgcagtggcactatctgggcttgctgcaacctccgcctcccgggttcaagcaattctcatgccttagcctcctgagtagctggaattacaggcgtgtgccaccacgcctggctaattttttgtatttttagtagagacaggatttcaccatgttggccaggctggtctcgaactcctgactccaggtgatccacccacctcggcctcccaaaggcgtgagccactgcgcctggcccttttcctgtatttttaaaatcaagtttcaagaccgtcattggtttgtcttcaaagaatttgggaggatttcagtgttgtataataataccataagtgggtttacataatagacatatttctgtgtcactgaaacaagttctttaataaagtttatttattggccatttttggctgggtgcagtgccccatacctgtaatcccagcactttaggaggccgaggtgggcagatctcttgagctcaggagagaccagcctcaggcaacatggcaaaaccccatctctgtaaaaaatacaaaaattagctggatgtggtggcacactcctgtagtcccagctacttgggaggctgaagtgggagaatctcttgagcccaggaggtggaggttgcagtgagccgagattgcaccagtgtactccagcctgggtgacacagtgagaccctgtcttaaaaaaagaaaaggccttattaatcatcctaatgtgttttaaattttcctatgaaatgatttttgaagtatttgtgtattattttgatataagtatagaaacttaaatgtacagatgtaaggctgcttctgacacatctagaatatttttgagtagaatctggtgcatttatacctcataaagtaaaaataataatagctaatatcttttaaatattcacatgcctggcactgtgttctgtcttttatcttactatttcatttggtcttcacaaaaatcagcaagagaggtacatgtagccagccacctaatggtggttagtcttggacgtaggtgctaacacagtagctagagtgggacagacatgtgatttgcctggaggtgaggtgtgtttccaaatctgaaatctcagccattctgctatcctgcccctcctgtgttctgttttgtctgcaagaacaagttaagcatctgtggctgagataaagttttataagaaggctgtggtcttgagatacccagtttgagtaacaatgaactaggtaatctggaccaacccttttgctgtgaacaacagtatccagtattactcatgaacatacatgtgaaaaactattagcaaacctaatctcataatgtatgtcaagactaatatgactaagtcacatacgtatatttatcatgtaccataataagatttttttaagttaacaagcttgaattaaaatctgaatttgaagcctggcaccatttacttgttatacctttttgagcaaattctattacttctttaaagctcatttttatcatttctaaaatggggatgtgataatgctattttgaagtcctttccaataatgaagtgatataatactcataaaacaccagtcgtggtacttcagatgcgtagggaatgttactcatccacccttcttcagccatttcattactgaagtactgttaagtttatgccacagccattatgttttttcttaaattctctttgccatttagaaactataaatgcataggaactcagtcctttcctactgagagtttgtcactcaattctgcatattactgccagggtgagctcacatgacgctgaagccaggtccttgttagtgggatgaaggtgacacagccagatgagttttatctctgcagctggggatcaccagctgcagcagacctctcagcggctccatcctttacttcttttaaagctgattatttcagttaacaagaagaagattcc

SEQ ID NO: 90157 - DNA, 2314 bp, Homo sapiens
ttgaatgaatgagcaaacaaatgtacttcctgttagaaggcttatgttatgcaagtctctttttgataaagtagtctctagaagaaacaaaatatatttaagacataccttagattgatttatttttaaaatattgttttgatccttagaggtttagagtgaaaatctttccagagtattcctcagtatagatgatacaattaagtgttaaaattctcatgacatttttctaaatctaaattttaggcaagagaacaccttggaggggaatcctattatttgggccgcctggaacaggaaagtcctacttagccaaagctgtagcaacagaagccaacaactcaacatttttttcaatatcttcctctgatcttgtttctaagtggctaggtgaaagtgaaaagtaagtagtaaatcaattttttaaagttttttctttgcctgtaattactgtatcactccttaatagatttcttacatcacttatagatattcagagaagtcatgtaatacaggtactcacttctctgtcaaatcagtctctaatctagaatttcttttgtgggaaaagatagcatatatctacaacctagtgaatcataaagtgaattatccagttgtagcattcttattttctgtacctgaaacatgattaggctttttaatctacagagttcttgtaatattgatatattactttgttttaatcttttactattttttagagacttaaaagttttcatttatttttagactggttaagaatttattccaacttgccagagagaacaagccctccattatcttcattgatgaaattgattctctctgtggttcaagaagtgaaaatgaaagtgaagccgcacgtagaattaagacggagttcctagtgcaaatgcaaggtagtgttactaattttttttttctttttgagacggagtctcactctgtcgcccaggctggagtgcagtggcgcgatctcagctcactacaacctccacctcccaggttcaagcaattctcatgcctcagcctcctgagtagctgggattacaggcgcgcaccaccatgcccggctaatttaatgttactgatttttaaagtcgtttttgtttattttataacaatttttataacagtaatgaaaaattcaagcagaatttctccattctaacaaactgtttcattttgccatgtttcattccaattgtcttccatatgcatacataatttttactcaattgtaattatcttgtaggactcactgacataaatagaaaagagatttaatgtattcatttataatgtaccaggaacaacttcagtaaaagtaatatgtagacttcgaatgaaatttttcaagaaatattttgaaacgaatgttaatagtattttccacaatctgggagatttgattcatatatttgcatcatattgcatcatagtgtatttggatcatattgccgtaaggtgatatttgattaaatacagttcttttccaaagacagactctcaagatgaagcactttaatggtaaagcaccacatttcttaacagaatatatggaagaagtttaaagaacaccaaaatgacaaattaattaaagcattacctattttaatgcaggggttggtgtagacaatgatggaattttggttctgggagctacaaatataccctgggttctggattctgccattaggcgaaggtaggataatatagtaaatatcttatttctcactgcagatgtaacaagtagatgataattctctttttgtcttgtcaggaagcattctaacaacttttcaaaagatttgtaatgtgctctaaccctgttgctcccctgccttgagtgggagaagggtggtcatttgcttgtttgtttccctagtttatcaaatatacaagatttccacacacttctgtctttcatattagaaaatatattacctaatgcttacctttcattctgattaagtttggtgggcactgatgcttcaaaaatttataaacatagtttgacaattcagtaaaaaccatttatataaaattttagcaaaatggcaattctataagtcaaaataagataaccaggtaagattttttttttttttttgagtcggagtctcactctgttgccaggctggagtgcggtggtgcgatctcggctcactgcatcctccacctcccgggttcaagtgattctcctgcctcagcctcccaagtagctgggactacaggtatgcaccaccacgcccagctaatttgtatatttttagtagagacgagatttcatcatgtggccaggatggtc

SEQ ID NO: 90158 - DNA, 1041 bp, Homo sapiens
gacgaaatgaatttacttttttcttactttatagtagtctgaacttttggaatacaaaatgcttatggtttcatgtaattttaatctagtagctaaagattttcataatttagggaagtaagttgctagtaactagtcttagagtaacagattatctttcctaacaagaagaaacaatcagtagcagtgatttcataaagtaatagattgtataagtggtggtgttctgttacacttaaaacaactaactacatgtcatcttagaacaggctgcttcatagtttatagtggaacagtttccatattctagaaaattagaaaagcttttgataaaagagaactagaaaatttgtcagtaggctatattaaaagacatccttcttggactcttactgcaataattgctttggcttttgaatatactgcattcagaagctaaatcttccctgtaagttaactttgttaattaacaaaagttgtaaatagatctatttagcagccaaatagaaacttgggcaaatcttaggaaagtattgcaaatctgcaggggtatcttttctcggtttcccatcatctgcttccattccttcctttcctctctccttttccttctcccttctgtctgtctgcctatcttgagttaaatttgttaagcatattttttttttcagtggttgaggagaggattagatcaccttttcttttggttaacaggagaaatggtagaacaagtacttttgatactccaaaatcaatgtattcaaatataaccaccttatggaacgtttggtgcttttccaaacactctaatattcattatgtcatttgattttcgcaccaacctatctaagtagtttgggcagatggtattattttcatttcacaagtgaggaagctgaaacagaagggtaaagtaacatgccccaggttgtctagtcatccacctggttcctagtcctattgactactccctaacacctgcttcctgctcacgctatttcaaaaaggttgttagtacataaaactttcccaattttataa

SEQ ID NO: 90159 - DNA, 5282 bp, Homo sapiens
atgattatttacttcaaatttatgtttatgctttgatttaaatgttgttattttgcctccctcaaacagaaagcgatagatctggctagcaaagcagcgcaagaagacaaggctgggaactacgaagaagcccttcagctctatcagcatgctgtgcagtattttcttcatgtcgttaaatgtgaggccataggttatattttatttaaaaacacgaaaaggaaaatttattctgtttcatttctaaaaaattgaaatataatgccagacaattctaaacgatccatttgttaaaaaaaaaaaatactccactttctttctagtgatttttaagtattgagatgtagctagcaaatgtgacagccatcatagttattactttgtatatgtaaacatcttaaaatgtagtctagtcagtggaaaataggttaggagacattctatttgtgtctttacagatatgtattgcgtgtgtaccacgtggcaggcactggggatacaatggaaagaaatggttaagacccctgccctcatagctcttaaatggaatgcagttagatgattgaagatgttcttttgagcttctcccatttagttctgaggttttatgttaaagtgagactaagaatgagtcataacctgtaagctatgtggggctcatcccatctattgcacgtgttgccaaagttcactttgaaaacagctctgacagaggcctttgtgtagtaaaatttacgatgttggtattacacagaatatatgggatttccatcactttactcttctgaaataaagcttttgtagacattcatagaaatgattaatactgctttccttctatttgtcttttttataattgggtttgtctaagacaagcaactttgaactatctgcaaaaatgtaagggaaaaatatgaaagcttcagaatattaaataatttcctgttagttaacattaacttaatataccctgctgtcttgcttaggttgtttctgattcagacccactgttggtctccaaccctgctggaggaaggggtagaaaagaggtgataatcattggctatgatgagttagagatgatcttccctccttcttccaacatagaatttccttgtctgaaaaaatacatatttaagagttcaaacctttctacatagaatactaatggaaaaaaatctctctcatttccctttaatagatgaagcacagggtgataaagccaagcaaagtatcagggcaaagtgtacagaatatcttgatagagcagaaaaactaaaggagtacctgaaaaataaagagaaaaaagcacagaagccagtgaaagaaggacagccgagtccagcagatgagaaggggtacgtgtttaaaattgttcaattttattgtggctttttgctttcgatttgtgaaatttcttttgattaaaacaggtgtcagcaaactatggctcatgggccaaagctgcccagctgcctgtttttggaataagctttatcagaacacagccgtgcccattcttttacatattgttgtctagggctgctttcgtgccgtaacaacaaagttgtgtggttgtgtggagaccgtatggcccacgaaacctaaaatatttacttgtttggtcctttacaaaaaaaagtttgctgacccctagtttgccaagttgaatggataatattcctcaaacaacccttcctgactgcctgctagtaggaggagagaatgcttgtaggaatagtactcagttactctctggccattagctaatatggaagcttaaggttataggagtgaccagagagttaaacctttgaccacatggaaaaaatgaaaagtaactccaacaatgtaaattttttttggatatcttatgcaaaattttttgatgtgaatttgtgttagatttgctttatgttgtcattgtaaagaaaacaacacagcataacttataaacgttgaaactgatttttggcatgtcttcctagatgggggatgtatcacttctagatgcagaatttgtttattcagtacatgacatatgcgtgccaagtttgtgctcagcactgggaacatattctaaccacatcctctctggctgtcctattaattgatgccagtagttccaggtaacacacccttaagaaaatgagactctgggatggagttatctggcctgcttgggtttgaaaacagcgagattctgctcagctttagaggatgtggttctcattgttcatggtatgcagtggcgcaggttatttagacaataccctgtggtcacaaggaatgaagtgccttttaggcagtgctttggggcttcgtggctgctaccacagaccatttggaagtacatgaggaatataagaaccagtgttgacttggctgcttcaaactatgtggcagagtttgaaggaaatgataagcttaagctcaaggttttatattctctgttcaagatgtgatcggggaaccagggagtttctgtgacaccctaagaacatgttatcttcttcatcgatagcactgacttaacaaaaatcagatgatagtctgatcttacaaattactgaattccaacttagggtttcttatatgaaagtgaggacatttggtataaaacagggactccaaacatgaagtgaaaatattgggaagaatttagttgaccttgactgcccaggacctccagctgtcactgagactcccttgacagcagaagcttctcttcccttgtccatagaagctcttctctcttgcttgaaaaccctgtaaggatctcttctgagatgattacctgacaaggcgatgccagtttttcttttgtactgaacagcaatcttcgtttacagtaggacccactttggctaatttaagcaaaaagggatatattatagggtattaccttacagaatagtggggccagggaatcaggagaaatggccaacagtaccagggttgttcaagtagggatcccactgttgccaactcctctgctaagcactgatggtgcttgggagcaggtagtaaatcctctgcgcagctccctcagcaaaaccagtgccttcgcctgaagattctgtctccttgtgagcagcccccaccttcttggaagaatttaggtctcatgtggaaccctagctacaagggagatgagaaacggcagggttttttttgtttgtttgtttttaataaggacagcctttatagtactggacagcatgatagaaagaggttggagtgagtgtcatgtgaatcttttgcagtgtctacctcacccacagccccaccgtcctatgataaccaaggcaattccattttggcataaaacatgtcatgcttttatctccctttatatgttattgttttaaaaatgatataatgccttatttttggctttatcacttttatacttaacattgtatcaggaatatctttccaataaactatttctacatcacgtttaaatgttgcaatgtatcctgtcatatgctagtccctataatatgagttactttttccccttttgcaaacagtgtgggtgtgattatccttatggtcaaatgcttgaacttgtctaaaattatttcctcaagataaatccctagatatgaatgaaatgccttgatcgacctacttgttctttgggtgtagttcattgtcatcaggaagcttcctctgtcctttggaatccccagactaagggttgtagacctttgtaccttagtgttccagatttttttcctcctaatatgacctcttgttctaatttatatcttgcccagtcctgatgtttttactgttgttgtttgcagctctcctgtgattcatcttgaatccttcatggagtgatgtgtggggcatgcatttatgaattaatacatacctaaatatgtcatgggaatttggagctagttcctgacttcattctggtctttttgtccctttcttttacatgattctctattgatgataacgtgactgcttcttatttactacattctttaaaataagtaagcataacttttaatgtaaatgtctgattttgccactgaaattacaaatatttcaggttaatttttccttcatttttgccttatttgatagcaatgagtgatcatttgaatatattaaattctttttattaggaatgacagtgatggggaaggagaatctgatgatcctgaaaaaaagaaactacagaatcaacttcaaggttgctttagatttcatttttaaatttactatcctattaaaaagactcaaagtgaattgtctatttgaattgtttttgttctccctctatatttaaatgaagtttaagaactggctttggttcccaatagtcatgtgctggctttgtttagagtgttttcttagggtttgccctctaggatcatggtttggtcttttttatgtaatagttttgttggcttcacatctgcctttaaaaggctctcagtcaacttgctctttctttttgtttatttgccgccttttagagaaggtaacacttatactattagcacactgcaaaatttgatggtattaaaatttactactgtgggagaagttaggacttacacgtggcttttattgccgttgctgtagctcacttattgatggtttattttgtttcttaactgctcttcatctgcttttcagtgttcctgtttacatttaattgtttaagctttctgtgtttaccatccacacctgtaaagccctttcattctgttctactatagcacagtggcataacagaggggacataggtttttggctccattcagatcttgattctgttcaagggtctgccacttagaactttctaattgtgggcaagtgactgaatctctcagaaccagcgtcccccatctctaaaatagaaatgagcaatagcttcctttcagggcttttaagattaatgacagtgtaaaaactacctcatatatctgacgaagtctagggactcaataaatggtagcactgtttatctaaaaaggcatctatttgttggctggctttgttaatcactgagatttgattattcttcgaaataaattatctaacaatttttcagattgaattttttgctcacccattggtagtatgtattttgttcatttgaatcttaccaaatagaatgcataactgggaaggatttccattttataggttcagccttggttactgaatagtgaaaatacttacctgagccaaacttttagccttgctatactagtgtcttcgttttggtagtatttttgtcttgcctaccc

SEQ ID NO: 90160 - DNA, 1495 bp, Homo sapiens
ttgatttgtctgtgtttttttccttttcttttctttctttttttttttttttttgagacggagtcttgcacggtcgcccaggcttgagtgcagtggcgtgatttcagctcactacaacctccacctcccaggttcaagcgattctcttgcctcagcctcctgagtacctgggactacaggcacccaccaccacgcccagctaatttttgtatttttagtagtagagatgaggtttcaccatgttggcccaggctggcctcttgacctcaggtgatccgcctacctcagcctcccaaagtgctgggattacaggcgtgagtcaccgtgcccggatgactatctttttcaccaaggttgtattaaactaagattcagcaatcttcacttgagttttttgtagctttttgtagtcctatttggaaaggttctttttggtaaacgtatttggaaaaagcgttggtcatttggtaaaagtatttttcccttgagtattaaaggtgactcttctgaagtgcccatcttgtcatcgttggctttttaacaatttttattccaccagcttttcatttgtcagagactttgcatgtgatttcgatactctacaacataatcttcatcatttgcaggtttttgttgttgttgttttgagacagtcttgctctgttgcccagactggagtgcagtggcgtgatcttggcgcactgcaacctccacctcccaggttcaagtgattcttgtgcctcagcctcccgagtagctgggattacaggtgcctgccaccacgcctggctaattttttctatttttagtagagacagggtttcaccatgttggccacgctggtcttgaactcctgacctcaagtgatccgcccgccttagcctcccaaagtgctgggttacaggtgtgagccaccgtgcccggccccagaatgcatcatacttgaattggactgttggctgttcttcagtgaatcagccagagactgaccaacatgaaaggcataattgttactcttaagcaggaaggatcttgaattgtaattttgttagtggtaggttcacatgtgtgctttctcattcaaccttttcaaccttctaacctaggaaatttggattaatattcatgtagtgattaacttcctgctgaacaaggcaaaaatctctgtggccagatgcttataatctaatgagggaatgcagataactaaaaatcaaaattatataatgtaataaagctgcacagtattctccacttccctgtggttttactttccacagtttcaataacccgaagttaacctgggtccaaaaattttaaatgaaatattctagaataaatagttcataattttgaaacactatgtcacaatgcctgtgtcattcacttcagttcatatcatgacgtaggcattttattatttcacataatcacaagaaggttgagaacagtgcaataagatgttgagagagagaaaccacattcacatcacttt

SEQ ID NO: 90161 - DNA, 1044 bp, Homo sapiens
agacacagtcttagtaggcaacataagaatagaataactgaactaagatttggcctgctacttaagaccataattgcaatttgagaaaaacccaataaaagaaaatctggacacatttgactgcataaaactttaagaagagagtaattgaatagggaaaaacaccaaaacaaagtcaagagacaaatggaaaatagaagaatatataccactgtataactgataaaggactgataccttaataataggaaactcatgagaggaaaagtcacataaggctcatgacaatgattaaaaaaacaaagacaatctaccaaaaacatatgtaaaacctctttgagcatatggaaagatgtttagcctctctgataatcaaaagatgcacataaaaaccatcatattatcagaatagcaaaaattaagatgcataataatacactctgctaacaagagtattaatatactttgcttgtaagagtatgtcgaaacaataactttcttacatatttagtaggaatgcaaactggtaaaatccttaatgagggaatctggaaatatctcaaaaacaaacaaacaaaaaatcacacaaaaaaactagatatatgttaaccttttcatctacagtccaaattctaggaatttactctgaagatccaactcattcagtacaacagtatatatatattttataagtatttcatacattgatgttttatttaatatcagatatttcataaatatttcattttctatattatttaaaaataaaatcgaacaaatacctatgcatacatttgaggacagacttaagtgaaggacaatagccctcaaaaataagcttctagttgtgattctgtcttctctttataacatgactagcatttatttttttcagcagaataatcacactatgaattatttcctattgaaaaatctccttttcctaaaacttcatttgaacaccattgtttctacatacttctctttgttttcatgcaactcttctttagaggcaatgtggactttagatctctgggaaagggc

SEQ ID NO: 90162 - DNA, 1058 bp, Homo sapiens
gcttgattaactttgatcagaaatagaaacgttttcatttgttgatttaggaaaaagcataaatagaatgcagtataacaccacttccaaaggtaaggatacctaacattcttttttttttttttttttttttttttgggatggagtctcactttgttgcccaggctggagtgcagtggtctgatctcggctcactgcaacctccgcctaccgggttcaagtgattctcctacgtcagcctcctgaatagctgggattacaggtgcacgccaccatgcttggctcatttttgtatttttagtagtgacagcgtttcaccacattggtcaggctggtctcaatctcttgacctggtgatctgcccacctgggcctcccaaaatgctgggattacaggcatgagccaccacacctggcaagggtacctgacattctaagatatcaagacacttaatatgtgggctattagctgcttatttaaatgttgaccaaattgtctgatatatctgattaatcatgatttcacttcatttcggaagaaaaattatccatatcatttttaaagacgcaaatgactttggatttttgcatagagtacaatagacacttcaaacaatagattctaacattctctgaaacacttgagatgtttgagctaccatttatatgggttatttatatttagtctaagtaacacatacatgtttaattgattctgttttcatggatagattcaactaagtcttccaagcaattaattttttgttcgtcgtcgtttttccttcatacgttatctagttatgcagcactggaaacagactgaagatcataaaccagttttatcagacctatgtgtaataagactcctgttaatacaaaaataaaaagctaaaagcaacttgtctatgattgggataattttatcttaccccttttccctaggtctttgagtaatgctattaagattttgtatggagctgaggaaccagcagttggaaaatgcaggacaagttgaataccgatccccaaacccagaattttagcaactgaacttggtcc

SEQ ID NO: 90163 - DNA, 1053 bp, Homo sapiens
gcttttggatgtgtggagcacttgtagtcagcccatttgtgcaaaatggacaaggacagaggctgagggaagcaagaagtctttgtcttctgaagggcaccacatggatcttcctgatgttgtcattacctcacttcctggttcaggagctgaaattctcaaacaactttttttcaacagtagtgattttctctacatcagggttcctacagcctacattgatattcctgaaactgagttggaaatcgactcatttgtagatgcttgtgaatggaaggtgtcagatatccgcagtgggcattttcgtttactccgaggctggttgcagtctttagtccaggacacaaaattacatttgcaaaacatccatctgcatgaacccaataggggtaaactggcccaatattttgcaatgaataaggacaaaaaaagaaaatttaaaaggagagagtctttgccagaacaaagaagtcaaatgaaaggcgcctttgatagagatgctgaatatattagggctttgaggagacacctggtttactatccaagtgcacgtcctgtgctcagtttaagcagtggaagctggacgttaaagcttcatttttttcaggaagttttaggagcttcgatgagggcattgtacatagtaagagaccctcgggcatggatttattcaatgttgtacaatagtaaaccaagtctttattctttgaagaatgtaccagagcatttagcaaaattgtttaaaatagagggaggtaaaggcaaatgtaacttaaattcgggttatgctttcgagtatgaaccattgaggaaagaattatcaaaatccaaatcaaatgcagtgtccctcttgtctcacttgtggctagcaaatacagcagcagccttgagaataaatacagatttgctgcctactagctaccagctggtcaagtttgaagatattgtgcattttcctcagaaaactactgaaaggatttttgcctttcttggaattcctttgtctcctgctagtttaaaccaaatattgtttgccacctctacaaacctttt

SEQ ID NO: 90164 - DNA, 4333 bp, Homo sapiens
gtatgtaaattgagggaaattagtaagtcaatgaagttttactactaaccagataagtaaaaaatattaaaaatgtcatgtgaaaagagtatgtgtgtaccttctttgtggtaaataacccagccttctccataagcagattcctgtggttcaggaagcaactctaaagctgctgggcgcacatagtaagcaccttaaagagacctttgtggttaatgtagaaaaatcagtgtctttaggaaaggctgtagaatatttgatgcctttttctgttgctaatagctggttctgcacacacatgcttatgtatgtgcatatagaaattatatctcttaacagtgtctttcacatggtagttactgctgaaatgattgattcattggaactaaaaacaagctgaatagcaacaagagaaatctatagtggtttcaagttcatttcatgctatatatatcagaattacatgtgaagggaactgagttttaattctctttccacagtctatattcaagagctcaccactgatgggctgctttctctttggcctgccactgggtgtcatcagtatcatgtgctatggaatctacacagccgacacagatggaggttatatagaagaacgatatgaagtgtctaaaagtgaaaatgaaaaccaagaacagatagaagagagcaaagaacagcaggagcccagcagtggaggatctgtagtgcctacagtgcaggagcccaaggatgtattagaaaagaagaaagattgagacttgatgactataaaatatttgttaggacttcaaattattaaagagtctatttattgaatttagacatttaatcatgatctttacagaaaagaacatgttattcgtattttgctaatatcaactgcatggattaaagtagtccctccatacatggggaagtgtttggagcaaagagatgaacagtttgtctgaaacaaacacagagcactccatcaaaatttacctgatctttgtgattagaacagaacaattctatttgcatgtttctctatctgaatattctgtgacaaaaagttaagattcttgggcagaatatttaaattggtcagtcaggtagaagatacatgtgtgatatagaaaaataatgcctctcctgctgccatccgtttccctcatatattttggacaagatttatatggacaaaattaagtctttaaaatttaggcactttaaggagaactaataactttttccatgtatcaagattatgaggttaaaaataatgtggttttatatagcatagtggttttattttgttagttatttttaaaggagaagaaatgttactttttaactttatactcagttgcattatcataaaattttcatatatgcctagataatggggaaaaaaagtcttgtgattgactttcgcaaaataaacaggatttactgagtagaggtttcagcccattccttggaatactaacaggtatttcatcagtcattgtaggttgggaagggtctctgttaatcctactctgctttagccagaatagcctagtattttatttctattttatatattgagatttcttctaacatttcctttgataaaaatcttctgctttttgaaaagtggtatgtatcatatttttatgtttctggtgtgtgaactttatggtaacttctactctagaatacgtacgtatgcacccacagacacacacagtttattgacacatctattatgtaatgctgtagacctgtccgtgtctgcttcataaggagtaacgactgacattagcatgtccagtgacaagtcacatccggtgtaaaaaaaagagatcagccagttaccttctccattgtcttagttctgtcacccatttcgtcaagtgacctctcatcttctataaactaatacaggaattctttccaaagcaatgtctaaaaactcttttttttaaagtaacagtttggtatgtttattgtagataaattatttttgaggccttcattttagctaagtttagaatttatattaggcaactatgatttgagtggttattcattgagtaattttccactataaagaattttattgaacatttattaaaaaataatgtaatgcatggtcaaaaaatatgtaattcatggtctggacactgacgttgtttagggatttagtcatcaaggacagccctctgttgtttctaatgccgtactaatcaagactgtatggacacttgcatcttaagtactaaggaattactagtgattgttttattttatccatgtactcttttagtatttaataattaaatacctattcttagtgtttgacactccatatttcttttttttggaaatgaaacaaatatgcagtccaaaattcaggaactactagagtgaaatgatattaagtggaaaccagagataaatgctgttaatttaacaagtagattcttctccaaagaatgatgagtgattcttgggaagataaatgttaatgttcccaatagtcaagcttgttttgcagtagtgaaaagcttagatgagtacggatacctcatttgaaactcagcctagtaaggaagtgaaaacttagcagtcagtgacatggggaaatagttatagaaaatgtcactgaattttttcatatttataattagtcatttacatatttttgtcttgttgatcattacctgtaaatgaaagaccttaataggaaaaaaagagtaaagctcagtgtgaatgcaaacatccacaaaatatgatcttcgtttatattctgtgatgttgtttataaatgaatgcctcagttctctgctacccttttcacagctttgtactgtttgccttatattctatttgtgcttttaaagtgtgtctgttgggaaaacaaaatgtgtaggtggtttgtaagtgaataatttttatttcttcttgtattaaaattttgtttttttctctactttgggagatgtttatttacattgtcagactattcacaaaacagattctaaaatttgtttgctcgtatgctgttcccttcaatgtgatatcagagattactatgaatgttagtttcattccgtgaaacattacttccatataaagacagatctcttaataagtgaatctagtggaagaacataggtatcattctaattccatggtaaattttgtcatgattctatatgaataatggggtccttcaggaagttggaatttttgccttctcttttaattgcagtgaagttctctttataacttctaaaattcggaattctagatccttgcttttgcagaatttggtgctcagacaatatttaaggacatttcagcgagacaaagtgcatgtttttatcgagtaccctgtgcaccacattatatctggcaattctttttgtttcattatgtgcatcaatatttttctcagctactattacctgaaacttgtttaacatgtattagacctagaattttcattttctttctcacatagttgcttcctggtatctgatttagaaataacatttaaatgccaagtatctgggggattgaaggaagggtctatatgagcaggtgaattagcagtactgtttttgtttagtggatattgttagtgactttttgtgtgtgttttgctttgggacctttttattttggtgttgcaaaaagtaacatattttcatcattgcttcatacgacatggagttaggacagggaaaaatcattcaacactccttatgcattaaatgatcaaataaaccagtgtaggatattaagactatcaattggtgggattaggcttgacattttatttttataaatatatattttttctgaatgtgtctgagtccaagagtgggcaaaaaataattttctactttggactaatctatagaggtttttgaaagtctgcattactaacttgttgaattcatgatattctgcctatggcacaaattgtaaacctttgtttttctaaaataaagtaattgaaaacctgcaattgtttcttatttttactgtgtatcctggttgtttgcaatatgaatagttctgtgtacaaagacaacagctacgaccatatcttccagaaagtgttgcttttattaaaattataattgtagaaatatagaattttagagatgagagagatcagattgcagtctaattctactataaataacctgagattcataggtttgatatagtttgtatttgacaaacctggtaattgtacagtaaaaagcatatcttatagtttattttgagaagaatcaatccttaagtcaactgctaaattatctttgacagcacacaaccacaattaaaa

SEQ ID NO: 90165 - DNA, 1024 bp, Homo sapiens
agattgcaggtatggccgaatataggatttgagtgattttcatcaggaatttttcactctcttcccttcagcactttcatcctcagggaagctctccctgcacagtagcaaaggtatcctgcagcagctctggttttgcggtcccagctaaactcaaaagctggttaggctgtcctcagaggtgggtcagcttcagccaagctgtgtgggttatgaatagaggaggaggaattgtttagagtagaatcagggtgaattaacacaagcaggcaggaggaatgctggacatgacacagacaaaaaacaacacagtaaatgtttaccacatggccttttcaggtgattatgtaatattttggagtcaaccatttggcctgcaattgtaaggttatgtaacaccaagtaaatgaagtaatggtgcttaaataatttatttttcttttccttttttgaaggcccaaggaggtgatagcattttgcagagattgaaaagaatagtatttgatgccaaatctactattgtggtaagttgtgacagtttatgtcattgataatgaagaagatataggttctttatgtctagctgtgttaaaaatctgaatttgaaaagattaggtcaaaatatgtctttttaatttgcaggatatgactagtcagtatttaagaaaatatattcattaggtggaaattgtttctaattgtttatatgattgatgagttaaaactaaaattcagaatcaattaacttgatagtataatttaaaagattttatttctgcaacctgccatgtaaagtttttacttagtaatttctatgatttgttgaaagtgcagataatatgaaatttttagttccattacgtgctgtcttctgtaaattggtcatttttgttaaagaaaatgatgtgtgctgggaagtcactttttattttgcaggagtcaaaataaaattttagatcttacaattttaaacatccctgttaattctgtacttttccctagttggtaaataattaagatcatt

SEQ ID NO: 90166 - DNA, 1068 bp, Homo sapiens
actgtgtctgtgtttctcagaatcctgttggtctatgggagaatgctctgcatgttgtagacattttgaaaaaaactcacgaaccatttgaaaattaaagaagcatataatacaaaaaaagaatagcaaacgagatatttcaggaaggtagatgtcattgtgaactgttttcatcagagagttagaagactgaaggttgtgtagaatttagacaggtgtttaagcagtatggaattagaagcagcattaaaatgcagggataatactgaaagattatggatttaatcctacatgtatgtacctgctctgagccaggtttatgcccatatttctgggcatctaatcttacttaactctcccaataactctatgaaatatatattagtttttggaaataagttgaagtttactgaggcacttccctgttcccctgtggcttggtatggtgcctagaacatgatagacactgcttgatggcagtgtttggcgttctgattctaacaccactcttctggttattacatcatgccagcttcctagaagatatcaggatacatatgctttatgttgtatttagggttaagtaaatgtgagtcagtttaattctgcatattataactggcaagtactgaaccatggtaccaaagtcaacggccatgtaaaaaccattttcttattcttctagaccattgttttagagctacagtaattcttagcaaacttgcttttaatcaacttatttcctgtgcttttagcctttgaaaaaatagttatcttagccaatttgtagggtgtaaggaaaaaatacaattcaagcttgtaagttggtataaaaaatactatttaagtgtataaattattacatatttactcttatttatattttggggtgggacgtggaagggaatttgtcactggagttgactaattcactgattgactctacaaacatataccgtaatgtgttgatttaatttgatataacatgtagggtgattggaattaaattctagaaatactttactaatttcctactcagaactaaagtgataattgaacagtttgtgt

SEQ ID NO: 90167 - DNA, 1061 bp, Homo sapiens
caacctggcttgtccctatgccaaaccagtcatcttaatgacctccccttcttgccagtggttacaatagaactcagcaaagtcacctactatgttgacatttttgtaatagaagtagattgatattatcattaacaattaggtgtgtatgttgtatatatatgtttattttgtggattcattttatataaaacgtttcatatagaacatttccttggaagtaaagacatttttattgtaaattgtatatctgttttaaatcagtagtcaattaaaatgagcttaagatagtaccggttttgaggtatctaggtttatgtttgtatgttttgatctttcattatgtatctactttaaaaattatatttaaacttcttgtctaaaacattattagatcatttagtcaaagggattctttaaatattaagattcatatttactgtagcacaacattttaatggttatctttttttgtttgttgtttgtttttttaaaacaagttttatgcgccatggtgtggccattgtaaaaagctggaaccaatttggaatgaagttggtcttgagatgaaaagcattggttctccagttaaggttggaaagatggatgctacttcctattctagtaagccttcacttagtttattattttactgttctcacagcaaaaacatttatatgcaacagtattcagggtgggaggaagacttttttttgctcatgtaaaattcaattaacttaataatttaagactgtatactttatgagttaaatgaattagccattgaacatgtagcgtgtagtgtgtgttaatcttatgcttaacagatgtttaaaccatcctttctcctttgagcccacttcagatggtttatatgaggcagctgtaaaaggatgagtgttaaactattgatattgctacttgagttcagaatccgtttttttctgagtagcctgagatgtgctgtaaagaaaaaatgggaacttaaaggacgaattgagttagggtgagtacaagtgaggatcaggaagcttttcacattagaaagaatactagagcaa

SEQ ID NO: 90168 - DNA, 1026 bp, Homo sapiens
ccagcacaggaattcctcaatccaatatttctcacgcgcattttatgaacactgagccatcattaccaggaaatggtgagaacacttctaaaatccaagttcccagatgccaaccaaggaccattcttagaaacagttatttctaagcatagcagcctcaggcttcctttggtaccttttctaaacaggtgtaaaatgttctagaagggcaaggagcttaggcatctgtttgtgtttctaccaagtcctactttaattctttttcttggagtctttcctcctaattactttatcattgatcagtcctctgcttttatctttgagatgtttaatggataggtcactgagtaaaaattttatgtaaagtattattgaaggaatttgggtctttcccttatatttatcaatgtattatctctgcctatactatacagttgtaaagtggacacaaacatacaatcaaacatttgttttcttgttttttaggtttaaagaaaatcgaaatgatgacatttggcttgtagatgtaagtatgtaaattttatatgctaattacccacccctaccattttaagtattattttctattctactctacccaaaaatggcagtaaacagctagtgcttatgtatatactcaatttgttttcttaagtattactatatttgagattttacattaaaaagaaccttagagttttaaggttccatgcgagggaacgtatttttgatgaaattttgggggtgagaatattaagaggaaaagctggaaccctgtcttacaatgaggtcaacttttggattatatcttaatgatatagggtatgattttattacagaattcactcttgctttcttgatagtttccaagagattgagtatattaatatcacttagtcaaagtcatattttcatcttaacagtggacaaaattaaagtttcaccttcctttctttaaagtttggaatatatttaaaccttatgatagttgagatttaacatgcctcagcaaaaagtagaatagga

SEQ ID NO: 90169 - DNA, 1024 bp, Homo sapiens
tcaggcactgccgtgtaataagtattagagttgcagctcgactttcttcctacgtatctatttgaggggaaatattttgaatggcatttggagtttttacggaagaggtaattgctactaaagcaaaagaaataaagaagaatgctgtctatttgtattccaaaaagataggatggttaaaaagagacgtaagatgagagtgaaaatatggaggaaaaaggaactgtgtgtattagatttattggcttacctagaacttggccggtcacgatatggttgcatacagactaaatatttattaaatggatgaactacctttgcttttgcatcatttgcaccctgggatgcatcagtgatgaattttttggtaggttgtgaaaggtcaaaaacacttcagagatgactaagcttatacggtatgagccaaataatcagcatttattgtgtacattttgtctttttttttcagttgttgtacttgatatggtcgtctgtaaaggatttgtagaagatttagatgaatcgtgagtatacatatatatatttaaaatattattttaactgtccaactcagatatctgaatatttgcatgtgattctaatattttagattggaaccaatttttatatatcactcatttttttcacttgttgtaagtgaaggtgagggtgtgcccagaagagttttattaatagttatgagatcaaaaaactgtggcaaacttttacatattctttttttcctcattatcttaccttgtatttatgtctttttcctttaattatattgaatgggtgttagaatttggtaactgtactgtatttatcttcatagtatgacagcattaatcagccttgcttatagtaagtgaggaggttcacttcagacccaaattcctgtgtgtgatctttcaggcttgaccatagacaattgcaaggctttttctggcataggggaaggtgccctccctacaccaaacttggtgtataaccggtgcattacagtccctggagggagtggtag

SEQ ID NO: 90170 - DNA, 1087 bp, Homo sapiens
acagtggggtgtccttataatctatccagcttggaatttgattagggtaatgaggaatgatggcaaaatttcagctaagttcctgttcacaaattccccaaatgcacctcatgcaatgcagaacctttacaagaaataagcatccatggcaatttgccagttttgaatcattaatacagagtaaattttgcccagatatttataattggaagtgaaatattctggtccactttattaaggactgtatgacaatgaactctccatctggaaaaaaaacttcagtaaaaccaataaagacattttactaagacttcttggtgatctcaggtagaaagcagttgtcttttgagaaatttgctatgtatatagcatttgttacatgattctacatgtatttcaatgtcagaatcaattccaggtcctccaatatcacatctttttactgcctatatggaaactattagattatcgtaattttgtgaatccaaaaacttataatgtcctctagttttgtaacccatgatgatgattctgattttcaagaatcacttaggtagtgtacctagtaaccttcatttttccaacaaaaaccattgaatttcacaggattttcacattttcatggaactgcttactaaatatttaccaagtaccttccatttaaattaagtagcatccttgcctactggacgattgttaaaatgtttaaaaaatattacacaagctattgttggataaatgaattgctaaaatcatttattgaactttgagatctataaacaatagtgtttctaatatggtatactagtaatgcaattgttatatgtatggagttaatgaaatgaacatgagggtatctcagggaaatactcaatttttgaattaaattctttagagcaaaaggtaaaatgcttgcttataaataaattagtataattgagtaattctatatggaatgacacaggttcagatttgagagatttccattttaagggtatggctgttttgcaaacaggctggagatagttttctctaagtggacaattacagtgaccgaaatgataaaaagctatattctcaatatttt

SEQ ID NO: 90171 - DNA, 1064 bp, Homo sapiens
gattttctgattaatgagatatttggacaggccacagcaaaatggcattgtaaaatgtgccaatattcagtatgtgctttaattatatcattttttaaaataataaaatagatagatgaaggtttaagatgtgattgcttctaaaaatgcatctgtgatcttcgtcttatttttgtactaaattttctttgccaacagtgaccactgtgctgaagtatgttcttagtgataagaactggcccaattagaattaactgtgagcagaaaacctggatctaacatcagggagctggaggacagtcttccaagaattgatcctgttacccttatatccacgtttccctgtgatgtggtcacaatactagagacggttttcttttcaaagcacattattcatttttagtgacaccaaatttcagtgagcgttattctctgaacattttttatgctaaaacactgaattgtgtctttcctgtactgtaatatatctgttggttatttgtgtttttatagtctgatttttttttttaagcaggggaggttttagtttgttttagctgcgaccatgaatttctggagctagtgaagttaaagattatgctttaggaaggatggtacataaaaaaagattaatggcattcatttggaattatagttaatggtatccattatggggggtactttttaaaaaatactctgggtaagctgttaatttaaaaaaatattgattttgtaacttgtttattttttaaaaaatgcaaaatattctggaatgctattacatcaagaacttagagctttaaattatatataaatcctgttcatatgtatttgtttatgtgtgtgcctcctaagtatagtaccaagtttcataaactagtatttctgtactcttatttttctatctcagctttcccaaactcagaagcaaaccctctaaatgcctattatttgaaatgtcttgaaaacctcgtgcagctccttaattcttcctgagtgccatgggatgctacaccttgaagctgacagtcatcaacaggggagctaaagttgaagccagctgt

SEQ ID NO: 90172 - DNA, 1033 bp, Homo sapiens
aagttttcacacacacatacatttatatatgtagttattcatagactgttcaggtcaacaccaaataattttataaataattttctaggcatttattaagcacccactgtgttcaaagcactgtggaaggcatgggaatgaatcaggcatggcttcagccttccgtgggcttccaggagtctcctgaggttagcaaatcatgtcattccagtgcacatactggacacctggaggaaggggagccgtggacgagggctccctggccttaccttctgctccctctcctctctccttgctcttcctctaactccagctcccctcttctgcatcttcaagcaaatgctactatgtcaatgaagcctctcgggaaccatgtgttaatataatagccccgcacccagggggccttctctttcctcctcctcactatttcctttcctggttttgtttccctccgtagtattatcgccatctgatagattatgtgtttcatgtatctgtctattcctagtcttcccacactagaaggtaagctcttatggggtcaggaggcttttgtctgctttgtttatgtgtagcacctagaattgtgcctgcaactagcgagcactcaataaatatttgatgattgagagagatcccaagcagaccggagagagttcagggcttgagatcagatggtgcagtgagcctcgcagagacttcattctctgagatgtaggacagatggaggcgaggattggtaaggattcagaaaaaaattgaagcaaaaagaatcggaaagatctttttctgcaaccatgtgttatctctgtgaggagtatgtgaatttcgtggggagtgagttttataaaagacatgtgttctagtgaaaaacagaaggtgggctccagacccctacacacctggtcttgaatgccagcactagggcatcactccagcgtcgcctggtgcagcctcgctgggcccagcttcttcatctataaaagaagcccactcttcttggtttggtaagaatcagtttataaacaca

SEQ ID NO: 90173 - DNA, 1038 bp, Homo sapiens
gtttaaactgcatgctcaggtaaactgaaaataacatagttatataataactactgtggttaacaagatctgccacccacttattcaacaaatgaaagtgtgtgaatagtataaatatataaatatacatatatgtgtgtaggtaaggccgttatagcagcactctatgtaataactagtttctactgcatttaagaaaccaagacaaagtcttatttaataatgtaattgatgcaggagattgattgtatgtttatcagttctttttttttttttttttgcctcttttcctccctagccaaaggcccttcatcattgagaaagtcagccaacacctgatattattgaaaatctctcagtatctgcctcactttattgagatgaaacatggaggctatcatatatccgagttcctccatgcttgatagaacagaaatagctttttcatggtgaatgtgcttcttgagatatggtcatctttcagagatcgttagcctgtcagttccctcaaagttacagtggttgggcatgattagagcacacctgcattgtcccgtgacccaaaggggagggaattactatacacaaaaagtgaagtatgctgttgcattcacagttttcaactgctttttgtttaaataggaggatggtgttattaaagagttaagcattgccatgcagctcctaagaaactgtctttatcaaaatgaggaatgtaaagtaagtagaactacttttcaaaattttaataggagtactggtattaagcagtttaatttttatgtgagataatgtagtaggaaaaatggaaagctctgacttttaaatttttagacacacagttgattggtccttaaactcagtgttaattgtcagaaatgtgtgtatctaatcattattcatcgacactgattacatttcttcgcaaacttcagcctcattctgtactcttaggtattttaaatgttttacatatggaatgaatggctggatgtgttttataaggtagattctttcaaaacgggttgtcaaaacaac

SEQ ID NO: 90174 - DNA, 1033 bp, Homo sapiens
ataaaaatgtatggaatctgttattgtgtctgcttttgtacatattagaaatttttaagtgaaaatttttctagctcataaatttaaatgtataaaggaaatatacagaaatagtagtttcggaattacaaatgattttccatttctctgaaagtcaaaaaagttacacactattttttgagaaaatgttatatgacaggtgcatgttaccatagaaacgaaagatggaaagaaccaaatcacctgagatataggggtagtttagatagaaatggagagaggggaatgtgtccccagaaggagaaaggaggaaattgatgacagttctcctgttcagcagttttacaaggacccattttaataaggtacacacatatatatacaatatgcgctggtgaatttgagtaagtatatgagcttgctacgtgaaagctaaataaagcttttttctgtagatgatgagtctttaagaatgattgttgttcttttccatattataagcaacttatacagtcttatccacgcagaacattctcaaatattaatgatttatcaaaatccagtgaatttcacatgatagttgaaacctagcaatatcttttaagtagaaaatgttctttattcacaacagttttgctccagattaaatatttcttcaaggcagtttgatttatattctctgcagtgctatgaagggaaatcctccaaagatatcctgaaaagagtagctgcaaatgcattgatgtcactgctggctgtcagtagaagagcacagaaacatgctttgaaaggtgagccacatgacacatcagctgttttgatggcattatcaattcatatgttttgttgcttgttcaagttaattttctttggactcaaaatgtaaaaaacgtatagtataatctcagtgtcactaaaaataattttttttcccatacagaagcagtaaatatgcattacttttcaaataaaaagattagacatagtttgtttttgtttgtttaatatgtgatggttcttgctctaaagaacc

SEQ ID NO: 90175 - DNA, 1287 bp, Homo sapiens
cattttccgtactgtaacattaataagtaaaataatttactgattcataggtggcaccttcattggggagtactgaatttcagccacttgtgcagtcaacaacacttctacctgaagcctcccatgaccagtttgtggctcaaggtatccttttagtgaagacattctaccttcaaaaagaaaaatgacaagttggtccagacagatattttgaaagtaaatgtctaaagaacaaaattttaatgaaataagttgtagaccattatgaaatacatttagaaccaatatatcagaaattaataaaataaatgctcttaactaataaatggaatttggctcttaaataaatagtccaattcctgtgtggctccttattaggcgctcgtaggtatttgacatttgaatttgggaactgatgggtataacttaactttattttttcccttcttttgagaaaacactttgctacaagtaatccacttgaaagtaaagcgattctggttttaagtattttctaaggctatgcttccatttaaaggcacataaaatgtattgagtctttattttattagaaatgcacaatatacaacttgggacttatttttattaatggcaatatataaattttgctccttgtgctgggaactgcttccaaccctgctgtgcttcaaatttgcaactttgctttttttttttttttttaaattctagagagtatataagccttattcagtagcattaaatttttgacttgaaaggactatactatctaaaaagaaagtaattttaaacactggcatacatataagtatatgcagaaaaaatactttctgaaacatttagaaaaacttgctgaattaaaactttgaactttcattacaatatttgttccaataatttcctaaacagtgttccatattggtttttagtaattcatgttcactatatataaaattatttaactgtagaaaatactcatttgatcttcttaagaacaaaaggagcaaactcagattatttaaatggctcaggacatagggcatgaaatgaaattcgatcatgaatttcatgaacatttatctctaaaagcatgttgccttactctgatttttaacatctttattgagatataattcacataccatataattcacttgtttaaagtgtatactttattggttttaagtatattcagagttgtgcaaccgtcaccacgatcaattttaggatatttccatcatcttgcaaaaaaaccctatacccattagcagtcactccctgtctccc

SEQ ID NO: 90176 - DNA, 1075 bp, Homo sapiens
tagtttagcacacttaaaaaatagaggctagtagaaatataaatcatccataatcaattttaaagcaccatataaagcaatcattgtgtttccccaaccacatggggtaagttataatacaataaggtactttctaaaagcatcttttctaaacttgtgtatcccttctgtggactatactaaggaaaatcacatctttattaatgcctgacctttgtcatgaatcacaactttgctttcttctaatgagccaggtatttagtgggcccttataagctttcttttcccacaccgatcgttgaaaccgcaaaccaggtacctattctatttatatcagtaataaggccttcttgagtctttatcagttgaaagaatgttcagtgaaatgataaaggatttcagcatcattatccccttaacttttcttatacaaccaaaagagttgtggcaggagccagatatattagcttgtgcatagtttgtgatatcagtcttggcataggattattttcttcacagaactataaatgttgtcttgatatctgttgacaggaacattttttcacatatctctcattgccaaattgtaggcaaatatatttttaaaaataaacaagcttgctgggcgcggtggctcacgcctgtaatcccagcactttgggaggcagaggcgggcggatcacgaggtcaggagatcgagaccatcctggctaacacagtgaaaccctgcctctactaaaaatacaaaaaattagccgggcgtggtggcgggcgcctgtagtcccagctactcgggaggctgaggcaggagaatggcgtgaacccgggaggcggagcttgcagtgagccgagatcgtgccactgcactccagcctgggcaacagagtgagactccgtctcaaaaaaaaaaaaaataaacaagctttaggttatttttacttagtatctggatctaatactatataaaataaggcatttgatgtttgtttatgattgacttatttagactgaacttttttccagatttactttttagattatgtgcttagcctacattttttagctgcagctttct

SEQ ID NO: 90177 - DNA, 1074 bp, Homo sapiens
gtatacatgtgtgtgttttttttccttgtcaggattaattcagtgggaagtaatgtgacagattttgccatatggatattgatggaccttttcattttacctggcttagtgataggtataaaaaataattctgaacataatatatggaccaccttatttcatatattttaacacctattattttactattatatgtaggttgaaaaatactgcttttattgtgtttttggtgcaagtatatgatttcttggttaaagctgatcattccatagaaacattttaaatgaaatggcccctcaagagaaagatcagctttgtcccttcacgggggtgtttaggcagcaaagacctagagtattatggaataatttgtcctaggtcaggctgctataactgtgtaaggacaaaagcagagtggaaggagatgggagcatctgggacccatttgtttcctcgagaggagacaatggatctttttaaggaaattgttggataaatcagtgtctcctccttctttccctctcttcctacagggtccctgtgttcatgatgaggactctggcctatcgctcattggaaaacctgcccttcaggctcttttatatcactgccatttttatgaacatttgaatcagatggtaaagcattgttacctaggacggtgtatgtttgatttgaatttttctgcttttgatagaaattcagaaagcaatgatttaaatggtaagtacgatatctttgtatttttatttttgtaatatgtaacttgtaaaaactgttaaaaatacatatatttgttttaaaaatttgaaaaatgaaagtatacagggaaaacattcatttccagttctaccacccagagagatgtattttcttcccgtcttctttctctgtatagcctttgtttgttttatgtaattatgttcatatcttgtgtacatttttgtatttccttctttcactaaatattctgcaagcatttttctatgttataaattcttcatggaaattatttttgacatcttattaatactttataagttatgcccatcagtacagttttatagtttcttt

SEQ ID NO: 90178 - DNA, 1057 bp, Homo sapiens
cctctcagcatgtgcagttgaccagagatgtcttttgctattaattacaatatattggttatttcagagatgaccacaagatggcagtattgacctttttttttttttttttttttttttttttttttttttttacattttcaggcggcatttattcttcagaatctccttgtaattccaatgcctacagaaattataaaggattatacttggcaggtgggtgattttaaacaattatcaacctagtagatgtttcaaattaattggtgataaattttcagtataagtagtatatttcattattgatgaaactatatacaagacagcaagggcctcttaaaatagaacgtagaatttgttcttatgccgaccagacttaaaaattcttctctatagtgttcacaataatttaaagcaaataataatagttaacatatgtttactatgttttaggcacccttctagaaatgtaagacatagtaacttgtataattgtttgagttgtgaactgttactatccttattttctaagcttaggaacttttgcatagagagtttaaatagtttgtcctaaatcacacagctagtcagtggtacgcctttgctttgagtctaggcagtctcttacccactttgctgtattacttctctaatttagtaataataaacaaatttgtagatagttaaatatgtgttgatgttaacatctttttttccttttctaggttagtgcacagtgcgggttatagtgtatcttgctttgttttctgttgggttaactttctttttcatgttctgaatatcacatcagtaaatggttacctaacatttttatagcttacattaaaaaaattctagcttcatgggatatatgtacatgtttgttacataagtatattgcgtaatggtggtggggattggggttctcgtgtactcattacccaaatattgaacattgtacccagttaggtaatttataacctcagccgcctcccccactccctccttgggagtctcagtgtctgttatgtctgtctttatgtccatgtgtattcat

SEQ ID NO: 90179 - DNA, 1048 bp, Homo sapiens
ttgaccatgtatcaggcaattcttatttccaatatcaaaacaaaagcctttaatttttcacccttcagtatgctgtttatagtttttttttgtcaattaagaaagatcaagttaaggaagttttcttttgtcctgttttgctaggagctttgttttttaattcataattgtatattgcttttttctgtatcttttaagataatcacatgatttttcccttatattccattactgattgattttaaaatgttaaacaaccttgcatttctcgaaacatttcagttaggttgtgatgtattactctttttatatgttagtggatttcgtttctcaattttttagaattctgaagtttttagaattattctatttcctcatgtaaaaaagtttttcgaattttgcatcttttttctcttaaagaatttgtcaggtttttaataatcaaaatcattccgttcttatgactaaaatgggagaatgtgagattgtaagaacgtgactttttcaaccattttaaatcttttcctttatataactttcttttttggaatagctgatttgcattggtgtgattttgttctctaatgttaggtagaatttgatcgtgaaacaatcttggtttgcagttttctttttgggaagattgtaaattgtgaaatgaaatgactttttttttttttgagacagagtcttgctctgttgcccaggctggagtgcaatggcatgatctcagctcactgcaacctctgcctcccgggttcaagtgattctcctgcctcagcctcccaagtagctgggattacaggcgcctgccaccacgcacagctaatttttgtctttttagtagagacagggtttcaccaggttggccaggctggtgtcgaactcctgatctcaggtgatccacacccgtcttggcctcccaaagtgctgggattacgggtgtgagccactgcgcctggcctgaaatgactttttaaatagatctaaaatcgttcagagtttctttttatgtgtgtcagccttagtaagttatgtttttgtagaa

SEQ ID NO: 90180 - DNA, 1082 bp, Homo sapiens
agacctggattgcattgtattgtgttcatctcctaacctttgaagataagagtctatgcccttactgctgctatcatagaaagaaaaactccaggatttttatcatctgtaataatagccaaagagaaatttttaatttagttattgcattgttgaagggattattaataaacttgtaacaatttattcttagaaaattttacctcacaaaagcaaataattaggataagacatggatgaaacaaattgaatgtttatttctatccatgttataaatgagttgagacatcagtgaattgattaatagctgtgatacacctgccacaggctgttttgttttgcttttgttttgttcttaagtaaattatatcatttttctttttactctcaatttcatgaagttgattgccatgtggcggtcctttatagcagttaattgagaaggctctagcttgtcaatttaacatgcttaacttgtagcagatggttgcatttgcaacaagactgataagcaaccactgcaagcaggttttcattttattcttcatgtgactttagtataaaatgtataactttattatttaacataaaatgtgcagtttttaagctgctaggttaaatgagtttccaaaatatgaattcctttattagtttagctttaaaaattagtttatctgattaggctttccagtggtgtgctggtgcccactaatgcagccttgtgagagagctgatggttgaattttcaggatttttgtaaggtgattgttaaacacagccattcttaattatataaacttacaattaaataaattatatgaagacaaaaggtaatgaatatgcaaacatcactttctaattatgtggcaacattttactgttatctttgttcttgaggttatgcatacatatgcactacaggggtatgtattttatggaaataactacaatggagtaccactgtgcatctcttcacaacttcatgttacatggtagctccacattgtctacagtagtatatttacaccatggaaattgacaaacacaataagtcagcactctcagttacatatttatcagca

SEQ ID NO: 90181 - DNA, 1065 bp, Homo sapiens
gtttgatacataggtatacatgtgccatgttggtttgctgcacccatcaactcatttatattaggtatttctcctaatgctatccctcccccaacccccaactctgtgacaggcccgggagtgtgatgttccccgccctgtgtccaagtgatctcattgttcagttcccacctgtgagtgagaacatgcggtgtttggttttctgtctttgtgatagtttgctgagaatgatggtttccagcttcatccatgtccctgcaaaggatgtgaactcatccttttttatggctgcatagtattccatggtgtataaatgtttatttttaaaaacaactagtgtaatacactgttagctttgtttgtagtgttgttattccataggcttttgttctttgggttagttttgaatttttccccatacgtgatgtatgtactttaatatttatgagaaatgataactttgagtttatgtaaaaagatttttatggttagcacttcttgtcttgacattagtggaaactggaatgagagagttatttgaaaaaacatattccacatatttttagttttaacaacaatcacacagactacagaaaagaagactagaaaatgtggaaagccctggttaaaaaaaagatcaagaaaaactcgttaaagagtattccttcaatattgttaacatttcaaaagtatgccttataattttggtatgcactatattggggggcaatggaaatttttttttttaagtagcagctaaagattgttacaatgatagcttccacttcaatatcagtatgtgagtgtatgtgtttttcctaatgagaatataggagaaaatttgtctgcaagttgttaaatacttgtaacgaatatataatcaattacagttttgggttccggtaacatttgtgtgtgcgtgtgcacatgtctatacatataagatttttttatgtatatacaaaaacttctttattacaaacataatatgtgaatatatgcttattaaaaagaagctcaagttctccagaaatatatagtgtattataatcttgttccttttat

SEQ ID NO: 90182 - DNA, 1085 bp, Homo sapiens
ttactagaggaaaccaatgcgtgaaactaagcagatacaaggtcttgtatgtacttgctgacgtttcatccactttacagccaagttattccttgccagatcagcctgtgttacaggactgctactaagtgccgctcagtagtgccctaggcaagttggagagccatggagataaatagatggtaaaaattatagtgcattcccatcttctctttagaaattgttagccttccagagtgatccttttgtaaacatctgttctgaatattcagtttttcataagtatagtaggccagttgtctcaaataccagagttatgcaggtattttaatcccatatagctgtgttcttacttggggaactgaaaacatatcctttctttgactgccattaatataagcattgttttaattaatgaaaagaaggagaatgatactgtttttcttccttctctgtcattgcaacatgaatcttttctattattatttttaggtaacagtggttagattttcccttactgaaaaaagaaaaaaatgctgagtcgagatggataagcagggataaagaggaatagttggttgaaaaggctaggaagaatggacagacattcttttcacaatggataatttgtgtttcccaaaccttacatcaggaaaatacagcagcttatttatagacagatcattggactgaaagataaggaaataggtggaagttaactaaactattaagagaatggaaggaggaaaattatagtctttaaaatatctctgtattgtagagagtaatgttatgggtgatccaggaagaagtagggcagagggagttaacgtgcttgtgttctcaggggttgtcttctacacatgcagaaaagctgttccctgttaattaacatgctagtgtggtactccttacttgaacaaacccccagtttggagaattaacacaatagggggcatttcttgtttgtttttcgggcccaaggtcctcagtttaataaagacattctaaggcaggacacccccaggagcatagtgcaaggaaaggccagatctttctttgggtaagataagtctctattatat

SEQ ID NO: 90183 - DNA, 1050 bp, Homo sapiens
ataaatatatatagtatataaagttatgtctcccataacttgaagtccttgaagtcttttcatgttgaatttttctttcccaacctttgtaagtaaaatgcaaacaccttaggataagtttcttactgtgtttatgtcctttgtgtctgtcatgatgaattaactttaagagattatggttgtctcagccgtttgtttacttaatttatcatgattatgcttgtggcagaaagtaatataatatgtatctcctacaaactaagaaactgttagacaggagaatctttttcattctgtcttgttaaaaaaagtttcaatgaagtaaaaactaaaatagaaatgggattgtaaacagaagaaagatggatcttttggaaaaatcagtgttgctaatttaaaaatactttttaatattattttacaggaatgtttaggtgtccataatgtcactaaacccgtgtcttcactttgcaatggaattcattttctacttcatccaaaagttctgtatgaaatctctgtatttggcattcaagagcccgaaagtgaggtatgacattaaacatgagtgaaaatattacagtaacttagatactcagctaaatcaaggtgatattctaatatagtttagatagcatggtgagaaactaaaaagaaacctgtctttggtgcattggttcagttgaagtgttatttaaataaaaataaatgttacataaaatgtgggaataaaaatacaggacacacttgatttcaaaaaattcagatcagtttacttacatttttcatctaagatgtagagaactatacagtacaggtagtaagcagattatttcagttagggaaatttttactcaagggacaaatgtacattaaaggtaaaaaattagaaatattaaggaagaaaaacagaacagaatgtaagatgatgctgtggaagtacgaacatttgaaagaaagagatgttaattatagcatctttccacatgctataaaatgttccaggtgtgtcaggtgacctagcgggacatctcatttgactggtttatc

SEQ ID NO: 90184 - DNA, 1089 bp, Homo sapiens
tcaaaatgaataatccttggatttttatacatttgtttttggtatccatccagactattcacacacattgtttatttatctttaaagttttaattaataacttaaactgagagttttgtaacttttattactttgtacctttttcttatgtggatttttagaaaagactgtgtattggttaatttattttgaggacatcagcaaatttctatttagaacttagtgtctttattgcttttggaaagaataaattctgtgatgtgataatcattaactgagtaggggattttaaagacattttgggtttttaaaaatactctttaagacagaacctcctctgccctgaaacaaataagtgcttaggtgagtacttgctagtattggttatttttaataagatctcagtttgaggagttggagtaggaagaaatcccttccagtatgctttgcagtcttttgcttactaacttacttgcctcacatgtcttggttgttttaccttttcaccagctggaaatctgctcaggccagtccattactacaaggagaaagtcagaaggtgcttctccatatgttgtctcacccattgccacgagtgaaagctgaaacttaccactgctgtctggaaatcacgaaggtgaggttttgttttttcgtatgttttgtttttgagaacaaatagtagactctcttgttataccttcaaacttaatttacttgaccttttgtatgagatataagaactatatcccataaaagtagatgataattactagtcaattctggaaaatttgtactattaaattctcttaacttagtaagtccagcaattgaattgctttatttgaagttttattaagaattacatttatgttgtattaatgatggaaaaattataaggaaaattgatttccaggtattcaaaagtgatttctatgcccaggaaaccttttaggttgttgtggcctagattttatggttttaattctgttttttttaatgttattttttatttttcttttcttttgaaatatttatttttctgtcttcttaaatgataaaatatttcagcatagaatattaaatatt

SEQ ID NO: 90185 - DNA, 1052 bp, Homo sapiens
tcccaccttggcctcccaaaatgctaggattaaaggtgttagccaccgtgcctggccttgaacttgatatttatgatttttcttacttaccactgtagtttgttttttttcccctttccttttgccatgttagtaccactgtcttcttgttttctctgtgatagaattttgaattgtgtctttaagttgaagtatttctgtggcttttttttttttttgagacgaaatctcactctgtctcccaggctggagtgcagtggtgcagtcttggcgcactgcaagctccacctcccgcctcagcctctcaagtagctgggattacaggctcgtgccaccacaaccagctaattttttgtatttttagtagagacggggtttcgccatgttggccaggttagtcttgaactcctgacctcaagtgatctgcccgcctcggcctcccgaagtgctgggagccactgggtctggcctctgtggcattttgtgtggtcagttaatcacacatgtgttcaatgtcctgtgtgttcctagtggtcaggctgctacaagaggcaggtttataataaaataaatacattagccctacttttattaggggaggtagagctacaaagaagtaatcaaagaaccaggcaacttgattgtaactttaagcttactcagagttaaataatagaaagtctcatgtggcatttagctagggaattttcctacatttctccacctcggctgacatttttaggttgcttgatgagaaagtggacttaaacaaatgtaaacagtctcatggtctctgaatggtctaatttcttgaagctgcttagttagctgttgagaatatcattgcacatgaacttgacatttattgttccattctgcttcttttgtagggagagaagaatctcttagaattagtggagctggcagaccaagccttgcgtagcttttcctatcatcagcatttcccgctaataaaggaaatcatcagcatttgttcaaagatgtaatattttctttcttaatgtgattacgttattattggacacttaggg

SEQ ID NO: 90186 - DNA, 2418 bp, Homo sapiens
cctcctcccaatgcacatgaggtgatgttgctgattattttttatctaatggggtgatggatttgcactgaaacatcttcacttttagttctgatggcatgtgactaatgcttatatatgcaggacagctatcttagattaggggtgtaaattgtgattagtccattgggccatgtaaagattagctaatgacattagcatggggctttgagttgttgagatagcaagagtttcaaatacaagtacgcagggtgaaacattggaattcctttgtggtgaagcgagaaaaggaaattaatatttattgagtgctatatgccatatgctctgcttaatgcttgtttaattctcacagcagctgttatttttctgactagagtcagagagaactctcttaaactagaacacagtgcctttagagttagatccattaggatttactctcttagcacagtgtaaatcgcctttgctaatttctctttatcttcctaactcttcaggagtggaaccccaggactgacagtagccctcatgaaatatatcccatttgtgattgttaaatgccatctatttgttgatgcctgccaaatttatacttccagaccagacatataacctgaactctgaacttacctgtatccagtgtcctttttgatgtcttcacttgggtgacaataaatgtctccaactgaacatgtcccaaacttcattctttgtttccccttccaaatatgttcttcctatagtcttgcctgtctcggtaaatgtcaactttgttgttcaagttgatcgttgatcaggcaaaaaccttagagtcagccttgattcctttcttttgctcatatgtggatataatccctgagcaaaatttgtcatttctcccttgaatacctatacagaatctgaatacctgagttaagcccaccattctgtcctgcctggattactgcagtaaagtcctctgtctcttagcttccacttttgcacattaccatcagttctctacagaccaattttgatacttgtttaaaatgttccagtggctttcagcagaggacaattccttatgacgacccaaagccttaactgatctggcccaccactcctttctgactccatccctcagaaccagctccactggctttcttgctaccaaataatagtttttgtaattgctcttccctcttctataaatgctttccctcagatagccacgtggctcctgacccttccagggttctacttaaatgtcatcttattagcgaggccttcctctactactttggagaagtagcagttccctgcctccactccccattacttctctgttcctcttcatctttcctatcctgttttaaaacactttttagccacacctaacatcttaggaagtatatcgatttacactctactttcttcagtgggatgtgagcttcatgcgggcagaggttgtattttgctctctgctgggttcccaggactggagaggtacctggcatatagtggaggaacatagtaaggcctaattaatattcaccgagtgagtgaataataggtgagcagataattgagtttctctttttcctcccccgcccacaaaaaaaaggaaagttcttcacagaataatgaaatttctctttactttctaatagctgctgttttactaatctggaggtttgtcatgtctgtgtaatctaaaattttgatttctgtagtttctgatcttcatttagcaactatattcatttaaaggtatcgttgtttagctgattcagctcttagactttcaggtagttaatgattatccttgaaataggttatccatgaaataaatcatgaccaaacccacttttgtaaagacagcatttcagccgtaatagtgagtcttgtcaagagattttctctgaacgtcaaatttttagtcctttttattcctttaattgatatttagaatcctgtcacaaaactagaaccatttttttaaaaaccataattctttcagttttaaatctattgatttaaggttataatgtgtataatatttcatttgggcatattgattttatactaattaaggggctatcttctgtattttagaactatttaaaatattatattggatttccactatcccctctaaaagacaaaaccaaagaaaaaaattcgtttctgttcaaatcaatctatagctatacttgatttcgtgttattaatatgtcattaataagctctgtcatgttcagctatgggatggggaagtgttcttgtcttcagtttatcaggttattggggagatttgcgtacatgtacagaaaatacttagagaaaaaggcctcatgccttagttcaatagcagaggtatatacaaggtgcagggctcaaggagagaagaagttggtttggggaagaagaaagtag

SEQ ID NO: 90187 - DNA, 1254 bp, Homo sapiens
ctggggggtaattttgcttcccagaggatgtttggcaacgtcgggagccatttttgattgtcacacctggagtggtgctgctggcttctagtagatagaagccagaacagctcaccacaacaaagaatgttttagctcaagatgtcagaaaaccttgaggaagtgttaaggttgagaaaccctgatctagaagaacctttgcttggggttaaactctgctcctgagatgtgatcctttgggacctctattgaatgtccaaagtgatgattgatgactgtctactctgcctggttgaagactgagttttattgtcttgtgtgagccctgggagttgttcaatttaaatctcagtaatcatctttggcctgtatttacagagtatctacctataatctaagccacctaatctcagcatggtctgggtggaaacttgtttaggtctctgaaattctttctttgcatagctctcccacaattcctaaccatgtcagcttccacaggcatcttcatctcctaaagtcatcgagactgtcagactctttggatttctcttgcctgtgtttgctgtacagtaattgttttcaggtatagtaggactctcattgcttattttccttctctctggcatcacagtcctgcaatgacactatgccactttctagttgatttctggggaaggacaggagatgtccttgttattatttcatggccagaattggaagttttacgtaaagtttttaattatgtcatttaagcaactggcctatctgtgagttattaggagcttaaatgtacatttatctagagtgaaaattctggatcaactttagaataatcattcaaagtgtggagagttcaggataccttgttttttgctgtttgtatttcagtagagtagataattttagaaaatatggaattaaattttgttttttttgtaagaagtgttttgataagtaatattttgcatgagtaatcaacatgtgtacagtagtagccttaagaatgttatattacaacataatatttaagagatctatggaataccagagtatgtctccatgtaactggaaaacatatcttttttaacatttcaaaatatcataaatcatttgtcatttaatatctttcattttgaaattgtcatctgataaccttgccttccttgaagatttggcattctatctcttctgttaatgtgaattcctaatgtctggtcttccttcctctccctttcttccttcccctctccc

SEQ ID NO: 90188 - DNA, 1049 bp, Homo sapiens
ttattctcaaaatctatacattttcaacgtttgataaactcatcaggatataaataagataaccaagttttgccctttttactttatactggcaaagtaaaaatatatattccaagttaatggttctttaagtcccatgtctattttttgccacttggaggtgatggaggagaaagaagcaggaaggtatatatttggaaaacatttaaaatgtttttatcctgaggaaaactgtgtactcatactttttactcagtaagtgcttctactagctggaactatatattaattcatatactaataatgtgaaatgaagaaagatctgaactttggcatcataaagtacatatgtttatctgtctggtaagctgagaagaacagtcttagactttaatgattttgcatttaacctttccttaatttgctttaaaaagtcagattgataattataaagctatatcttggtacataaaaactaaatgttctcctgcccttttgtggtaaattatggcatgatttgtaactgttcaatatcgtaagagatttgtaagagaatttggtccagctcttctagtgaaaaaattaatctagatccttccaatctggtagtttgttttactttgattcattagaacttaacctttgggatgcggggtgggaaagtctcgtgtgaatgttcgtctcacacaggataatggaagtggagtctttgttattctgtctctgtggagaaaggaggttgctctggtgggtgtgactttgggaagtttttttgagtttaaggtgagtacaaatagtttctttagcaaatgttagcatgttcatttattcctttagttgctccagtccaagcttagcttcccaggcaactcctgtgtgggaaaatactaatttatgagaaggctcacgccttctagtactaagtagaaattattggaatacgttttctaaacctttctggtgctttgtcacatattacgtgtaaaatggatggtccctaaattcgaaaaattattttaatctatctcacagtacttgttagattattg

SEQ ID NO: 90189 - DNA, 1505 bp, Homo sapiens
acaatcgattgccaaattcaaggtcatgaagatttattttttccgctaagagctttatggctttagcttttatatttaggttgttgatccactttgaattaatttttatgtacagtatgaggtagccattcttggagagttttaagcagacgagtgcatgatctagtgtttttctgctttggtagtctctaatgttgtaactgaatgccattgactagaaggtcccatgtaatcaagtcagttagatataaacctaaatgtactaagtgaatacttatagaaaagtttgatctttgcttttgtttttacccctgtagaaggattcctactatcttaatttgttaatgtttttggaagaatgatacataaataccacatagtcagaagtctgtttctactaaagaataattttattttttctttgtttccccagacacagtttcccaaaattcttctttgtcttattgtcatgaagcaagaggtactcatcattcccagaatccttccccaggaagcagcagccctcggccttctgtggttgggcgcacaggccagcgacccagaggagatggccaggactgggatgcagcgtcctctaggtgactgctagcagtgtctctggggaaatgagaaatgccggttaacttgtgtgtgtgttaatttcagaaggagataattatttttctgtccttttttttttttttttttttgaaacattaacacaggtataggccttgtgttaaaccctggcttcatactttttttgaccatgatccacggtaaggacagataaatattacatcgcaactcagtgctcagtacttgaacatatgctctgtttatgtatatatatgtgtgtgtatgtgtcccccaaaacaaaatgttcacataatagtattctgatactatgtttgacacactgaactatattttcagttccgatttcattagaaaagaaatgattctgacccaataaattgtttttaccagctgcaaacggaatatgatcaagtttaaaagaatagctttaaatgatagatacattgttgatagtattttacacatatttttgtaagtcttataacaaatggataagtgtttactgttaaaaggaatggttggagaattttataaaataaggactccttcaaggtgaacaatttatggtatttgtttgtgtaaatacagatttttttcttttttttttttttttttttgagacaaggtctcactctcttgcctaggctggagtgcagtggcacgattatagccttgacttctgggctcaagtgatcctttcgcctcagcctcctgagtggctgggaccacagatgtgcactaccatacttggctaagccttttattttttgtagagatggggtctcactatgtttcccaggctggtctcgaactcctgggctcaagtgatcttcccatcttggcctcgtaaagtgctgagattacagacatgagtcaccatgcttggcccccagtgcttggcaccc

SEQ ID NO: 90190 - DNA, 1019 bp, Homo sapiens
ggaaaataaagaccaatttactagggctaagtccagattacaggtggatgccattaagtgatttttaataatgacatgaattctcttggaacaacatattcgagaggcaaagtgcacatgggaaagggttaggaggttgtatgatctctcagttttgagtcagtcccaaaggcagagatggcgataatttctaatgcatgcctgtagatagtgaatggtggatagtataatggaactgggctgagagaaggggtgtgatttttttggggtggggagtgaacaactgccaatcctaggtgggcagaagttgataggtgtcctctgtatgggataagaggggagtcctaatctgattcaccttgagtggggaagatcagtaaggactttaattcttagaatttgcctctgtacttttgttctgtctcatttcttaatttatttggcagatttcctagaattgtgtgctctttgacctcattgaactcgttttgcagacttgtgataatctctgagggtacagtgtttagtatgatgtcgttcctgctcttgagagggtctagtggggaatgcaaaatcaacaggcagttaacaatatcacaaataatggacaaacggaaggagcactgccctagagttgtttattggttagggaaaagatctaggaaggcttttctggagaagtgatatctcagctgagacccaaaagattgttaatggagtcattgtgtcagtaggctacttagaatctggaatagatgaactcttcttaaaaatgattaacgctatgttttgtagctctttaagaagtagtaaccacactttaatctggaacacctgtgaactattgaaggatgttatcatgcaagattttcctgctgagattttccttcaaaggccaaaaattgttcaggtcagtgccctctataattgttttagattttgaactagagaactttttgcaataaagcaaattttgcagagtaggagttcttgggaaggaactttgtactcatgttttt

SEQ ID NO: 90191 - DNA, 1871 bp, Homo sapiens
tctcggactttgtgtaaacttcgcggttcgcgtcccgaaggcaccagtggcctgcttctgaaaaaaactggtttattccgtcttcacgccgctcctgcccacagcataaataacgtagtctctttgcagtcgggaaataaaatagttttgtgccgttcgttgacaggtcatcagctggccgagatcagggagcgcgctctcaagagtattctctgcaagattgagcacaacttaatctgctacgctgatctcattcaggagaggcaactttttcttcatttgctggaatggttcaatttcccgtccgttccgatgaaggaagaggttctgaacctgttaagcagattggttaaggtagggtcattttgaaataaagaaaataatcagacgagtgacttgtttcttagtcatttaattgtagcgtttattgaaagttaaataattggggttaaaagtttttttaatcaaccagagatgtttaattttaattaatctgggtatatggttcatcttttatttgtgatactgaatcccacatggtctctgctgtgctcagaagtaacacagaacttcttttgagttttggtatgttctgtgtttttgagttatctttggaggttaatatttgtattctgtttttgttttctgacatttacatcttaaaaactagatatgtcagtatgaaagggagcactttaaaaataatgttacataaccgtgattcataaataccaatgttaagttgcttgcccatatgcttttagattggtattcttatgcctacctcaagagtagttagttatcggggtcagatatcaaagtgtaagtttaacctttcaaaactaaatcactgtacaatggtagaggaatcttaaactactttgacatcctgttgaccggttggggctgggaccataaggtgagtgtcagtggaaaaaagtaacccattaaaaaaataagagtagggattgataatgtgcatttctagcgttcagtgtgttggctcatctttcataaatgttatcaagtgttggatgtatgtctctataggtgtatgtgctcctcatggaagtgccttacttcggggcagagccatgaaggatttgtttttcagaaaaggaacatctgatataccaaaaataattttatgttttgattgctgtaagttatagagattttgatacagttattctcaagatcatcctcttcttattttagtatcccccagcagtccaacatttggttgacgttggtgcagtagagttcttatctaagcttcggtctaatgtggagccaaatctgcaggctgaaattgatggcattctggatggactttttcttcttccttcggaagttcctgcactatcttctgcctcataccaaaccaatcaaactggtaactctttggaatctgttaaatacaaatatattaattctaatggtaaattttaaggaaagggagattagatttttttaaaaaggatttctcccacctcccccaaacttatttttcttgtgttaacttacatgattttgacctttttcccctcctctactgttagtcaaaggatggtacatttgcattaattgctttttgggtcaggcctaaacgatgccagtgactttgcttttatgaggccagtttgacagattatttttttggcaataacaatgtatttttattgagcacatgagtgctcattgttcttagtgctttatatttgtatttttgaccttgttcgtcatattggagtataatgatatctgtcctagctcatgatcttgttgtggggaccaatcaaaacgacataatgcaagtatttttatatgctgcagtccatcatgatatacttgttaaaatccaagtcaaa

SEQ ID NO: 90192 - DNA, 1083 bp, Homo sapiens
agtaatagtaataattcctatttaaagtaattattactattaattcttttctgtgtccctgacacatcccagggggcctggccactgagtaggagtccgtttttcttgtcagttttttttgttgttgttctttggaggggagttccctcaatttttcttttattggatgtttactttttggctgtgggagttttgttttctaactgttctcctcaccccctcttttataatatataataatggtaataattcctatttaaagtaattattactattaatttaaaacataatctgactagtcaaaagtagtattctgattaatcagccacacctgtgttagacttgaatgtttttgttaaggaagcctaatgtgggaaaagtgtttgagaccaaaagagcaagagaaatggaaatgaaagcagtaagtgaatgggcgccttcagaaggattgctagtgcaagctgctagactggtaaggattacaggtggtcacagtgttagcagcaattgcctgacctggctgtggggtcattgcagttcattggtgggagaccgagaacaaaaaagatgccgcacttgccttctctgcagagccttctgctctgattatgtttgttctgatactgttttatcactcctaacagcgaacacactaaaatactttctaaaattgttaaaagggcatcacacttggagactggggagtgatgattatcttattttccatagcatcggactcttgagtatagagaagaaaagaaagaagacaggatatatctgaaggcctggaaggcaggcagtaatctgaacatcagtaagtcctaatggtgtcattatgccatcctgaaattttccagcagataaatttggtcatctggagaggcatccatttatatacagcagtttgtgacagtctgagattatacttaatatacacacttgtgcttaaaatacctttttgaagacaggaatgtatggctcctattagataagatttccatcaaaaacaatttcaatagttcagtgttaatctttagacaaggtatttttacccagcgctctgggtagctgattatttggtgc

SEQ ID NO: 90193 - DNA, 1034 bp, Homo sapiens
ttttcagttagttttacatgcatgttgcctttcacaagttagatatttttgctttagtagttcattacatttaagatattttaatatataaacaaattacttttaatcttaaagcaatgaagaaactattaaaacactttgctacagtacagaataaaaacaaaacatctttgttcataatttgtcaaattctgaaagaatcttacctacttggtagtttataattcatgaggtcattctttttcatagacaattaatgtggtgagatttttagggaatttgctatatttttagttaaaataattttgtttacattaaaatgttaaataattgttttttaatttgtcattgtcagctataatcatatataggtgaatggtattaaaagaactatatataagatagtattttacatttatcattctggaggtcaggatgtattatatatatatcagaaagtattacaatagctgtttctaagccaccaactgtaattataccttagccaataaggttgcagatgtggacatcattaaggatcttactagtagtaagttggggtgctgtcttttcagtgtgcaaatgatttccattatcaatgttgcccaggtctccactgatttagagttaagatacctatattaatttgttgaaaagtgtcatagttatttcataggagtctcaggcctgatacacacagtggtaaagataaaaggctgatttatttcttgtgatgtgtttccaacaccaacaaccacttcttcagtgtgaaaactgagtgtccaggctgggtgcggtggctcacacctgtaatcccaacactttgggaggccgaggtgggcggatcacttgaggtcaggagttcgagaccagcctgaccaacgtggcaaaaccccgtgtctactaaaaatacaaaaattagccaggcacggtggcacatgctgtaatcccagctacttgggaggctggaaggagaatcgcttgaacccgggaggtggagcttacagcgagccaagatcatgccattgcactcc

SEQ ID NO: 90194 - DNA, 1045 bp, Homo sapiens
agtggggaaattgttgggagattaagtgtgccagctgacggtgggggcccttgagcaaggtagcagaatggagtagatggaaacatggtgctgagtgggtagatgggagccgagtccaaggtcttctgatgtcgttccttttcttggtgaaataggaagttgggccatctgctgcgatattaaatgagggagtgttccaggggtaatgagagtgttccaggggtggagaaaagagagggaaggtgtgaaatggtaggccgggaaggagaagaatggaccagggaaaagtagtttgatttccagacagcattaaggacccacctgcgggtcatggccttgactacaaagtgagacccatcagaccagttctctttttctccagccttatttagctctatgggtgcaggcatgacataagcggagttgaatttactaatatggttttaccaagagagtttttcaggagagtagtggaagggaatagaagtatacacaaggaaatgattacagtgatgaattgtggaatataagctgagtaggaagggaagagggtcttgaaaagctggtaggcttatcactcttgtcatttagactttgaatattcaaagccggttcctaactgtatatatatatacaccagtataaaaaaaaaatttaagtcagatttgcaaaaagttattttgagcaggtaaagaggaggaggctgtctaggttctaccaaagccaaagaataatagtaaaaacaaaaagctacaaaaaaacccaatagtctcatcttttgatttattttttgtttggcagtcatggtataactgaaagccaagaaaaggccctgcatttttaatggatttactcaaccatttcctttaaaaaaaagtaagaacaaacaagctcacaggttttattcttataaaaacactgcatgttcattataggatgttttgaaaataatgtttacaaaagttctgccatccagttaacagttctgctgtactttgtggtccagttttcctccctattctttctatgtaattgaaccacatac

SEQ ID NO: 90195 - DNA, 1014 bp, Homo sapiens
ataatcttgggtaatggaacggagatctgcaacatatcttttaacaacacttttttctaaattatttctaaggttgtgctaattcttttggttgtgaaaagttgaatttttctgttgccttcgttttcatcttctagtttgtctattttaataaatggccttacattaaaaaattgtaaagaaatgtataccaccaatttagaaattgttgccttttctgtaattaaactcgggtacaaattggcataacatgaaaacctatggaactagaattattattaaagaaatattagatgatcatagcttcctgtgatagcatttttttgtgtgttacctatccttttggtaaaatgttttatctgtgatttctttagcttagtcaacattttcttgggtgaacttgattgtcaactaattttcataaatggactggattctcttgcaacattaatgtttataaaaagttttaaattgatttgaatagaaagaaaacattgttttaaagttggatttatatttttcttctatgtagttactataaaagtgtgctggatttgaccaatccttacccccactataaagagaacccgtgatgactttagtttaaaaattgtggaaattgtggagcaatttttctcacaatgtgagaaaaattctaaaccatattagataatgtggaagtcatattgtctatcatatatactgccatttaaaaataggtttttaaaatttagctaagtcttaagtaatttgccgttgctaataattttatctccttgagtcggttgttggggagagatgttatattcaataatttttagttattttgtaatgcagagtgtttattcatttcacagttctgcaatggatgtagtattttgggattgccctgtccagaaaattttcagctacacacctttaaaggaaaatgtttctatctcagatgaaacatgtaatttgggatggttcttcctttgtcacttaaaggaagagataggaaaagtctcttaccca

SEQ ID NO: 90196 - DNA, 1046 bp, Homo sapiens
tgccaccacgcccggctaatttttttgtatttttagtagagatggagtttctccatgttgaacaggctggtctcaaactcccgacttcaggtgatccgcccacctcagcctcccaaaatgctaggattacaggcatgagccaccgcacccggcctgagatattcttaaagtcctaagatatgatcagttctttacgtcttccaaatgtttatattaaatatatatatgaatatgttttaaaatacctgttaattacattattcaattcttgtaataataaacacttgcatagtattcactctgggccaggtgccgtttcagaaattttagataaattaactcttaagtgagagccctctgaggctggagctgttactactaccgcaataaacttaatcagtaaagttaaggcagtgagaagctaaatggcactgctagtaagtggcaaggcaagggtttacactcaggcagtgttatttatattctaaaggccatgtggcttatgtagactttatttcaagccacttacgttattttgaaagagttatagcatgccatattaacaaacaaaaagttttatttgctgacaaccctagctaactctcaatgcttaacatatttatgatatttctctcctctgctacttctagttactccatttttgcttactttgtagaagttgtttgacaatattgctgacatttaagtattcttgtatatttctttatattggtgatttccttatttcgttttttctcctttgctgcctttttattctaaaggtttaagagtcaaaaaatgactagattgccttaattacaatggtttgaatgagttagtttggttttctttttaaatctgtgttctctttatatcctagcctagtttctgggaggtgcaaggcactgagtgactcattgggacctgctgagtcattagagagagtgcctgagggacagaggccagactgcaacttaagctatctggaatcttacctctgctgtcttactggctgtctacatggggctacattttaactatggctt

SEQ ID NO: 90197 - DNA, 1029 bp, Homo sapiens
taatctcaagtatttggtccatgtttcacattttatttcttgtgttcaatcttaggagtttatttcaccagaaggtagaaattacatctggtctccctgacagacagagattgagaacttttgagaataattaggccatctggtgctataaatccaatggaaagttatgatcagtggatcatggcctaatctgctcttcatccattgcatctgaattatcttggcacaaaagaatgacaaggggctggatttttaaaggaaattgccacatctccccagtcattagcaggcaaaaggcatgcatgcatcagactgtgacaattagggaagacttattctcccctaaggcctattactttttgatactttttatcttaatggagaattgaaatgaacctaaattttttccaaaattgcagaaacatttgtttcaggaaaaaaaactccccaatagatggtgctggtgctgtgatttaaaccactgcatcattagtatgcaaaaaagctccagagagaggcctccgggaattcccttacatcaagttatagaaagacaagaatgtggctttatttttgctaaatgcaaattgacataattgtataatttgaaaacttcagaaatatttcttgatgttttgaggtcaagaaattactcctcgtttcattgttcatatctcaaatatctttgaaacataaatgcaaacacaattgaatgctgcaaaagatgagctgagaggccttccaagtttcttcctgcataccgcttcaagggtctattagtgaagctataatgtgaaggttatagtacaaagtataacagattcttgcttcatattgatgagaaaaaaaattgcagatgcaagaagcattttggcagaatgatgctgccactgatgttgacaatgagcacttaatatagctagacatgatactgagtgctgaacaattatctttccatttaatcattatgacaaccatacaaggtatactgttaccattttatagatgatgaatataatgttcaaaaag

SEQ ID NO: 90198 - DNA, 1250 bp, Homo sapiens
agcatgggtgcagagctgcagttcagagcctcagagaagcaggtttctcagaagaggggaggggtcggcctggtggtggcagtgaagacccaggaacacaggcacactgcttctcagggtgatgcggtgcctcacgctcggaagcgctgactggttgttggtgtgatttgtgtcacatctgtagccactgtactttaacttccatgaggagagggacaatatttgtgacacatttctctgagctcccagtgctaagtcctaaactgagccctgtgagagctcctgtgtatatttgagaatgaatattaagtgatgagacacacaaaagcccaagtataatctaggttatgaagtaggccatgaaaaaccaatgatagtattctggattttgatgccacacgcagcatttctagtgagttttacagagtcacgattttctgtgaaaatcaggtctgattggcctttttatccttgtcaatctgtgtttattttgcagagttgttccatgatggacgtaactcttttggatgaacatgggaaacccttttggtgtttcagttccccggtgtgcctgagatcgcctgccacaccctctgacagctctagcttcttgggacagacatacaacgtggactacgttgatgcggaaggaagagtgcacgtggagctggtgtggatcagagagaccgaagaataccttattgtcaacctggtcctttatcttagtatcgcaaaaatcaaccattggtttgggactgaatattagcagtaggtggcaaattattgttgttatttagttgtttatttttgactggctttgttcttggtgttgaaaattaaaataaagcaaatctgcagagtgctgtgcaatgcctttcatctcacattagaaattatgatttatgggtcatttttaagttaatgtttgaaggattcagttatattttaaaaacaaaaataacagtgaaacttcatataaaaagaagaaaaggtatttacttctcttccgcccttcgttaaaaatctaagaacttttacttaagcaaatgatcatgtgatcactctgtgtgtgtgtgtgtatgtgtgtgtaggggtgtgttcttacagataacggtttttctttttctttattggtaagaagctcaaatgagaaaatgtacttaaatattaatataaatttcattatattcactagaattagaaagtgctacattcttgacagtcagcagccatatcggtatttaataaag

SEQ ID NO: 90199 - DNA, 1147 bp, Homo sapiens
cttgtgtctgtgtgagaccgagtggtgctgcggctctccctgccacaagaggcctgtggcagcagggctagtgtgctgtgtgggtgcgagggctcctccgtgtggccaggctgccagtagctggcttggagctggcagcagagggccagggtttggcctccagctaggtgggcatgtgcacggactctcactcagttacaagcatgtgcagaggtgttggtttatttcatgtgagtttcttccactcctcttcatgttcgcctgctctccagccccttgtttctttgccatttctgcacctgctttcttcagctgtgtaattctagatatcggtttccaacactgttggcttacccacatcagaagaaccctttcctccttcagcgaccacctttccatcagtgacaggtggctatccaggctcgcctcagccagcttcccctgactcacctttgacatcacctttctgggcacttgttaatgtttctgcctctgggacacagatgcatcactctggcctcaagccagaggctgggattgctgtgcccatgttgccctcatcgctgaggccagggcttaccagggtgaggtatccttataaagtcgccgactgaacgtgcttggtttgtcatcttgcactggaagacagtgattgaaacaatcttatatcttttcaggaaatattgaaaatggacatgtgaagctcattgttatacatttaaaaaataacagagaacacctacctcttattggaaaagttggcctctcgtggaaaactgatatttttgatggctgtataaaggtaaaaacagaaccgttttcttttcttcaagtaacttgatttctatataataaaaagtctgtttatatatataaattatattgtcatatatgtatgatgtttcttttatagttctggatttattgttctggtttctgaaggttggtgcacattctgttagccattgacagccagtggattcactcatgagatgcttattgagtacctttcatttgtcactgagtatggtggagttggaggggcaggtagtctgcagcagcatttcagaacactgttgatcacagtcccctactctctcaaagcccctctgttttgtggaaagagagtggaactgaaggttggacc

SEQ ID NO: 90200 - DNA, 1029 bp, Homo sapiens
gggcgcctgtagtcccagctacttggggggctgaacccaggaggcagagcttgcagtgagttgagatcgcaccactgcactgcagcctgtgcgacagagtgagactccgtctaaaaacaaaacaaaacaaaacgctattcagtgcttactctgtaagacacaatagaaaatgtcaagggtatgaaaaacaagttatgggcctcagaggtaggagattgtttagctctttagcagcagaacctgagaagtgcaggtgatctccttatgaaattcttctttaatgtttttgagtttttttcagttatttttgtatatatcatgttattgtcttttttattgttgtaattccaaaaataggtgacttttcgttccatcttgatattatcaagtttcttgatattaattttttttctgtgtctagttcagattatactccccaagaatttataataggtaaagcattagaaacagtatactcctttctgagtggtaattacctagaaaagtcaaagcagataattcattatagcatatttattagtacttgttagtacatgttttcttggtttgtacatctgatgacttattatgaaagtgttacaaattagtgtttctcatttgatgaaatctaatcaattttaaatttcctggttgttttttcctgttttaaaactttttctatcccaggttataaagatattcttctttgtttttcctaccattgttatggtttcagcttttgcatttcggtttgttatctgtgttttgtgtaaattagaagataagttgatgttctttcccagtgtggatgtccagttgtttttgtaccatttgtgaaaagactttctttgctcatcaaatcattttgatgactttgtcaaaaatcaattgcttgtaaaagtgtaggtctatttctgaaccaatctattccattttattgatctgtgtgtcttttttttgttgttttgagacggagtctcactctgttgcccagactggagtgcagtggtgcgatctcggctcactgca

SEQ ID NO: 90201 - DNA, 1042 bp, Homo sapiens
ctgtacaaattgtttaggtacagggaccacccttactggttagggaatggtgggtgagaacactcctgaaatccaaatgcctagaccacatccaagggccaggctggcaagcagatcttcctaagaattgacagtatgaggcctgctgtgtgaactattttcagcatagctgtccatgagcactttgatgaggtgatggtgccaccctgtgaaagagaagacaggaaatagtccagttgtgtctttgaagtgtaaatagagcttgccaaagggcctgatcagcaatgcaaagtatgaagaaatgtatatttatttgatctttgtatcaggctaatgattaccaattttcagaagctgaaggaaaaatgttttgcatggtacagtatgttgtagtatttttatcagtattgagaggaagaggaatactaaagaatctaagggaggtaaatcttaaataacaaagtatgctgcttctatcatttgagtttttctaaaaatagactgtactttttagggcagttttaggttcacagcaaaactgggaggaaggtacagagatttcccatatagcttctgccccacaaaaccataacctctcccattattaatatcctgcactagagtggacaatgttgacatgtcataatcacacaaggtcctaccatagtttatggcagggtttactcttggtgttatatatttaatgagttttgacaaatattaatggtctgtattcactattacagtagtatacagagcagtttcactaccctaaaaatcctctgagcttcacctattcatccttccctcctccctaattcctggcaaccactagcctttttgctgtctccatactttttccttttttagaatatcatatggttggaatcatacagtattaaccttttcagaccagcgtctttcggttagtaataagcatttatgttttctccatgtcttttcatggcttgatagttaatttccttttagtgctgaataatatcacattgtctggatgtaccacagtttattcatctactga

SEQ ID NO: 90202 - DNA, 4813 bp, Homo sapiens
ccactgctggtcttccaccactgccttgattccttttctcttacaacccagaggaagggcatcagagttccccttctaaagtacatgactgtgtacttctctctggaaataaaaagcctcacaaattcaacgtctggcagagtactttctacttttgtacctagggtaggttacttggctacacaaataaaaatgaaatttgtgtttaggtacttagtgtctatgtcatcctctcattacaaggcaaacatcaggaacttgtgccatttctcatctgagatggcttataagacatagtttttgcagaataccaactgttctataaaaattgcttccaagacactaattatattactttcagttttaaaaatgtttattttgaaataattttacattgtacagagaactcctgtacagtctttatacagaatttattcatttataacattatttgccattaaaaaatcatttttctttctctttctctctctctctctctgtgtataatgttaatagaccccttgatgtttatacaacatgtgtgtgtgtatatacacatatatatatatatgtgtatatatgtgtatatacgcaggtcataaaatcgtcaaggggaatattaacattctgaatctcaaagtgccgggattacaagcatgagccaccacaccctggcctacctttatgtgatgtggtgtggtggctcatgtttgtacctagcaatttgaaaggctgaggcaggcagatcacttcagcccagaagttccagaccagcctgggcatcatggtgaaacccggcctctacaaaaaaatacaaaaattagctgggcatgattacatgcacctgtagtctcagctacttgagaggctgagggtgggaggatcgagagttccagggttcagtgagacatgattgtgaccctgcactccagcctgggcaacagagcaagaccctgtctcaaaaaaaaaaaaaaagaaatatgtatgtagaattctgtatgttgggatccatacgcatgtagaattatcccatcactctattcttgaggagttaggacctgttaggtgctaggtctgtctcagtggactgtctagaacttcagagaagagggctcgccattcactattgcaaacaaatacagcatagcgttgattaatttttatgtttgcattcctcatacttaaaatatgcccttaataatgatgaatacgataataatagggaaaatttttgagcactcattataggtttctgctaaatgtttcgtgttatttcacttccttttcacagcacgcctgagctgtgggtactttcacctccccatgttattgatgaggaatcagaaggtggtagagagtcaggtctgtgttctgtaaagctagtaggtggcacagtctgcactcaggtccgcgcgactccagagctgggtatgtcctgcttcctgtaatatgcttcctgtatatttttgccttttaaatgatgtgcttttagagtgtatcttcttgtgtgtgtgtgtgactgtcagtgtatttccaaagttttggcactgtaagtgtggtcagggtaggctgttgacttgctggagtaacatttaagccaattttgtgttaacgttaataaaccccttgatggttatatggttgttataacgcataagaggttaagttaaatgagggagaatgggaaactgagttaggaataattggccttttgtgattttccccccagtaaaaagatgacaaagtaggatttccaaggtggactcaaatatatttctacttcccatggttgcactactaggagtcagcagagggtgctgttgccatcagagtgtctttgtaacatttttaaaagtattatacaaatagaatgtcctctgtagtttttgagaaactctcttgtggtaccatgtggtatatttagtaaatttcagctatgtcattgcgtttgggtataaatcactttgcccccattttttaaaaaagcctttctccctatcaaggataaaatgttctgtcgtcacgtctgtggaatgtaggtggctctctgctctcttcatcctccgagagacctgtgaagcctggctcgacgctaaccaggcaggctgtagggagctgcaggaagtaaagggatgaggctgggtcttctggggttcatctattaacaaaccgttattgaatgcaggacatgggccacacagagggaagccctgcctccatgtgatccctgcctgatagggttagggacagagagaggcttggtaatccaggcacaagcatgagtggggaggggtggcatgagggatttctggaatgttctgaggaagggcacaccaggaggagctggggtggggatgaagtgaccagttgcagtgtccagacaggttactgggagggtccaggccgaggtagtagggttgagtggaaaggataaaacttcaactatgacataatttattaatagagccagaatttggtcattctgtatggacatttccaggattctatttttgaataagggattttatggatgctccaattaagtccaccaagtcattgcaatcctattaaaaaccccaatagaaatttattatcaaacttgcaaagtagcatctaaaaaatcactttggaaatgcacatatgcatatgaaatggctgagaaattttgtttcaaatttttaatgagaaagtataatcttttctatgtatacaggctacagaaaaacaatacaataaaaaatcatgtagccaccacagtatagaaatagaccagtaccacaaactttgaagcagcctgcatgtccccaacctgctctcatttgcttcttttcctgccagagggaaccaccattctgtctgttgtgttaattgttcccttgcttttccttttttttggtaattaaacatctttgtattgtgaaatgacacacagagaaatgcataagacagataattgtaaagaaaacacctgtgtgatcaccatccaggtcttaagttttgaaaatgaattgagagggggctggcttagcagatgttaaccactctgaaactacagtgaccaagaaagtacagtatcactaaagaaatagatacccaggagagtggagcaaaacatctttcacatcttttgcagttccagatttttctgtcaaattatttttgtgtacataaaccctttattcatattttaataaatcttagactcatagaaaaagtcatgagtagctatttaaattatacattatgcattatgatatatctatatatcagtgtatatcttcatcctttaaaagatacatatgtatttctttagaaagtatggaatgcgttgtgtagaataatttgccttatactggctaaaaggatctctagaattgaatatgtagggaatgcaaataatcaaaggattcgtgtttgttttcaggcagaacaatcccagtgaagtattcagagtgagttctggcaatttgatgtcatccacctcttggtcacgatattttctctgaacaaaatatcccttagttctattttcttaactctgtcccatgaactttggtacaaggtcctttgattttttttcagtgtctgttactaaaaacaaaccagaagaacccatttaactcttggtgcctgggattaggttctcaagtcacagagtgggaggaatatttccaaactgactcagtggtaaatgctcagaaataagcatcacctcattggctgaccagcaacatctcccagctcagccagtgctgcagtcatccattttgaggcaacagctcgtgtctcttagctttgagttctgacatgtctccagcgggctcagctcccaggccagtggacactaagttttgctctacttttcttcctctgttgtcctttcagatctgaggatgttctattttggcgtggttaggaggaccgtaggtcctctaattccataaaatattgctcatgcttctagacattatctccctcagtaagaagctgtgtctagggaaaggctttttgacctctcagcactacctgatagtgaataaaaaggatctgtgtcctttctttttttccttatgggtttatttgactgcttctccttggaactttgtcatactcctcctccaaggaactgggaagtgtcctttctttgtatttttatgtgttctgccactttgtcaagtcatggctatgtggaaaattttaaaaaggatctaatttcttttcaaagaaaaatgtatgatccctagacttgcacatattgttacctgcttctttgtgtattgccactaaaattaagttaaaaagaagtttagatgaagaagtattttgctatctgaattggatttatgagaggaaagagggaatgtgggtaaatagtgaaggaaatactgaaagagtgatttgtaaatgaaaacttaaggtgaacttgtaacagtgcctgtgggtttttctgtatagcttttgttttctattcttttggaaatgtaaatagatgacattggctccctaatttcagtgattcactaggaggactcccaggactcaggatatagttgcattattggttaagatttatgacagtgaaaggatacagaacaaagtcagccaagttaaaaagggcatggggtgaaatctgcaggaaaccagtgcaagctaagagtccttccccatggagtcaacacaaagtgctcttaattcctccaagaatgagttgtgaccagacatgtgaaatgttgtctatcattagacagctctaatgagagctcattagagactcagcaccccgggtttttactctgggcttgtcacataggca

SEQ ID NO: 90203 - DNA, 2294 bp, Homo sapiens
cagagttgtgagcactctggtggcttcgattgtcctctgcctggctactggagagtggcaccttcaaatttaccatttgggggtcacctatgcccatcagtgtcagctgtgaatctggggagaaatggaggtcagtccccaaatagtcgcattttctgctattcaacctcatggacaagtgaagaagttgaatctaatcattcccaccacgttggccaaatcaagcagttacttgcaagaggaacattgtgtcagtaaagttcagtatttgtagaattaatctggtatctgtgaaagtctttgaaaggaatttgaaacagcctggaactaactgcatagtttcacaactatcatatatatcttttgatatttcacaagctctaggctgtgagttcttttggtcctgtgtgctctgcatatttgggtgaattgtggtcctgctgtcaatatgaaatataagtcttattagatagtagtaacatattagcagtaataatgcattagcactgtggtgatcttatgtttgtaagaaagtgcctctatctgcaagatgaatgtgctgtgatcttcacaatgatcttgtgaaaaatgtaagcattttggttgaaatatgtattcttctcaattaacttttcagaaggaggaagaactggcttttgttatggcaaatcttcattttcatcaccttgtggagaggagcacattaggctcggctactatgtatgtatttatatgtgggtgtgttgaatttttgtacagtaaatataaagtattagaagttgatgccatcttaatatcctgagaatagctgcagagatattctgtttttaatcagtaaacacaaaccaacaggcacaattagctgtcgctaaaataattggattattcacgagtacatatttgctttatttattctgggtcaaggaatttgtacctagtaggttgttatttgtatgggtaggatagcttgattacttcaagatgccactactgtccttcaagttcttgctcttatgtgaattttcacatcttgtaaggcatgtagactcatggcccttgggctgaacctggcctgcggatgattctgtccggtctggacagtgtgtgtcttttaatgaatttgcgcgtctttaggtggcgcacaggcttcccatttcactacagctctcacccttttcctgtggacttagactcccttactcattttttttttttttaattacctgagaagctcctgagtatttttgagtttgtcaccttacgtagtcatgtttttcttgttgaataaaactttgtcttggctttgggtctgcctgggtgtttgtcctgcagatcggtattcagtgccttttcctgctgagcacttttgtcccctggacactgagaacaacacggagggcagagtggcttttatagagtggccatgctgggatcagctgcagaaacatgtgcacccgtgctgggcggtggctgcctacagaactcacatcattgcctgtttttatagaagttggtaaaagtaacattgagcagtcttttaagttcacagtattgaagattatagggaatcctatggagtttcatttgtaggaggtagtgctttgatacagatggtaattttttaaaaagtattttcaaaccaagaattttatccctggtgttgacaaatttgtatgtttcttttgttttgcttttcagcccctatgaactgcctccacatagcccctttttggatgatagccccgagtatggactgcacggctaccaactccatgttgatctgcacagcggtggggttttctacctatgtggtacatttcgcaatctcttcaccaagagaggtgaaattgattgagtttttatttcattatgaaattaaaggttgaggtgagggaaccaattttgatgtccgagttaagaattgccctcactggtcactttataatcttttggcaccagtatcctcccagacccgtgtgtcatcccagggcttgtgaaagtcctcactggaccgagtctcttcagaactggctctgtctccttcaccaccatcactctcaatgccaccttctgggggtagcccctactcatcttctctactgatgcttccttattatttttccatgctctctgctttccccagacttcttcccttctttcttaaaggaatgtggtaaatttgccagcagggcccgtgccgctccaggatgagagtaaagagaaaccagcctttctcctctacgtactgcatcactgtttgccacacctaccaaagccaggacagaggctggggc

SEQ ID NO: 90204 - DNA, 2928 bp, Homo sapiens
tgtgatatctgacattagtgcctgccatctctatggagggacagggttctttcatggtttccctggatacagacacttttttttttttttgcagctctgtaactggggaccttgtttttggctcctctccatggcgcctgctctttgagcattgttttagtgattactgagctctcttcccatgctctgaatgtaagactattcagacctcttggtgctggcaaatccaggttttattgtactctaaaaatattcttaatgttatgatgaaaaatgaattatttttcctaaatatattactgaagatactttggaaacagttaccttttaaaaaatggtacttttatttggataaatctttgaaatttcatacgggatcatgaaggaagccagctttttctaatgtagtaattaggctttatgcatttcaaaattacgtttggagaacaagtccacaaactgtactagttttgctaaacaatatgttacttggcatatcatgaaatgttacttacagatattaggacaaactggctaacattaattcaaatgatcctgaagaattaagttaaatggataatgttgaattataaagctcagttaaagacagtatttccctgaaatggtcatcaaggtcagaagtaatagatactacatagtgcccaatgctagaattcattgggaaaattcatttgatgtaatttatttctgtgaaacttccatggactccagccagcctttgatcaactgtgataaacaaaactaaaagtgttttttaggatttgttttgatcggcacttttattgcaagtttgtaagtgaatgctttcattgtgcaggaatataaatccttgtacgcatctgtgtgacagccaaaaagagcctttgtgatttttatttgggtcttttttgtttcctctatgagaagtttttcaacaacagtgaaagcctcattgatgtaatctggatttccctgtaatttatacctttctagtcagactccaaattttcttccttgccagcactttctgctctgcagcttgtgctgtcccaccctaaatttgtgagaactgctggggaaacgtcagccttagtttctgtgtctgtggctgtaaggccaagcacatgaggactcagcacattcccagagtctatttaataagtacctctacagccagattttcagagaagaaggtttctcacatccccacccagcctcctctatccacattaatgatactagcagggactgcgatttattgagcacctgccccatgccgtgtgctcttgtccccactcagcaggctggtgatttcatacacaaagaaccagcctgtgatagtcgcaaagtcactgtaggttgaagctaaggttttacctcaggtttctctgactccacagtgaggttcctgaccctgcatttatcctcctccaagtgtattctgcatatgctgggtttatttctaatttctacatcacacacgttcaccgaccgtctctccttacccagttgttgttctctgcacaagaagttattttgaagagctgaacatgggactagggtcatgtggcagctgcggatctggttttgatgcttcacagtcccttccactttgaagctggactgcagctggtgtcctttttaacttatttatttaatgtacctttgaattcctattgcctgctggcttgtgcctgaggtgctgggcaccaactgttgaatgagatgtggccccagctcctcagggatttcagtctaatgctgtgttagtgtctcctttatgaaaacactggtgatttagtttaagtttatttctgatgtgtcaactttcactatctctgagttatccttgatgataactgtgaaaggcccatctgctttccagccatctcctgagaccacccgttcttatgtcacttgaaatagtgtatctttgcttctgtgttgttttactcacttgactaggaatacacattgagagtctactttagattgtattgtgctggatttggagggaatagaacaggagacaatgctgccacttcatcactttcctggtccttcaacttcctcccggctgggtcattgagttgacagtaagagcaagacggaggggaagaaatacctagttggcttggaaatctgaatgtatccattttgccttttattcatttgtgtcctcaccctgccaacatgccacttagtttgagcacatcattaacatgctcttcaaacacatttgtgatacactaaagagaattgacaacactatggacaggaaagctcacttctctctctcctttccttggcataacgttcaaagactccgatggcattctttaattgcaaagtacaatctgagtcatttgaccatatctaccatgattggctgtgacagactcattcggatcttctgcctgcaccctggcctcctggtgggagtgtggaaggtaagacttgagtccctgtatgtactgtgtcatttccccatcacaataccacatttacttaccattatgtatgacttcaaatgtaaaatcctttaagcttttcactaactgcaatccattttaccatctcaccaacttcattttttcaagctaacatggccctctctgttccaccgaggctgctgtgctgttctgctatgatagacaactctgctatctgttgttctgctgttctgctatcatagacaacaacctcttcctgccttcatgttttccttcatgttattcctttcatgtcatgtggctttcccacttccaatcagtccacgttccttcttctcttcctttcatgctctttctctgacaacatttcccttactatgtgttcagcacgcttgtctcccaagcctgtttctgatcctgtaggtgcggcattgagtgaaatctgctcttcagggtcagctgtctacgatgttat

SEQ ID NO: 90205 - DNA, 1066 bp, Homo sapiens
caataataacagtataaaaaagaatacaaataaaaccagtacattatacataataacaacagtttgcacagcatttacattgtattaggtattataagtaatctcaagatgatttaaagaatacgggaggaggtgcataggttatatgcacatactatgccatttatataagggacttgaacgtccacagattttggtatcatggggttcctagaaccaatttcttgcggagacagagggataactagtaagtagcctaaagttttaatgaaaagcagaagtaacctacttatctgctatagtacaataagaatgttcaaggtctcttttctgggcagaacctttgtcttatttatatattgccagtacctggaaaatcatggatgttcagtgggtgttaggtgaggagaaaaagtctaaagagagtactattgttgaagtgaaaattatactgggcacattctgagaattttgactttggcttttaaggaactagatgctttagagaagatacatgaaattgcctttagcattttttttttttcaatgaggcaaacattgttagtttttttttctttctccagaatatttggtttaggttgggcaattatactgaaagaaaaaggtggaaaagaatatatcatggagcatgttgatctttccataaatgacacatcagttactgttatatggtatggcaaaaaatggccatgcctagcatcattgtcaaccttagatttatgtggcatgacaccagtttttaccgactggtataaaactcccaccaaacataggtaagtaccaatcagcagaactgttgagtgagagcatcttatatgtaaatattagttggcattacttttgtaattaaaaaataagagcagcgttttttaattttatcacatattaaatgtacattctgcattaatgcagaagaggaaaagagtgcattttatcacatttctgattaggtctaaatttaacttcctcgtatcttggggttgtctttaatggtaaagaatgatgttctagttaacaaaatttcctggatgattgatggctaacc

SEQ ID NO: 90206 - DNA, 1324 bp, Homo sapiens
ctggagcctaggagttctgggctgcagtgaaccctgatcatgccactgcattctagcctgagtaacagagcaagaccctatctctacaaaaataataataaaaaaatacacagtttcatgggggacattgaaatcctgcctgttgattcacagtgtatgaacgtgattaaaatgctgaggaagttagctcttccaacccttggctctatttatggtttatgtcatgagaattagaataaccagaacgtttcaataaagaaagtaattgaagatgagggtacagtttgcctcttgtacaggaggggtctctctacggccttctatttagagatgagcagccagttgttttctgggtaatctgcagattaagccctggtccactctggtgattttttttttctttttctgtttttgcagaatgccttcagaaatcttgctgaagatattttcctacttggatgctgtgagccttctgtgtactggatgtgtgagcaggcgcttttatcatctagccaatgacaagtaagcagaaatccaagtctctgttatgttttgatgacagtttgatggaagtcaggaaaactagtaactttttaaccatttttaagaatttaagagaattcaagagtatttttacacacaagtggaaatgtcaaatgctttaactatgaaattttcaaatatttgcatttatatgcttaaaggaatatactttgcatggaacaaaaaaatcaaacttgttattgctgtagctgttacagaatgcagcttcaggtctgttgccaggaggtcttcgctgtattccccacagaatcagacctaaccacagagtctcaagcagcactgcagggacctgctggctttgaccctagccgtgcattcgcagagcagaatgagtgctctctgctgatggccaagcagatcctaaagaaagagaaggaagagactaagttaggtgtacttagcttctcctcccaaacatgccaatcaagttaacttactctgtggggagagcgaaatggatagagagaggccaagactgtcctctcctagaggttgtacgcttggatgaagggagccaaaagagaggggttcacctgtggtcatctggtcttgcagggggtggatctaggaaggaaggggagaaacctctgcttctgtttgtcactataatcttagcctgcatctcagaattgtatcttggagggagagatggtggaatcctcctttcagtgaggatttcgtggcttacaacagaacatcttggctttttaggcccctctctcatttagcatcaaaagatcagacaaacatcattcctaca

SEQ ID NO: 90207 - DNA, 1194 bp, Homo sapiens
ttgcttaccatcaaggtttcactgtctcttcctcccttctccctgcctttcttccttccttccatcttttcttcttcccttcctttttttctttgcagaaattaagtttttcagtgagtaatctttggagtttatgaatcctttggaattttgtagaagggaatagataattcacctcatttggtaattacataatttgaatttcccacatttactttcagaaaggggccaggggtcaagctttctgcaggctctgctgccctgaggtgccatgccggaggtggacagcactgggagagctctttctcctgctgttctgggttcctggatgggtaagtagcagaagtagactgtcacttttgggggcctctaggcatggggttattagagaaagttatgatgctgtatataccaagttgctattttgagcttgctaagaataggattgtgtaggaagacagtacagcatggagcatttgatgagtcatgggcctgtcaccactatccttatgagatgaactttatgaaacgaaacttcaagaagtgacaagtaaattgaattttccttttattaaaacgttcttcaaaaatattcacttttgagttgataaagacccttgaaaaaggagaaagaaagaagattaaagtgtgttttcctgaaagctcaagagctctgttcatttctcagctttcaatatctgggagcccatttgccatggcaagattctgtgctgtgaccctcagcaccaagatccacagaagctttaaaaaattattatgtttaattgatgctcagaagtccatagatttgtactgtagtaacatttatggaacaccgattatatgctaagcctcatggggagcctgaaagcttgagatgatcacagagagacattttacactgcaggaagctaggcccacgtagtctgcatattgcagaactgtgtgattcagatataagttgcctgatttcaagttctgggcttttaatactgtatcacagcttgctcagctaacagtgtacatatctgtatacacatttcagtgtattttaaaaaaagccagaaaggatatttcattaaggacattaatttcagcttaaaaccctatgctctgggaataggctgttttacaggcatctgatatgagaaatggagcaaatattcctttggttagtccatccattaaatattt

SEQ ID NO: 90208 - DNA, 1305 bp, Homo sapiens
ataagtcatgcttttaaataattttagaatgtattacaaatttgtttactgtgttgactattgacagtaaacaaagtgtattataccttctaaagttatttatgtccttctggaacaccaggatgtgactttctttagatatagggtctctgcaggtataattagttaagatgaggtcatactggatgagggagggtcctaagtgcaatatgaatgatatccttataagaagaggcacagagacagatatgcctagagggaagattgctctgtgaagatgggggcagagattagagttatgctgacacaaactaagggacaccaaggatttctggcaaccaccagaaaaaggaatgatcctctctagagccttcagagggagcacggccctgttgacaacttgggttttggacatctggctactgagacataatacatttctgttgttctgagtcacccagtttgtgaaggtagtcttaggagacgaatgcaattaggaaatgatattttacttatgattactatgttaggaccatgttaatggagcctaagcttttctcctgtggaaatctgtgtttaaacaaaatttctaacagaagtacaaaaatatataacaggtagaattatctgattaaaggaggagagggtattgcaaaaatgtcccaattagcatttcttcctgtcctttctccctgtcttcctgccctgcagagcacagattgaaaaccattggctagaaagtcatataagaccaaaagtatattaagcaccttttactgaagctgggatggaaaggcatgtggagccagcatttttttttcctcggtgcatttttactcttacaggatctggaaaagtttaccttatgcaacttctttgttgagatgccagtggagcagctgatcactaatatttgtggagggcctaccctgtaccagctactgtgcttttttctagagagaaaaattcacaaagggaagaggaatttactctgtagctgcttggaagcatgtggagacttgtgcctgggaagcagggcagccaggtgccagtgggtgatttgagtgcgtgctgcatatcatgatgctgtcttgcggtaggctccaggctacactgtcacctggccagctgatgcctagggcaagggctcctttttcaccacttgtgtcatctaataggttgtgctcagagttgagggccatcctctgttaagaccagttgtgtgtggatttcatacttcagctttcaggggggttggttcattactttttcttccaagttcttaaggcatctctttttttgctc

SEQ ID NO: 90209 - DNA, 1122 bp, Homo sapiens
accttatgaaatccctctcattatatcgtgagctgttccctagctgtgtacccatcactgcagttagtttacagatggagggataatgccaagaatggtttacattcttgaggattatctttctgcttgtaagactccttgatttataaatagggaaagtcatgcatattttgccttctaataaaccaatggtctatgtttaagcacacaaagggagtctattacatactagttgaactacttgttttttccccctgaatctccagaactatgtcctgtgtcctctctaggtctccattacttccacttacctgttttcagaagcccagccctgttgcttagtgctgtgataatagttcttaattgaatacctataatgctagacataccacaagccttgtcacaaatagaatggtgacaatgcctgcaaaaattcttttatgtaggagaaaaagcaggaatttaaataggaaacttgaacttttaatcaatttgctgctattactaaaattagtctttacatagtgctctattagggggaagcagaatgatttttatatgatgaatcttttatcctttgtaagttgagtgaacttcctggattgatataattagagggcctgtcattatgcctggcatgggaacctgcatttcaagctgatttggaaatgtatgcattatttttggtaaagaaaagtccgctgctaaaaatagaatgattgactatggtcaaagcaggtggttattttaatatatcgctgtggaaaattagatgttgttaaggaatcagtgttcccttttaacacaaaatgtgaatatgtataaatatcacaaactgtaagaagtgtagcagaaagcgtattaagttggcttaatttgtacctgctgtaatttatttgatttgccagatatttaaaatgaagcacagtcattaggtttttaaaatattggacttattgaaagctatcagacaaaaacctgtcacttgaaaaaaagtgttttcaaactaaatttatcttgctaaatgtatcagtgtatgtctacacttaaccttgtagacgtatagattcgcataaaaacataaatagaacttgctgatttgttaattatgtggaccttaaa

SEQ ID NO: 90210 - DNA, 3400 bp, Homo sapiens
atgagcatattgtaaaatggcaggtgcataaaaatgaatacagaaaaagcaaacagtcttaagtcaaatgacagggccatggagggtggctaaatccccacctgagctcagatgccgggcttcttcagcaagctacagtttgagcaggttgtttgaagagcagggctgcttttttgagtttaggatagcaagtggaacttctcagcctgttaaatgttgacatttcagtgaatcctgaaactgaacattctatagcaaaggaaaaaacgattaggagagaaagcctaagttaaggcctcattcagtcaaagtgtgttacgtcagggagacgagtgtctgttatattttctatactccttaaatgttggaaatttttataattaaaaacatctaaaacaagcagtcaaaccaagaaactaactaaattaagcagggagataaagtaaaaaggggagatagattgcctggaggtctctctatcctgaatatcccaaaatttcaagaacacatcagaaattcctctacagacagttctcggggagaaggaacaaacacatcagaggggatacctcacactgaagccaccgcagataaacatggttctagacccctcccaatgcacatagcacttacatagatatggaatcaggatcttgtaagtgaaggtcacttttttccaaatccccagcaaatatttcaaataaaatagaatttcctttttttttttttttttctttaaggggcctcacacacgtatttgaatgtctctcattcactcccatgttcttttggcagtcagaagtatcagtgcaagtaagttctaaaggggatgagggcacttcatggctgccttctatggtccaggcttgtacctctcatcacactgccatcctaacaacccacacaacagggacacttgaccacgcacctgctagaaaaggtggggtgggtgcccaggtctacccaacttgggagtgtgtacttttcccgctatgtactaggcccttaattcatgaagcgcgaaatatgagacagattcctaaaactcacacaattttgaagaatgtatttaccatctggttccctatggccctcaaccattttcacatgcttatctcaagtcagattccaaagtatgcggagggcagctgctaatgacatatttgttagttttaattttattctgcagacattatgcagttctataatataaaatgaatacaatactaaaatctatttcctttatttacatggtgtaacatttccaataacaaacatttctaatcatgaaagatggtgttaaagcagaaatattgtcatgattgagtcaatgggagaacataaaatatgctgtatttcataatttttccgtaagaaaatgtctagtttgtttaaatgcaacaaatactgtattagattcactttataagccatacactccttcttgtctttcttttgaacacattctggaaggcagctgtgaagaacggagtagcgagtccacgccattcaacatccatcagaaaccctattttaatcatcttgggatcgattatcttcaatgataatagttcttctaggataagattcaatttctacaaatatatatcgaaaatcatattcaccacttcctgggttctgaaaaaaatgtagtgtttccaggtattattttcctttccagaacttaaataacaccgcgctcagaacctctgaccccacatcccatgattcccacacctctttcacttgcgcatacaccgttccttgcttccctggctcagagccctcaatgtagaatttcacacacgtgtgtttcagcccatcttttacatattcagtgaacctgtcgagaaaacgaaagatcagtctaagttcctttcatttaaaaatctccccagagcctcctctgaattcaagccacagtacctgacatgctgccggcgaccccgccttgtcacctccccatagcctttaacagactcaccaaagacaccgatcacctgcagaacaaggacagtgctttattttgtgttatttttttaagcttctaaagaaataatttttaacaaaccagatgattttaggaaaaaaaaatcagtaagcttaggaccttttcaaaaatgaccactcctggctcacgcctataatcccagcaatctgggaggccaagatgggtggatcacaaggtcaggagttcaagactagcctggccaactaggtgaaaccccgtctctactaaaaaatataaaaatcagctgggcatggtgatgcgcatctgtagtcccagctactcaggaagctgaggcaggagaatcgcttgaacccagtaggcagaggctgcagtgagccaagatcgtgccactgaactccagcctgggtgacagagcgagactccgtctcaaaacaaacaaacaaacaaacaaataaaaaaatgaccactccaataagaaaactgaaaaaagggttattatacaaaaatcatcccataaataatttaaacaaatatttcatgcacaaagattaaaataggtagctttatggtgtgacttgtagtttcaaagcaatgtaggttgacatgacgcagttcctgctcctcttacagaaaacaaacataacaacacagagttcagatgtttctctactaaccccttatggtttgaagataaaatgtatgaacatttttaatgaaatgtaattaattaatagcatctaatactaaaactatgagatcaaaaaatttttaaagttaccaaacacagtgaggaaaaagaaaacagataatgacatttaaaataaatcagagctacaggtgtgaatctactatttctaatgagaaaatccacatgaagtagaaatgtagtttttattgaattcaaaatgcaaatactgtggaaccctctaaaaaatataaatttgatattaaactaaaaaagtttgaccctcaactctacgaaatttatcttattttgtctgtttgtggagtatcttcagtatcacattttccaggataaaaagaagtaatatgtaagatgatattgcagaattgtatagcacaaacaaatagaacaatttactttaatctattaaacatataaatatcaacatccatcaagattttgtttttcaagcagacacagtacccagcaaagagaagggtaccccttaaaaaatgttgacaaaattgttaaagtttaattattatttgtagagttttttcaggcagcaaatgaagttacgacttcaataatatcccacttttgtatattcttgtggagttttttgttcaaaatgctgaaaaatctacgaaaggctgagtttgcgaataaaacagcaactcttcatctctttccagagatgcgtcctaacatttaatgaggttaccacccacaggtatttccgg

SEQ ID NO: 90211 - DNA, 1044 bp, Homo sapiens
atgatttttgtataataacccttttttcagttttcttattggagtggtcatttttttatttgtttgtttgtttgtttgttttgagacggagtctcgctctgtcacccaggctggagttcagtggcacgatcttggctcactgcagcctctgcctactgggttcaagcgattctcctgcctcagcttcctgagtagctgggactacagatgcgcatcaccatgcccagctgatttttatattttttagtagagacggggtttcacctagttggccaggctagtcttgaactcctgaccttgtgatccacccatcttggcctcccagattgctgggattataggcgtgagccaggagtggtcatttttgaaaaggtcctaagcttactgatttttttttcctaaaatcatctggtttgttaaaaattatttctttagaagcttaaaaaaataacacaaaataaagcactgtccttgttctgcaggtgatcggtgtctttggtgagtctgttaaaggctatggggaggtgacaaggcggggtcgccggcagcatgtcaggtactgtggcttgaattcagaggaggctctggggagatttttaaatgaaaggaacttagactgatctttcgttttctcgacaggttcactgaatatgtaaaagatgggctgaaacacacgtgtgtgaaattctacattgagggctctgagccagggaagcaaggaacggtgtatgcgcaagtgaaagaggtgtgggaatcatgggatgtggggtcagaggttctgagcgcggtgttatttaagttctggaaaggaaaataatacctggaaacactacatttttttcagaacccaggaagtggtgaatatgattttcgatatatatttgtagaaattgaatcttatcctagaagaactattatcattgaagataatcgatcccaagatgattaaaatagggtttctgatggatgttgaatggcgtggactcgctactccgttcttcacagctgccttccagaatgtgttcaaaagaaagacaagaagga

SEQ ID NO: 90212 - DNA, 1054 bp, Homo sapiens
catggttgtgtttaggacctgtttaaggcactagtctttattatagtctttattacagtctgagagagtatggagatgaggaaacagaggaggaggggggacagcagagagaggagggagggacatcagagacagagaagcaggagaaaaagggcacaaacggccaggcatggtggcttacgcctgtaatcccagcaccttgggaggccgagacagatggatcacctgaggtcaggagttcaagaccagcctggccaacatgctgaaaccccgtctctactaaaaatacaaaaaaattgctgggtgtggtggtgggcacttgtaatcaatcccagctacttgggaggctgaggcaggagaattgcttgaactcgagaggcagaggttgcagtgagccgagatcacgccattgcactccagcctgagcaataagagtgagactccgtctcaaaaaataaaaaaaaagaaaagagaaagggcacaaacaagggttgtaacttggggacactgaggcttgatgggcttccaatgagagttagccggaagctgcgtcatgctgtttccttgggacatgagcttctgtgtggagtcacctggattttgaagggttttgtgtcgtttaactgctcatcagagctctccacacactgaaacctcaattctcttgttgagacactagaagtctgcgggtgcccctcacacaggagaaatgcaagctgcccccttgaaaaacgtcctcagagttgcaaccacaggggccaagtcaagaacacttcaaagactggatgcaatccagccaagaggttggctccttccctcagccagatctcccatgtgctaccataaggagagcctcgcagagctgtggcaggtggtattggcatggatgagaaacttctgcatgggtcttagtgaatgcattggcattcctggatgaaatacattaaaaatgaaataaatccatattaataacaaataatgatacagtcacctttgatagagtaaaaatgaacacttttgtaatcctttgttatgaaaaataatgagcctatga

SEQ ID NO: 90213 - DNA, 2680 bp, Homo sapiens
aaaaaaaaaaaaaagatttctcagaagacttctttccctatagagtggaaatgtaggttacctaataatttctacaacgttcctgcaaccatgcctagaagaaaagctgcgtggaggtgacaccttcctccctctgcttcctggtcagcttagccctcatggtctcatgtccagcaccctgggcagtgaagtcagaagaggccatctgacctctggctgtgccgtacttcagagacggggtagctgatgttctctcacatgggaagcaatcagagggaaagacgagaaaggactctgataaggaaaatcataataatgaataaaggtggagggctgataatgataataaaagttacatgcagagtacactgtatgagaaaagatttcatagaataaagaaacgatttctcccttcagtgacaaatccggatcataacttttaaaacgtagtaaaactctaagacaaggttttaaaacagacatacagagtagctttactacttccccaaatagttctgctcaatataatttcaaacaaagtatttgaatgagatatttaaaaaatgcttcagagctagggatttatttcctttttgccacggaaatgattttgtcccaaagacagactctaattaagctaaaccctttaagtacactaaacaatttatcttcctttttgttctgaaaatacgttcaaatttgaaggctggtctcctataaattgtaatgaactctgacttcctatgaatacttcttcatgtcataatttctgtaaagaaccaaagactgttccaaagcccatttcaggtaagcagaaaaatcacatctgagatttctctcgggcaatgatgtcaaagggagttcatagcagcctctgtaaggggcattaaggtgaacagagacccaaattatattttgagtaggaaattatctgcactttcaaccttgagcaggcagtgactgcagctgtaacagactgacgaaccccttcggttcctcctaaccaaggctcctaatgtctcatcagatatcacagagcaccatactcatgaatatcatcatctctgcctttatggttttcaggaggaaaaaaagaaatggctctgccaatggcaaggttatttgtagtactttgttagttatagcccactctattctcagcacttaactcgcaatggcttttccacactcagagcacagtagaggctgagctagagacagctaaaccttgctgtcaccttcactggccactgtcctcgggcacacacggagcccagcagaagctgcattaaggacatctttcttcgctctcaccgggtagagtcaaataatttacctctgcagcaggttaaatgtcttcccaaagcggagccgccttctgtgtgcccacgtttattaaattaccacagatgtcgtgtgaacagatgggcgcacccctgagaggcgaggctgcgagggagagcggccgtgcagcgggggctctggagaaggagctgctcgccggcagtcctgcgaggcatctttcccattctcaccgctgcatgtttactgaatccttacaaaggcccttgtccccagaaaaaggacagcagaattagagagccgggaccagcagcaggaaaccctcggagaacaaagtggtggctgaagacataagatccgagcgtggaggtgtcctcctggccagctgttcccaatcaccatgtgactcgaggaattcactaaaaatgttaaactcttgggccgtcatggattaaagggtgctccctccccatatgtccatgtcctaatatccagaccctgtgaatgtgaccttatttggaaagggtcttttgagatgtaattaaatggatgatcttgagatgggtcatcctgtactaccagggtgaaccctaaatccaatgacagttgtccttagaagagaggtgatggagacacacccagagagaagaaggctctgcagcgagggagggaggcagaggttgcagggaggcacctgaagctgcagaggcgggagggactcttccctagaacctgcagagcaagcgctgccctgcggacaccttgctctcagacttttgtgctgcagagccgcgagcaataaacctcttcttgtaagccaggttgtggttggtcgttttggcagctgcaggagacaaacacagaccctgccctgggcctcctgaaatgcagttttaggaagctctaaagtgcttctgaggatcagataggccaggatgtaccctctgtgtcactgatcaggattagaggtttttgatgcctactgcacatcaaattacctgggaagctttaaaattacctgggatgtccaggctgcacctgcagaagtcctgactcaggcgacctggggtggatgattctcatcacaagacgtttgagatccacctaagatgctaacaagctaagatgtggatcctcttgtcccttgagtggaggggttggtttctgctgactccacagctgctgatgctggaggcggccactgtcctttgcctccatggctctgcccacattgcacactcccgttttcctgccctttctacacctgcttccaccttttcgtttaaactgaggcattattacagaacacccagatcatagatatacggcctgagttatgacagctgtgtgtatttgtacaaccccacggatgtccccc

SEQ ID NO: 90214 - DNA, 2565 bp, Homo sapiens
cccaggtgaacctaggaggccccaagcgcagctgctgtgtgctggcggggtctcctgacacctttgcctgtgatgatcacagtggcaagattaggtcagatggaccgagaaagtgagagacagaaggccttcaagtgaggctgcgggcagttcctagcccagagcccgcgaagaagacggtgatggaggctcgcagacctcatgaggtcagcctccctgcagggggatcagtgctgcgacagccatcccacccctgttcagtggccccaacggatgatagcgtttgcaatgaggcattttccctgggcgtgggtcatgtgcagggggcagaaaggagatttatatgaaattaagaagaggaatggacagagcctgatagaccgagactgcctcgtaggtgcaaacccttcatctgaagagcgtaaagacgctgagcccgcagggaacgaccgctctctgttgggcatcgcgctccacttcccgccttctaatttttcagtctttttatgactctctgccatctggtctcaaaagctgaagaacatttgtgtacagatgagaattttcctcaagcgaggcagaacagacagcagggtgtaaatattttatactttccaggatcattttctttcagaatattaagaattcatgccaacatttgagaatggatcgcgggaggaatgccgtgctgagtggaacgcttgccgtggacaaagatcgagagaaagagctggaatacattcagagctgagatttcacagggctgccacagcctttaattaaatgtggttgactcacctacccagtaacacacattttaaatgccccacacggattgctttttttaaaaaaacaatttttaaaaacaatttccaacttacaggaaaattgcaagtgcagtataaaaacccttttttcccacatcacctggaaataaactgctgatatgatgccacgttacttccacatcctttagtgtgtactttctacaaacgaggacattctcctacttggtgagccgaattgggcctcctgtgtgaaatttaaatgttgaatattgaagttctcccctctagtaccttacaatgtggctgtatttacagatagtgccttaaagaagaaattaagcaaaaatgagatcattaggatatgccctaatctaatctgatgggtgtccttaaaataagactagaaaacagtcatgcagagagggctgaccatgtgaggccacagtaagaagacggctttggtttaataacataacaaaatttatggtacagtagagaagtgtaaattgatctttgctccaaggatgtagccatcttaactgacaattctatgagttttacaattcttagggcaagtatgtgtgacttttttgctgccttcaagtataacaaggtcttgctaccttaaaatccttttcttgactctcccaaacactcctggggcctgtcccttctggttcctcctgttggttgcctaacttgtggagaaggtgatcttccggctggtgtggacttccgcccaccatcgctcatgtctctgcttcctctgctccatgaacgtgccccttacggtctccaggaacgccccctttgttcttcaattccggatgcctctgaagcagaagccactgctttcctgtcactgcccaatgccactcgtgttttggttcctgtgttagttgactgtggttgctgtaacatttgatcgggagctgggcggcttaacatggtagacatttattctcccacagttctggaggcaagaagtgtaaaatcaaggggttggcagaatgcttccctctggaggctgcaggccgggggatccttccttggctctttccagtttctgtggttccaggcacccttggtgtccctggcttgtggcagcatcaccccagtctccgccttcatcttcacgtggctatctttcatccgtgtgtccttttctgtctcttctaaggatgctcctgttggatttcgggcccctccaatgcagtatgatctcctctccagccttaccttgattacatctgcaaagatcctatttccaattaaggtcacattctgagattccaggagaacttgaattttcggggcaagatttgactcatggcagcgtctatgtggaggcttgtctctgatgcccgatgtctgtggccagtgctggattagggtgtctgtcagactgttgctctcgacccagtgtcacaccctgagtcatgccctttctcatggcttccagcactggatactccaagtatgtgtctgaatgacacacagttctcagtctccagtcctgaactgctcagaacccagtattgtcggctgccggtgccacatgccggcacacctgaccctggaatccagcatgtctgatgcaaacgtgtgttcactctgtccctccggcctcaccagccaagtccacatcccagctcctccactgtgtcagaggcatctttcactcttgcaactgtccgggctaagcttcttagtgtcatgtatgatgtggccatttgagaatttatggcaatgaaagagaaacagcaggccctatatt

SEQ ID NO: 90215 - DNA, 1135 bp, Homo sapiens
ctgccccagcctcccaagtagctgggattacaattagctactgccaccacgcccagctactttttgtattttttggtagaaggtttttactatgttggccaggctggtctcaaacttctgacctcaagtgatccgtctgccttggcctcccaaagtgctgggattacaggcgtgagccactgagcccagccaagtggggcatgagttttctcataaagccagcagggcagagtgattcctagtatagcagggcatgtgttacactcatgtcacttttagcaaatccacgttgccttttcagcaaaattcattacagagttaagaaaaacatgccctggtaattttctgttagaaggagcaaagattttgagtccaccacagtgcacatcatgtcagcatcattgctttttgtgtctttctagttggtggaccaactgggtgatccctgccatctctgcagtggccgtcgccttgatgtatcgcctatacatggcagaggactgaacacctcctcagaagtcagcgcaggaagagcctgctttggacacgggagaaaagaagccattgctaactacttcaactgacagaaaccttcacttgaaaacaatgattttaatatatctctttctttttcttccgacattagaaacaaaacaaaaagaactgtcctttctgcgctcaaatttttcgagtgtgcctttttattcatctactttattttgatgtttccttaatgtgtaatttacttattataagcatgatcttttaaaaatatatttggcttttaaagtatgcaccgtgtttgcctgtttggtgtataattgtctttaatgtttagaatctggttatttagaggattccttcaatgtgttactcatccagacccacagaggccatatgactggaggtgcgggaaataggtttgagtgtctcctttcacatcgtcacatctcattgagtaaccatgtattgtatgcttccgatatagtttctttttttcaaggaaattaagaaaggccagaaattatagtttaaggatttctaataattgtcctacttgaaatagatcttaaaaagaaagtagcggctgggcatcgtggctcacacctgtaagcccagcactttgggaggctga

SEQ ID NO: 90216 - DNA, 1045 bp, Homo sapiens
ttggaaaatcctcttgctgtagttatgaatactttttatagatgctaagattttaaaattgctggaatagataataaatttgcaattttatttttaaatgacttaccttttttcccctactgtgtcaggaaccttaaaggcggtgtttcaaggttggtgggtctcataactgctttgcttgcttttccctgaaaggggtctgtcttttcacgggagtttctctaacgtgctttgcagagtgatgcttgccttactgcaggccgctgattgttttgctaatgctttttatctttgctttgggaaactgcagatctgaagctgtcttatttatggcaacttctgtttgaggccctaatgcttatgttggtgtggaacatcaaaagaatgcttcttaacccattttcaagccccaaaaagttgatatttcactagaccttagcttttcagctgttggagaagtatgcgtttttccagaaccattgtccattcactttagtgctactcaaaagagctgctcccagaaagctctggaggataaaaacagggcttccttatctggggatttgctgttaggctgacagtgaccagctggtgacaagtgtgacgccgggcacagcagtcctgtgaggctggtctggtgtcttgctggttccgtctggtcagaattaaagcagccccccgggaaagttggcctagaatgtagaacttaaaatggcagtcctcttttttctttttggttcacatatatttaatgtaatttaggtacacttttttacatctgtcagatttgaatgaaataactgatgtttttattgaacattgtgttcatgcttttgaagaattaaactgctttttctaaaggtgacgtgggattgtgtgtatgtgaacatgaatgtctgttttcagtttctgcattatttagatgcctagcgtgtgcaagatattttatgtagcatattaattttgaatgtttttaaattattgaggttatgtccttaagtaaatataatgattaaaatgttttactctggaagaaaacaaagtt

SEQ ID NO: 90217 - DNA, 1034 bp, Homo sapiens
tgatacttgatcagcttgttagatgtagaaggtctcactgaagtttgagaatcacactaactttttaaagtagatttttgtttgtttgtttttgagacggaattttgctcttgtcacccaggctggagtgcaatggcgtgatctcggctcactgcaacatccacctgctgggttcaagcaattctcctgcctcagcctcccgagtagctgggattacaggtgcctgccaccatgcccagctaatttttgtatttttagtagagatggggtttcaccattgttggccaggcttgtcttgaactcctgacctcaggcattcgcctgcttcagcctcccaaaatgccgagattacaggtgtgagccacggcacccagcctaaagtagatgtttttactctcttcagagattttacagattaactaacttctgagtattttttaaacaactcttctttattgtgactttgcttcagtgagagcagaaccggaagaatgtgggacaagaacttgctggcctttttgagaggccataagcagatgaaatgaaaggaaatacatgagcatttttctggatgtatctttcttgtgcttttggtttagtggaagtaaagagtgtccttagggatttcttttgtcatgtgtctgtataaccatcggccgatctccaggttgaagaatgtacactgtggtctaaagttttgagatgttgcctgcttaaaatatctagttgaatagtgaaataaaatgcagtaaagattattagcttgaacctgccctaaggaaagcatagtgttaagttaccaaattaagatatttgtagacttagaaatcatgcattttaatctaacataaatgtttctatcacatttgcttacatagagaatattagtcgtagcaataccccttcttggttatagttttgaaagcattcttgtagaagttatttggtcctcacagtgtctccatgttagacctgccaagggaggtaggtacattgcagctgggaagtgttaagcacccggctcacagacgtgc

SEQ ID NO: 90218 - DNA, 1026 bp, Homo sapiens
ttttggtggtaggagatatgtactttgagggagtaagcttcattcatctgacaagtttatttgccccgatattttcatcccatacttcacaaaggcaaagtgtcttagggtcatcagggaggcctgccgttacacatgcctgatcccatccttgtttccagctgtgggtcaggtttcaggccctgactgtggcacttctgcttcacctgcccactgggcttccccctggccagcctttaaacacactgtatttttgacagcttcagcctgaagttgaaatagtttatgactctaaaactgggagactgcagggcttaactgaagatatcatacacgtaagagatacatgcacaatctcaaatggaatttgagaggacagaagggaagaatcagtcttcagctcctccctgaattacgtgtcgcaatctgagtctaataaatgtgtgtgcacatcagcatgtacagagagctgtcatgggtgctgttcgaaactttggaactctagatagaaaatatctcttggcacttaatctgctactaatttttgctgttaaatcagatggatcaaactttgtgtttaatagctaaatgttgaatctgaaatggtaattactgaattataattttaaaaagtctcaaagtcagcattttggaagtggtactttcatagatttttaaattccataatgtgccttatcttttcattgcaggatgacagaccaaagttaaacaagcctccggtaagtgtgaccatctcaagtatctctggatgttctcgttgtatttaatacttgtcaaactgaaggcagagggtttttatttacctgactgatgccagcacaggtctttctagataaatgaatatgtaacctactggctcagcaagtattttttatttacggaaacctgtcagtatgatttgttaggatggcgtgtgtgtaatttttttaaggctgtcagtaaactacttttttcatcataattatcaatatataccatttgaagagctactttttatggtagcac

SEQ ID NO: 90219 - DNA, 1516 bp, Homo sapiens
tcttccattcagttgtgcaaaccaaacattggctccagtggcacttcctgtctctcccaccatccttaccgtccggaagccctctcgtccactctgcctcacaccatgcacacccttgcacctgcagctgcccccaccctaccctctggagtggctgcagagaacagccttccctcaccctctcttgcccttttgtctgctgtccactctgaagcctgggttatattttaaaattaaatctgatcgcgttacctcccccacttagatccttaccatggcctctctcattgctcacaggacaaagatcagaatccttggagaggcgcaaaagcagcacacggcctggccctttctcctaccctggggccctgtgaggccttctctcccaggtcctgaattcgctgttccccgcccctgcaacaccttccccagacacctcttggcccttgttgactgcagctcccaccttgtggtacagctcagcagggcccgtcctgacccctttgtgtgggtgacattcctgtgtcatattcttcatggcactaaactctttcacctgaggacatttcctttcacttgcagtggcatggtcatagttattcatgtttcatctctccggctgtgaactccccgaggcgggagccgtcgctatcttggctccgactgtggctgccacgtggagacgttcatgtgtgtttgttgggtgaattaactcaagtgcataataacaaaaacaaatggaaatcttcctctggaaagacggaagaccgttagggtcagctcacgtggaaacagctttgcatctccatgcccatccccacttctgggtcctccttactgacccgcgacatcctctccccacctttctccctctctctgggcactacagctggtcacttcccacacatggtcgcatgagtagaggcttagcaaggagtgcgttatggaggacagatttctgctactgacttcgccgaagtggatccacagcttccatttggctcaggctctttgggagaatttcacttcttttgttacctctaatcttacctatgtgtaaccacacattttggtctttttcttaaatcttttagataatcatcagataagtttacttacctgttattctactactttctgccttgccttttcttcaggccacccccaagtgctataacctgcccaaaggttaggacataacaccgctgccacacgtttatctctgggcataaccacgatggcataaacaccagcattcccaatttttctttgtctcttcggaatgctgacaggcaaagaagagcattttctttagtctccaaatgtgtggctcacgcctgtaatcccaacactttgtgaggccgaggcaggtggattacctgaggtcaggagttcaagaccagcctgaccaatctggtgaaatcccgtctctactaaaaatacaaaaattagccgggtgtggtggcaggagcctgtagtcccagctactccagaggctgagacaggagaattgctt

SEQ ID NO: 90220 - DNA, 1013 bp, Homo sapiens
ttgtatgggaaagtggactccttattttcatttcagccacgtgtgcactctctcgctgttacttattactgaagtagggagcatttgggaactggagaatggcgtgcaaatgaagaaggccttctagggattggctgtgccatgtgaacagtcctgggcgtgccatccatggagcatgccaatattgcccagaagttttgggtcagcttcttttttgtgtgaccttggtggaaaccactgagctccatggtattaagtgggccacgtgtcttctcagcgaggttcttatgtaggtatgaaggaaggaagcctgttgtgatccccgggggagctgtgagtgtagagctggctctgaaagccttggcatctctcctgcaggaagaatcccaggagcaggtgaatcccacctgcattgagcattttttcagtttaaagcaaatccttactgctagagtatatttagaaagaggcagggccagggccgtggctaggccagcttcgtaggtgatgagctctgtgttggccatcagccttaagtgtgttgatttttcacagcaggtcactcagcagtgtttatctgaaaatactggcttggtgctattaattaaggatgaaatgaaaagcttgtttctgtgttagcattgtctaaaggactgtaaatagtgcttaattcattatggatatttggtgcccagtgaagaataatttaccaagtttgtaagaacagtattttcttcctttttaaactcttttatttcttaggaaaccagggctgtacctcttagatcattgaatagtgcagaggtgcaggaagtgccgtttattgggatgactggtgttgggcagaggggtgaccttaccctccagtcagtcactcagcacacaggggcttcttcccttgactgtcttcctagcaaagatgacctcgtctttccttgaagatattgataccattcagctaacacttcattttctgccatatttgtgttcctttcatttttgtgtgtacgtat

SEQ ID NO: 90221 - DNA, 1041 bp, Homo sapiens
gatttcctcatttttctgctcccctgaatagtagaagcctctgaaagggttgttaagcctggtctccaatccacctcctccattcccttttaaaccacacctgttcaccacagcttctcttgccaaggtctcccagggtgccttgtgtcagctctcagttctccaacacagtggctcagcagactctgacatagatgctcaccctcctgggttgccatcctctcctggttccctcctccctccacctcctgtctccttttcccacttctcttctgtccgacctccttattggagggcccccctggggcctgggcttttccgctttggcaggctcacacagtagcatggctttaatgtgctaatgaatcctggattgtcacatcctggccagaaagacctctgtcctgaactggctcttgtatccctgaggctacatcacagttagatgtccagtaggcttctcaccctaacgtgggaaacacacctgctccctctgcatgtccccatctcagcagatggcagttccattctcccagctgctcaggccaaaagcctgggggttgtgctcctctcttctcttgctctcatacccacatccagtccaccaggacattctgtgggcctaactttcataatgtcagaatctcaccaattttttaccatgtctactgctgctcccctggttggagcctccatcttctctcgcgtggtcccctcctgcccccgacagcatattctcaccataatagagtgacattttaaagtcagatggggtcagtccgtatactctgtttaaacccttcaagggctgattacactgccccattttaagacttaggatatggctgcagttgtcaggaaagtgtagttctggcagagggacacatacgtatgtccatgtagcagaatagagaggccagagatagactcgcacaaagatttccacctcattgttgacagagatggaaaagcaagtcgatagaggaaggatagccttttcagcacataattctggaacaactggacatcaataaccaaaaa

SEQ ID NO: 90222 - DNA, 1046 bp, Homo sapiens
gttcccaggctgcctccttattgtatagagggatcctaatatacggaatcctctttccttccatgtttttaggttcccacctgcaattacctccttatggtagatctttgtaagtgggattcttgggtgaaaggatgtacacttctacttttttttttttttttttttttgagatggggtcttgctgtgttgcccaggccgtggtgtgatctcagctcactgcagccttgacctcctgggctcaaccagtcctccctctggaatagctgggaccacaggcatgagccaccatgcccagctaatttttgtattttttgtagaaatgtagtctcttgttgcccaggctggtctcgaactcctaggctcaagtgatctgccccctttggcctcccagagtgctgggattacaggcatgagccactctaaattttgatggatgttaccagagcaccctggggtggcacaccagtgtgtgcatttctcggttcttaggagtggaggaacttggttgcgcctcattcacctcccttcctgaatttggctgtgtacttctgttaaaaagggaaatgtatggaataattttttatcccctttagcttataaattctcttaaaagtgaagctgtggcaagtaataccttgtctattctatgaaagaatttcattgtctgaaggctcaaagcatcagaaaagtgaccggaggcagcagctgactacatgggaaactgagtagcaggctcagagccatttctggagtctcaagagtgtcctttctagcaggttttgttgtagggacttgctctttgttattttcctttgaacatggctgcctacattgcatagaccagtgctttccaaggcttggggatagaggaacagagtatgggtgttgaaattcattgcccttaattctgaaaaacagaacattttaatcaagtgtgcttcctttcctattacccttggacctagttttcttgggaacatagtcttgagtgtatatagtaactgggtatctgtgccttttactgagttccaacatggggaccg

SEQ ID NO: 90223 - DNA, 1001 bp, Homo sapiens
tgctgccaataggaaactcccgcgattcgctgcctagttcgccgccctcacaagactggactctgcacaggccatccatgcccgctggtgcacctcgctctctcgcacgcttaacccgcggggacgcccccgacctcccacctcagccctcgccacagttagtcccgcccttccgcgcagactccgtggagtcctgtcacgctctccgcgcgctgcggcagccgggagattgtgaagggcacctccggcagccaattaacacccgcatactgggcgggaccacgcttgggcaggcggagggggtcgaccgaaggcggggacttttgagtgacaaggatgatggccaaccgtcggaggcccttctactgcgccccgcccctgagccggccgcccagcccccagtggggttcccggcgcggggaatgtcccgggtggagctggctgagtcgcgcgctctgctccacccgacggggctgtgtgtgctgggcctggctcgcggcgaaccgagatggcagagcagtcggacgaggccgtgaagtactacaccctagaggagattcagaagcacaaccacagcaagagcacctggctgatcctgcaccacaaggtgtacgatttgaccaaatttctggaagaggtgagttggggatgagcggcttggggcgcagggagcgtgggccgggtttgggggttcactggcatgacctgtctttcgcggcccggagtccgcatacctacgcctaggcgcgccccccgagttcgctcacctgcgcgtgtacgcctgggcgcgcttccgagtccgcacacctgcgcgtgcaagcctgggcgccccccaccgccccaagtccgcacacctgcgcgctcacacctgggagcgctccccgagtccgcacacctgctagtgtacacctgggcgctctcctcgagtccgcacacctgcgcgtgcacacctggggagcgctccctgagtccgcacacctgcgcgtgtacacctgggagcg

SEQ ID NO: 90224 - DNA, 1044 bp, Homo sapiens
tatcttagtaaaacttgtaccaaaaatcctagaaaatcattagaagaccttaaaggtaaatggcagggatacttaactgctgaagtttgcaaactaacttgtttgtatcatcccattctaaaacaatatcaaatattgtgtgctgacttggtattggaactctattggtaagataatttactacctttttttgctgtttatttttaaaggcctgattgctgagacactcagtcaggaaagtatgaatgattctaggcagcagtctctgttcttcatcacacttccagatttaaacaaactctgtgctgtcagaataatactgagtaataaggtggcagatactgagattaggactatacaaatgaagatgtgcaggtaaaaaaatacatcttataactaagacttttaaaactttgagacctataaaagctgttttagaggaattttctataaagcaaaatactcattcactcaacttgtgtttataattttaaaataaaggaagtcagattttgttttgaccaggtatattggattatatttaaggagggatttaaaatacttgcaatagaattatctcactgttgagtttttatatctgtgacctcttatgtgctttttaaaagtttaaaatctccacagacattcatgaattaaattcaggctcccagaaacttagaggtcctaattaatcaatatttatggaatacctactgttttccagtaggtatttccagtaggtggggcacttagagatcctataaacatcttagattagtatagtttcttaattctcaagtcagtatgagacactgtggagtatttctctaggatctgtctcaaaatatctgatcccacatagtcgttgaaaaacagcttaagagggccgggcgtggtggctcacacctgtaattccagtgctttgggaggccaaggtgagcggatcacgaggtcaggagttcgacaccagcctggccaacatggtgaaaccccatctctactaaaaataaaacaaattagctgggcatggtggcaggcacctgt

SEQ ID NO: 90225 - DNA, 1510 bp, Homo sapiens
aaaataagagttgtgacatacagggattgagaaggacttggagcactttaggggagacctgtcgggggaccatctgcccagcatgaatgagccagtcccatgaaacctggggttttggctgcagctctctgctctctgctgtggtgcccttgaggtgggagttgagactcaacatgtagggcagggcttagacactggaccaagttgaggactagctaaaactggaatggggttgaagcagctttccataagacataaccaccagtgtgccatgtcagtttaccattgccacggcaatacccgggagttactgcctttttctatggcaatgacctgacaaccccaaagttactgccttttacctggaaatttctccataaaccacctcttagtccacatgtaattaaaagtaggtataaatatgactgagcagtgacgtgacatgcagcccgcggtctgtacggacgcgccctcgcttcttcctctttctcgactccatcttcgcagtagtggcagctgggaccgcggttcagtcaccaatatgcagctctttgtccgcgcccaggagctacacacccttgaggtgactggccaggaaatggtcgcccagatcaaggctcatgtagcctcactggagggcattgccccggaagatcaagtcgtgctcctggcaggtgcaccgctggaggatgaggccactctgggccagtgcggcgtggaggccttgactgccctggaagtagcaggccgcatgcttggaggtaaagtccatggttccctggcccgtgctggaaaagtgagaggtcagactcctaaggtggccaaacaggagaagaagaagaagaagaggaagaagaagacaggtcaggctacgcggcggatgcagtacaaccggcgctttgtcaatgtcgtgcccacctttagcaagaagaagggacccaatgccaactcttaagtcctttgtaattctagctttctctaataaaaaaaaagccacttagttcagtcaaaaaaaaataataataaaataaataaataagactgcagaactgccttgaactgctaacctctgtctctgcaggaacagtcacgaagctgtcacactgctgcttcagttaagctgtttcctctggcttgcccttgaattctttcctgggcaaagccaagaacctcacaggataagccccactttggggctcacctactctgcatccccctcacaccaggctggcagtcagttcatggcctgggtttggaatccaggtgattgtaggcagcaggtcctaggacctgacccccagtgctcctcccctggcctcgtggccatgttatctctgactttctcagaatgcaggcagaccacactaggattcattccatctcccacggtctaggaaaacatttgaaagacaaagattaatgactagggttagggatccgggaaggaaggcgaaaaacaagaggaaagaatttgttggtgggtgtcagatggtatctggagcctgcagga

SEQ ID NO: 90226 - DNA, 1012 bp, Homo sapiens
ggcagggaatttcacagtgttcttttatacaatgtctggaatctatgaataacatcggtttttaagtcatgagttgatttttaactactaggtttaggccaggcaggcccgggtccggttttgggcctggcgccgggctgcctgtctttgatttcacttccttgttttttttttgtttgtttttaaacaggtactgagtgtaaaacaatatgagagggtctctctcttccctcagtacaaacagtttttaaaatctttaacccaaagcacacgtgatgggtctgtcctatttccaatcagcctgttcaactgcagcagccacagagggtgagcctggaatgtggcaacgttacgggagcctcttctccctcaaggacaccttttcagaatccctcgttgcttcttgtccacaaacagaaactcgcaaaatgggtggctatccagagtgtgtctgcgtggccggagaagagaggcgaaatcaggaggatgatggaagttgctgctgcagatgttaagcagttggggggctctgtggaactggtggatatcggaaaacaaaaggtaggaggcaacattctttgcattgcaggaccgtagacagattctgcctgaggggttgacaagacgccacaagttcttaaaagatcttttgcttcacataccccactcacctttaaaacaaaaaaggaagggcctgatttggatggtaagttctgtacgtgactgcttcagttggattggggcaaaggttttgtggcactcagcatttttctccaggaaggagaactgctgacagttactcaggactaagttaatgtaacagtcattctgagagaatggctgagattcccctcccagcaatccataagctttcaaactaggaagttacactttattcaagtccatttaaaaattataaagactccccccaacccccggctccccctcacacacagtgctgcgtccttgagccttatttttttattttttttatttttttgagacagagtct

SEQ ID NO: 90227 - DNA, 1030 bp, Homo sapiens
gtggccggcacctgtaatcccagctacttgggcggttgagacctaagaatcgcttgagcctgggaggcagaggttgcaatgagctgggatcacgccactgcgctccagcctgggtgacagagcaagattctgtctcaaaaaaaaaaaaaaaaaatttaccaaactgcctgcaattggcaaacatgtacatgtgctctggagtacaagaaagtaagaaagtaaatcttaattagtgactccattgaacagtgtgctcttaaactctacaatagaggttgattgataaggacagataaggaagctcaaggtcttttaataatctccaccttaagcactgaatttcttaaacaaaggctgtccttggttcctttcctctccatgctcagctccctgatggctcggagatcccgctccctcctattctgctcggcaggctgggctccgacccacagaagaagaccgtgtgcatttacgggcacctggatgtgcagcctgcagccctggaggacggctgggacagcgagcccttcaccctggtggagcgagacggtgagcgccgcgcgcctatgcgtgcccagaggaaaggcactgacttttggaaagtcattgctagtccgtttttctgtttccagtacagactgtttttattttattttatttattttattactttttaaaaatctttttttgagacagagtctcactctgtagctcaggctggagggcaatggcaagatctcaattcactgcaacctccgcctcccggggttcaagcgattctcctgcctcagcctccccagtagctgggattacgggcgcccatcaccacgcctggctagtttttttatttttagtagagacggggtttcaccatgctggccaggctggtcttgatctcctgacctcaagtgatcccccccacctcagcctcccaaagtgctgggattacaggcttgagccaccacgccgggcacagactgtttttaacgtaagctagaaatggaggtttcttacaggtgcctctgttgct

SEQ ID NO: 90228 - DNA, 1008 bp, Homo sapiens
gcccacgatccgagcttgacgtttactaccggggcactaggggaccaggattggtctctgggctgggcagtcagactgaagctgcacttgagaaccggggtgctgaattctgaaggcaagcagggctcagggcccccaagctgggatgggggatgctccccaggaagaaggcagagtgtgtctgggctcgggaggagtcaccccacacctgggtgttggctcacgacaccagccaacacaatgatgtgttcctctctaccaggtataactacatagagggaaccaagatgctggccgcgtacctgtatgaggtctcccagctgaaggactaggccaagccctctgtgtgccatctccaatgagaaggaatcctgccctcacctcacccttttccaacttgcccagggaagtggaggttccctctttcctttccctcttgtcaggtcatccatgactttagagaacagacacaagtgtatccagctgtccacgggtggagctacccgttgggcttatgagtgacctggagtgacagctgagtcaccctgggtaagttctcagagtggtcaggatggcttgacctgcagaagatacccaaggtccaaaagcacaaggtctgcggaaagttctggttgtcggccgggcaccacggctcacacctataatcgagcactttgggaggccaagacaggaggatcacttgaggccaggagtctgagacaagcctaggcaacaaaacaagactctgtctctacaaaaagtttaagaaatgagccagacatggtggtgtatgcctgtagtcccagccactcagaaggctgaggcaggaggatcgcttgagaccaagagtttgagcctgcggtgagctgtgaatgcaccacggcactcaagcctgggcaatgtagcaagatcctgtctctacaagaaattttttaaaaatgagccaagtgtggtggtgcatgcctgtagttccagctactcaggacactgacgtaggagggttgcttg

SEQ ID NO: 90229 - DNA, 1060 bp, Homo sapiens
cggggtgcagtggccgctgacctctgtcggttgcgctgggttttgagtagccatttatttcattggggagttttggaataggacatcccacatccgtggacacacatgtagaatacttttataagtaattacagtcttaatagtgatttgagttacagctttgcagtctatgcctggtgacatcctagtcgtagtatgtatctgttttgtggtgaagtgctggtccatttagaacactgtagacaggggccctaacatatactcatcagaaccttattaagaagagcttatatgtcatttggcatactcactgtgcttcatttagtacagcaatcttgtgtagtaggaattattccctttttacaaactgagactcactttgctatatacaaaattactgctactggtacaaggtaaagctttcttcttgcgtgacatgtaaggcaggtgtgataattgctcacaacacagttgctactggtgcatttttttttaaactttatttcggaataaattaagatttacagaaaagttgcaaacaataggacagttccattggtaccttttaagcagagcaaagtggctccacttcaaaaacactggttcttgctttatgccaaacacccttctaggtgttggaaatagtaatatacttccctagaggattttgagatctggttgaatagacacataaataaatatatataatacctttttctgcttactaaaatagagatgtgggagcacagtggaagttacggctgattgatggtggggagtggtgaaagcttcttgcaggatatgtgatttgagataggtctcaaggactagtgggtattcacctggttgaagggacattttccccaacattcattccgattaggtttgttttattagagtagaactcgctaatcttaataaaatatactctcctagtttgattcttctctttctcatctcctttaagaaggtggtttgtatcccagatagtgagaagaagcctagtttctaaatctatgaataggcgaataaattaagctgtatgtttctaattgatagt

SEQ ID NO: 90230 - DNA, 1048 bp, Homo sapiens
atgtcttgcgtcttgaaaagttaatcttcctaaagcagggctgtgtctcagtgactccctactggcaccaatgaataaaatccagctcttaatatggagccttctgtgatctggacctggtcgaccagctgccagttttctaagtcagtctgtggtagaaagccagtgccgtggccctctggatggctgagagctttcttacgtgctcgtggtttgtgttttagggctttgccagatcgctgccttctccttgagatatttaactgttcctacttgccccctcaacaaacgacaaacagttttaatttcctcaaggttaggctcaaatgatatttttgctatctgagttaaatattctgcttgggagtatgattccttgctcacgtatactctgtagatcttagtttgcattgtgcacatgatcatgtatggccttgtattgaggtccttggtgtgtatgtcatgtggcccccacagaatcttaccccaatgcatgagtacatttgtatgactacagttcctttcatgtggtagcattcaatatttatttgttgaatgtttgttgttatttcttgatatagtgagatattgggttatttcattaatttagaaattcagttgtgaaataacaaatgtggaaacttttttccttttgttttagaattcttggagccattatttagaagattaaggctctcattattttgcttcttagttgtcattctttttgtctgtaaaaatatgagtcagatgccctcaacagagtgttcgctctaagcaaatgtgtgtgtgtgtgtgtgtgtgcctgtgtatgtgcgtacgtatgtatgtcttccctaagtaatgtggtggtgtgtgttccctttatgtatttggaaagtggaactcctgctggtgcctagtgaaagggacagtcgtgcactgcagcagtgtttgcagatgaagacgtggtagactgggcatggaaagggagttcctgctgttttagactaagcattaaaatgtttttaagcagaacttctgttacagattttttaaacattgtatc

SEQ ID NO: 90231 - DNA, 1825 bp, Homo sapiens
gaaatcactttttctaccaaagataccatagtatttcttctggagtcaacaatagggtgacatggtgttcctaaaatcctacttcatactttttgataaaagactttagacatgtaatcaaattcatctcagtataaagggtgtttcattggggctaacttcatgatactttttcatctagttttagactaatacgtgtgtctttatattcaagatttaataccatgtttgtttacttcacaggttatgagtgccagtgagccgccttagatagaagcatcgtcagcactttattaatgatggatagtgagaataaacccgaaaatgatgaggatgaaaagataaacaaagaagcacaagacttgacaaagctttcatcccataatgaagacggtgggcctgtatctgatgtgatagcaagtttccctgagaattctatgggcaaaagaggtttttcagaatcatcgaactctgatagtgttgttataggagaagacagaaataaacatgcttccaaacgcaggaaattagatgaggcagagccccttaaatctggaaagcaaggtatttgtagattagaaacttctgagagctcagtcacagaagggggtattgcattagatgaaacagggaaggagacctttctgagtgactgcacagttggaggcacatgtctcccaaatgccctctccccttcttgcaattttagcactattgatgttgtttctctgaaaacagacactgaaaaaacatctgctcaggaaatggtttcccttgatctggaaagagaatctcctttccccccgaaagaaattagtgttagttgtaccattgggaatgtagatacagttctcaaatgcagcatctgtgggcatttgttttcttcttgctctgacttggaaaaacatgctgagtctcacatgcagcagcctaaggaacatacctgttgtcactgcagccacaaagcagagagcagctcagcactacatatgcatatcaaacaagcacatgggccacagaaggtcttttcctgtgatctttgtggttttcagtgttcagaagaaaacttgttgaatgcacattatcttggcaaaacacatctccgtcgtcagaatctggctgctcgtggaggatttgtacagatcttaacaaaacaaccttttcctaaaaaatcacgtacaatggcaacaaaaaatgttcactcaaaaccaagaacttctaaatcaatagcaaagaatagtgattcaaaaggattacgaaatgtgggaagcacgtttaaagatttcagaggaagtatttctaaacaaagtggtagtagcagtgagcttcttgttgaaatgatgccttccagaaatactttgtcacaggaagtagagattgttgaagaacatgttacttcccttggtctagctcagaatcctgaaaaccagagtagaaagctagacaccttagtaacctcagagggtctcttagagaaattggaatctacaaaaaatacccttcaggcagcacacggtaacagtgtaacctcgaggccaagacctgagcgaaatattctcgtgttgggtaatagctttcgtcgacgaagcagcactttcaccttgaagggccaggcaaagaaaaggtttaatcttttaggaattaaaagaggtacaagtgaaactcagaggatgtatatgaaacacttgagaacacagatgaaaacacacgatgcagaatcagtgctgaaacacctggaagcgtgcagcagtgtgcagagagtgtgtgtgactacctcagaaacccaggaggcagagcagggccaggggagtgcccgtcctccgga

SEQ ID NO: 90232 - DNA, 1983 bp, Homo sapiens
acaaaagagtttgagttttattgcatggcatgcgattactacgcggtgactcgtcgcgagatgaccaggcatgcagcaacagagaagcacaaaatgaaaaggcagtcttatctcaactctgctaatgtagaagctggttctgcagacatgtccaaaaacatcattatgcctgaagaagagcatcaacaaaattctgaggaatttcaaataatttcaggtcaaccatctgatactcttaaatctagaaatgctgcagattgctctattttaaatgagaatactaatttagatatgtctaaagtgctctgcgctgctgactctgtagaagttgagactgaagaagaatctaatttcaatgaagaccattccttttgtgagactttccaacaggctcctgtcaaggataaagttaggaaacctgaggagatgatgtcacttactatgtcctcaaactatggctccccaagcagatttcaaaatgaaaattcaggaagctctgccttaaattgtgagacagcaaagaaaaaccatgagatatcgaatgatgcaggtgagctgcgtgtccattgtgagggtgaaggaggaaacgcaggagacggtggaggtgttgtcccccacagacacctgtgccctgtgacgctcgatggggagcgctcggctgaaagccctgtgctcgttgtgacaagaataaccagagaacagggaaatctggagagcgggggtcagaacagagttgcacgtgggcatggtttggaagacttgaaaggtgtccaagaagatcccgttctggggaataaggaaattctgatgaattcacaacatgaaacagaatttattttggaggaggatggcccagcttctgatagcacagttgaaagtagtgatgtctatgaaactataattagtattgatgataaagggcaggccatgtacagttttggtcgatttgactcctccataataagaataaagaaccctgaagatggtgagttgatagaccagtctgaagagggcttgatagcaacgggagtgagaattagtgagctgcccttgaaagactgtgctcaaggtgtgaaaaagaagaaatctgagggcagttccattggtgagtctacacgaattcgctgtgatgattgtggcttcttagcagatggactgagtggactgaatgttcacatagccatgaagcatcctacaaaagagaagcacttccattgtttactctgtggaaagtcgttctataccgaaagcaaccttcaccagcatctggctagtgccggccacatgagaaatgagcaggccagtgtggaggagcttccggagggaggggccacctttaaatgtgtcaagtgcacagagccctttgattctgaacagaatttatttttacatattaaaggacagcatgaggaattgctgcgggaggtgaataagtatatagtggaagacactgagcaaatcaaccgcgagagggaggaaaaccagggaaacgtctgcaagtattgtgggaagatgtgtcgaagcagcaactcgatggccttcctggcacacattcgcactcacacaggtatgtagctctgcagcaagccaagtcagtgaggacatggggccatttgttcccatccagatatgcagccctacctgtggctgctcattggctttccacccggttcacatttcactgccgtgtgctgctctgcttgtctgcaataagtcattgttgacacttaacatttttaagggtaattaagccctagtgatttcaaaggcaggttagctgacaagtttcttttaattttgtcaaaaagcctagtccctctgatgccttttaaaaactgctgtctgttggcggcttttcagttgtttctgagtcctaattatttgattttccaaagtctgtattaagtggcaccttataatttcagaagacatgttaagtgacttttaaggaatggagtaatcaaattttcttacaatatcagg

SEQ ID NO: 90233 - DNA, 1094 bp, Homo sapiens
gtgagtaaattcaaagccggagaaatatgaggaaacaaggaggtggccacagagaaatgtatttgatgataaatatgcttttaaaaatatcagctgccctgagtgcatttatgttttaaaaatgttttctttgaagtgttgagtgactttaagatgtatttttgtgaattataagaaaaatatttaaaattatgtagctcatctcatcgacttagtactgctcagcagtctcacttttgagtttgaatcttaggattgttagtggaagttaggaagactcactgaaacaaagtcttcagagtaaaataattatggaatcaggtctattcaagttataaatgaatgcaagtattccattttgggtacagaaattcttaattaggttaaaggtatgatttaagatttagtcctcttttctaagctattggtgatgtattattcaaaatcaaatcatattttatgttaaatttactcaggatcaaaaccattcaagtgcaagatatgccattttgcaacagctcagcttggagatgccagaaaccatgtgaaaaggcaccttgggatgagggaatacaagtgtcatgtctgtgggtgagtaaattgaagccatctctgctgcgtgaaccaggaagcatgtgcaggatagccattgtttcggaattcaaaaccgataggagtaagagtggctaaaattatgcatgcgtaccctcctttccattgttatggtaaattccttaaatacagttatgacattcttctcccacttctaatcctgtactgaagatgagcaattttatgggctacaaggtcaatttgaacctgtaatctgtaaattgactaaattataggatgttcattcacattgccagagagaactataaattccatttaaagacatacaaaaatacataatatagctttaggaatgtatatgtatttttttttcttttgctgtactgcttcaatttttatcacagtagtagctctttggatccattggacttattctgtaaggaaagcaacaaaagatttaatttcagatggctggttactgattattacagggatgatgctgaagagaactgttgttatgc

SEQ ID NO: 90234 - DNA, 1027 bp, Homo sapiens
agcacttttatgaaccatggtctgtggaattgatggttcagtgacttgcagctaaagtagatgaagatgaccctttgccctaaagtcccctgaagatgagtgggagaatgagttttgttgctactgattttagctgcaagggtcaggtgtcaaatggttcattttaattgctgcaggtcttggaagtttaaaagatatctcatctattgtttttaccatatgagttataggaaaggagaaggccctgactccagtgaaaatttgctattaggtggcagtaagcagtttttctctcatttctgagaagtaagtaaacaatttttgcatactgttgtcaatagagatctaattccatttattttttaattagggttactaagaccctagaaagagaagaagaaagcttttcacagaacagtttctaatgtgtctggtatcaaaaagaatacacaattgatcggcattagttgtataatttgaacagtgcccaccctgctcgctaactgcttacctcatacaactgaaatactgtatgagtagttcatatatttgatcctggagatacagaattgtacatgattatacatatatcgagttttatactgtcttcagagagagagctatgtgtatgtgtgcgtttgtagaacaagcattctagagtccagaattgtattttttagaattatgacagcattgaatttcatcagactaggaaataattgttctctttgtatttttacaatgaaatttgatttaaaagttaggtagcaataattttaacagtgacgctgagagttctgaagaattgcagtaaactgaagagtacttactgatctttgtagttggaacagaatggtagtgaattaggtacccttcagtgttgcagaaaaagtatcataggttgttccctatttcatgtgtttcaaagggatagggcagtgtgtaggttaaaaattaaagtaaaaaacataaaaaagtgcaaggattggttatcagattactggcactagagagtatttatacattg

SEQ ID NO: 90235 - DNA, 4147 bp, Homo sapiens
gtagttaatatcttagtctctgccttttagaattttcttaatgagctcttcattatttgagttttaaggagttatttctcaaatagtcttgattaataatataaaaaaattgggcagtcacatttttaaagtgaaattattactcagaatactgtactctttttcttagtaacctcttggttttcttgaagaagaaaactaatactttatggtgaaattgatggaaacaacaaacagtattgagctcaatattaatgtctcagattatttgtaatttacctctttttcagatctttatattagatgattttggatgctcatcaactgcacgttttgtgtttttcattaacacgtagttttagggttgtgacaaaaactgccttttaaagttttgtataagttgtatgaacctagactgattttctttgaatcttcaggatcagttttaagataccattacccccttttgccctgccccactggcaaatcttaactaccgtatatcttgggtttaagttagtttgacagaagaagctgaatgtattagatgcctaattcctattaggtcgttaggattaagagttcagaatttaagttttgtgtactcaaggtttacctgctcatgtcatggtaaaaatttcaaaaatgtattgctttgtacatcatgttttaagtacatgttatggataacttcaggttaagagccatttattttactttcacttttgggggaatctttttttttttttttttttgaaaagttgagtttcttacttgttaaaaatatccaaatgtgatcgagagaggaattttatagaatataggtgtgtttatatttaggcacttgatggatagttaacatgaaaatctgttatgactctgacatagggcttagtgagagagaaagtaagaaataatagaaactatacctattttttatagttaatgcttttatttaataattttgtgtttagaaaataggccaaatgcatatttttattacatccatgatctttacctttatttctttcagtagtcaaaaacgtaaaaatctcgatgacttacaaaagttattttaggcaccatgtcttgttaaattcttttaagtttattttattctctatgtacatataaggtagtatacctggtactctaaatagtatttatgcagtgcattgtggtctaataaatagccttgattaacttttatctcacttgttgatttccatagctttgtggattgcttaccttatccttcttatccccattttactgatgggaaacttaatattcaaaatgttttcagtgatgtacttaaattatttgactagtaatggtagaccactctttcttccttttaactatttcttttctatatttctccactttttgtaatatctgtttttgttcctgactttagtttgtactttttttttctctctaggttgttttcactgcatgtaggaaatgtaacttatctactttctcctaccatccacttttattttctgcttttgcccacatttacatttttttaaaaaattgcttacacattgctttactttcatattctgatattgtctctctctgtctctccccaatactttccctattttatatttcccacttattaagtgttgttttaaatagttttattttttcccactcattcatgtgttgattattgcatttacttgtgggttacaaactgaacatatttgtataatagcaggaggtaagggtctaaaagtataaagattatatcatcccattaaggtgagagggatataattgataaactagggttattgtttttgttctgcagtgttagttttttttaaagagttgtagaaaactaataattggcctgtgatttcagtaaacctaagaaatgataaccaagtttgatatgccattattgagaagcgcagaccctggtgtgcatgatttaggagttgcattgtttactgattgatttacctaagtctcgtcttgattcttgtgtatggagttaaatagttgaaatgaatttacctaatcaggagagaataagggcattttctaaatctgtgacatctgggttcatgaaaagattccagacattttaaaattgtgtattaatgtgcttatgaactgtttattcctagttggtttaagaaatcttaaatagaaagttactaatgcagtaaaactctttgtgtgtgtgtgtgtgtgtgtgtgtgtgtgtgtgtgtggcattacctagtttttgtgcattagaagggatctctatgtagatgattataatgtcactttctgacctttgcagcttgaataattgtaaatcattgcttcataacgtgtcagagaatgtctgtactaggcaattaaatggcagaatataatagaccaaattattgcctgtcatgttttcaacaacacagttagtatttgagttacacttaatcattacgtgcattagcaacttcattggaatccagcttcaggctgagcatgaaatacattacattatttaaacctctaatggtacaagtcatttatttgtgttgaagtgtacaacatgcagagtttcataaagcaaggaacacttgagagcttaatttatccaaatcaaagtctaaatgcagataaacacaagtggcaaaaattagtaatttttataggctggaaatatttaaaaatacatggttgtgggtaattgtaggcagcaggaataaattaaaatcactatttttagtctgctgtgagaactaaagctgtgtatacctaaatcattaaaagcaccatggaattgcatttttagctgaacaattagttacacccatcatatctacagatatatccaaataaaataagtatttggtttagctggttgttttggttaaagagatatagataggaaatgtttattctataatgtggcatgaattatgcttataacagtataaagtgcaacatctctcagttttgtaaaaaatatttagattaacattaaaatgctctcccattgtaaatgatacgttatatattttatccatataatattttaatattttttgttgaatatttttgtctttagcttgaaattttaaaaatgctatgtgatgattgctgtctctctacctcagttaggaacaaaaaattaacattatttgtgtattcctctgatgttagaatccttgagataccttttatgtactgaatgaacatttacgatttttaaaactgtacaaatgactttattatgggaaagcctaggagtgatcttggttatactattcacatataaaacttgttttctcagatatcatcctcgtgtattttccagtgaactgtttggtgaagccgggagagtgctggggtgttaggacagcagagtggaaactgaggcagcccccagctcctcctcacaggggaaggacagctcttgtctccattatatcctggtttatttttctgtggtagtggtttttaaaatttttgccacagaagggtggggtcgtagatgtattccatggccagtaagtatgatcaacctataacaaaatagaaataaactaaatattatcatttcttggtgtagtagttgaaaacattggcttctgtgtctaaagtcttttccagtgaaacaatcatgttctagtgacttaactcgttgcttcttcttcttcttttttttttaaagtggcttccttgtgattttaaaatgcaattgtgatggctggatgtggtggctcatgcctgtaatcccagcactttgggaggctgaggtgggagaatcgcttgagcccaggaatttgagatcagcctgagcaacatagggagaccctgtctttacaaaaaataaaaataattagctgtgtgtggtggtgcatttctgtagttccagctgtttgaggggctgcagagggaagctcttccgagcccaggagtttgaggctacagtgagctatgatggtgccactgccctccagcctgggcaacagagcgggaccccgtctctaaaaaaaaaatcttcttgtagagtctcaggattctgtaaccttcctgatccccacagtagaatattaggtgggtagccattctcctgatttcctttgcctgttccgtatttttttttcttgttaaccttcctctccctgttctg

SEQ ID NO: 90236 - DNA, 1132 bp, Homo sapiens
catataacttaatgcagcatagttccaaataataattaagaggacatatgcagttacgtagccgtgctacctatgtccacatgtaactaataccatggtaccagatgctgtaattgtttccatacttgatcctctggatgggcaatttcagttgggacaggaaaccattaatttttaaaaagtatgtactgtgtagtaatctacttactttcctacatcttagtcctggggtacttgtcttgtttctaatcgcttccgtggtctgtgtttctggagtgttctccctccgcacccttgatcccctgtcacttttcttctgagaccctgtctcctctttcccctgccttagcattagtataccaaagtctgttgtctaagtagcaaagtactgagaaatagcagtttcaagcactgtagaatatgctactatctagatatacaaatttttagaaagttatttttggtttgctatttccactcaattttaaaaagtcctatttactgctgaggtactataagaatatattgagctgggctcaagggatggttgtttttgaaggaccaataaagtgttaatttgcatcataattacgctgtcaccattacatgtgttaatggggtactggaaaattcttataaaatctggctaaatgtaagatggtctctagtctattttagaagtgctgctgtaagtgaaataggtgaaagtggtcttatgtcaacacatctggtaattatcattataatattagaaaataagtatgattttttacattgtggctagggacattgatagtcaaatgcttcacaacataaatttgtgctagtctgaaaaattggaatgtgtttaaatattaaagacattttagtattcaccactaaaatttattttaaaaatagggttttagaacttacactgttgcctggtccaatccatctagtggacaggtaaagaaatttgggtcaagagcttaagtgacttttcacaaatggagacaagaacccaggacttgtgactctcgggtcagggctgtttctattttatcccactggcattctaattagctttaatgtagctcttaaacttttcagtctcactatttttagctaccattctttttaacaagggaaa

SEQ ID NO: 90237 - DNA, 1016 bp, Homo sapiens
tatactgagtacagaccagtgaaatctgtcacagagcccttaatctctcctgtcagattttaattgacttcctgtaggtaaagatgacttcatggaaagtttgctcaagaatttgatatcatcaagtagagcagcttttccattcaagtacagtatagtcccccttttttctacccttttaaagaggcttttgaaaatattattcagagctataatgtaggaaatcacttaaaattacagcagaaaaatatctaaagatcaaagttaagtacctttttatagcgttgccaaaatattcagcatatttctgtttcctatcattatctaaaacacatttgattgttggaagacagcagtatgattatatttctagaaataaagggttttaatacttgctagggtttttattcatcgagcaatttcaaaatacatcgtagccttttcctgtttaaactaaatataaaataaaaatatatatcatggaaacgttactgtggaacttacggtattttaatctttattatttgtttttgcttattacatgaatattgcttatattttccccccatgctgagaacttaaactaaggcagttagatgtaaaaatcatgaaggaccagcagagggcaatattatgttactctaacacttctactggggtaagttttgtgattgaaacaatacaaaaggttttcaggggtgggtgctatatttttctccattagtttcatattacaacttcccgaggtgcttcctcccttggtctgaaaaatcaaaacaaagaactattggcaaaactttcctaagtcagaaccaatgcacataacacagtttagtttctccttcggtaaattacattttctcagtttcagtcacctctcacatatagggtatgttaggtgtttatagctgatcattagtgagtttggaataaatttaagcttgcatttcaaatcagtcatataagctatgactggacatgttccataaaaacaagggaggttattagcaaagctt

SEQ ID NO: 90238 - DNA, 1190 bp, Homo sapiens
ttctcagttgtctatattttgagtaacaaaagaatattgtgtccattaaacctgccatttgccaactgaagttagtaatagtaacttaggtttaaacacctagaaaatgatgggcctttttatgtctatggtttataaaattataattttgtaatctcagtatattattaatatatatttgcagaactattgtgaaatattactaaccataaaagttgaatctatttttgactcagatctttagtatagggacaatgggtttttagcaattaaatgctaaatatatttaacatgtatcgatatgcttatatttattgaatcttcatatattgattcatagtgattagtttcaatttcagtaatgtcttttacaaaatagcgatactacaaactaacatgttggaaaaaagctcatgcttatacattatttaaagcatcagtagattatcaaaaactaacgtaattatgcacacttagtgtttccttatgataacttattgaaatgatgtatgctatttgaaataaaatgatgattttagctattttttagaaaaaaatgaattgacattgttggcttatgtgttatcatgaacatgctaatatattattcattggactcctttttttgagtgaaatttatgtccatcgatataattttaatgagtgctcaattacagacttttaagtatcaatacttcaaaatatttagttttacattagcaataacagacatgaaatcgttgcattgacaatcgtaggtcttgataattcaaggaataattctgctgctgatcatttctactaaaaaagagaaattggtagtaggcatactattagaaatttgttattgaaggaccatttgaggaagtataaaatacaggataatattttaatttcttgacatcaagaatgaccttattatttaccagtaggtatagttagtcctattagtctccctctaatctgattaaggcagtaaacatggcagcacctctggcatttaagtagaattattatttttaatggtttttctgacagaaaaataaaggcaatgttttggccagactttaaacaaatttctttgatttcatttctatgaaaattctttcagtgccaaactgaaaaatatagtgcaaacactgtggttatacctctagtttataatttggtaactaaaggaactcacttgc

SEQ ID NO: 90239 - DNA, 3021 bp, Homo sapiens
ttactcttaaaatttctatattatgtgacaaatatttttaattattaaactgtgtagaaaatgcattattataagaatccttaatatattctgtaagttactgcatctctaaattcagtcattttattttagcctttaagttgaaacactgtgagtcattaacacttgtgttggctaagtttcatggcttctactaagcattatttcaaatgcaacacacaaatatacatatatattagtatatatgtccttcactaatctggatccacacctattttagaacataatttaatcaagttaaaataatatggatacaaatttattatttgaaaaaatatacattaccttatggagtacttaaaatctgccttgcaactggactggtatctatccactagattatagaaatcacttgcacgcatagcatggatgataagtaccagtattgactcttatcccttattcataaatataactgtatgatgtctgagtaaatgattctgaatttattgtgtatgtgtgggttttgcatgcaacaaaaaattggaaaggggctaaacattttcccctctcctcagactactatgtaatttgtctatctactttcagtgaatatttgtttttctttatttgaggtgtgtgggtgtgagtgcacacacatgcatctgttcatgctcacgtgtataaaactgatgtgatttttatgtcctgcagatattggtacaatcagtcggttcaaggtttagcttgttttattttacaaatgaaaacgtcggttttgtgtgatacgatgagactgcaatattagatccttttaaaatcaactgccaatttatatggctggctacaactgcttattctattattaataagcatttttgctcaactatataaattataaaaataatgctaagattctaggagaattttatatttataatttgtataaaaattttataatttcttgaagacaaatgaattacttttgtattttttattgctgcttctgtatacatttatcattataatagaggcagattaggaaatgggccacaattgtaactaattaaaagaaattttactcacacatttgttaaaggatagttgaaatattcagatgcatctttgtgaatcaaaggacttacaattcaaaactttagttaggttactttacataaaaataactgatttatttttctaagacactaacatattaatgtgagggattttttggtgtgcagttcattttttgggggtatatgttagcgttcacatacatacatacgtacatacatacatttatacacattaaaagaaaatcctttttttgttgaagaccttaaaggacaaaggatttttgaccccaccctgagactgtgcaatgtaagtttacaaaaggatcaaggagcacagattttaataatgcaaacaatattagtcctgtcccctctggcgtcacgaacctggacatactgattgtatactttgattcttaaaccatggagatgtatgagatgccctagggagcacctggccaggctaagaacatttcagtgattacaaggatagtgcctagagggcaattaagggacagggcaggagatctacagtaatgagtccctgtagcacctgatgaaccacagaaagggaagcagagaattaggatcaaatgtagctgagtgaggaagattgttgagtaatgtatagattatttaccaagaataggatttttatactttgatatttatgtaatcaggcagattaaaaaatcccatcacttaatgtatttgacatatccctttaggtgaatttaataatttaagttttatgaataaatgccattgttgttatcctgtattgcttattactgtgcttaatactgtgttgtattgcttattactgtgatatacttcctttgaatgaacattttatttttctccctattgagtttgtaggtgtgtttttattttactaatataaagtaattccagccaagtgttgaactagtttttttttttttttttaatttaagtgtctgtgtagtcttcctgtttgcttacgtattatttttccatagttgtttgtatctacagtggaaggcacagttttcttgatttagttcaagcccgtggaaactaaaattgagggtaatttcttgaaatattttttgtataattatgaaaaaatgatagtagaaggaaaattttgtatagtatgtataatttacacaggagtcttaaatagatttaaaatcaggtgatttcactgctgaattttctgactcatctttcttaaaaacagattaatggcataatacacatatttgtgtcattttctgtttgtccagaaaatgcattattgtgtagggaaaaaaagagagagtgaaaagggaaactgctttgagcgtgagatttgatgtgataaacctggttacttaaccattcgtctcctgtagccctgctgttgtgtacaggtattaatggatgggctctcctacctcattgatctttgcgatggtgtatgctcaactatacagatgagagctgagagagaactaactggctgtaaagtgttcacctccacgttggttcctggctttctttcctcggcattgtctgaatcacttcttataccccactgcagcagcagtgtttacgctgtacttgttccatgttccatcaaatactgtcgtccaccctgggaggtctgcagtgctgctgcttgcgtgaccacgagggggagtcagggagtgtccctggaattcctccccatcctctccttcctccctgtcttctcagcctcttgctctctacttctccttttcctttcttcttcttcttcttcttcttcttcttcttctccctcctttcttttttctctttccatttcctcctctttcctttccctcctttccccctttcttcctctcccttcctttcccttctcttcttcatgtggaactgaaaatattattgctatcttacatccttctccaattgaacatcactacaatagaagcag

SEQ ID NO: 90240 - DNA, 1080 bp, Homo sapiens
atatatcattgtggtttagatttttatttttcaaagattggattttgatgatttcatttttatctttgaaaattcttttgtgtttgatgagataaatccatttcattttaattaaaaatgcttaacctatgtagagctggttgaacaccatgtaggatgctagtgattacagaatctatgcatataaaatatatctatttatgaaattgaaaacaattatgaggtaaaaaagatacatttatgtttaattttgaaattgacctttgacttcagttttacttagctaaaattcgtggctaaatttgtatatatctgaatattctaagaagtttgtttatataattgaatggtagaatcatcttaaaattaccctgacaatggttactggagctatggtctgtgattgtgcttgagaaacaaatagataaaacatttgtgactcttttaatgattatatttcttgatagctttcataagaaagcacataatttgtgacaacttcagtaaaaagacacagcagcaaaactttttgagttagcggcaaagtaaatggggcaggttttgcattttgaacagaaatgttatgagctgtgattgaatttgtcgtgaaagtgtgtcagtattaataaaagtatttaggtacaagttttctgggctttgtagcctttttaaggttaaggattggttaacgtgaaaagtcacttctgtgcatttggtagtatacagaaaatgacaaatatatttctatgcattttggattattatgccatttcttatttcaaaccctttttgtcaggacaccgggcaaaacaatgatgctttgaggacgtaattaaagatattgttcaaagaacaactttctgcatatttgaattattactgtcatcaaaatcatacaaatatggaaatatgattgccagaagcacataaatcaatgatcagcatggcctcaaaatccaataaatatgtagagttaaatactttaaaatgcaaattgcatctgatgatttgcatatggtagagtttaaaggaaatttgttgcttaacaacctctaaggtagcagttagggctgtgggtaa

SEQ ID NO: 90241 - DNA, 1014 bp, Homo sapiens
gcccaaaccacttcacacatgaagtattttagtcactttaaaaaagtgactttaaatccaatggctgatttctaaaatagtgcttaataagttgaagaaatagccttaaaaatcctggtattggtgattgctttttccccttctgctgctcctccagctgtctctctgtctctctctctctttctctctctttttttttactttctgcatttcttaccctctcttatagcatagaatcccagtgcatctgtttttggcgctgcgtatctgtgtgttgctgctcattagcaccaggcagtaggaatagacaagatcatgccctgttcacagaaaggagcctggttgattgagtgcaaaatttcaattttggtgtagaaagatcaggagacctcggtttattgagcctaggcttgagttcgggttctgccaatttcatgtaattataagatcccagccactttatttcaccaggtttcacctctgctttctcctccgcaataaggagattgttcaaggagtaaatcataaaaggatttgaattatttagcactttgctaagcaaatagtgaacagtaaattcatttttttcctgcctattgtatttttaagtttttcctctgttagtgttagtttggctacacagagcagaaatactgatgtaaagtggctttagtgtacatttatttctagctcccataaaataattgtggagttactcagagttggtctggtgcttcttagtgttattagagatcattagccatctttctgccccactgccctcagagcagggccttcactttccacattatctcatggtccaaggtagctgctggggaaccagctattgtatctgtgtccttggctgagagcatggtggtggggcagggaagcgatcaccttcctcccttaaaagagcccatgtgagagtcccatacaatactttggattacagttcattgaccagagctgagtacaagttacagtggtgatgagaaatacgtgttttggctg

SEQ ID NO: 90242 - DNA, 1027 bp, Homo sapiens
ggatgctagccaagtcggttttcttatttgatgtaacataagaacatattacaatggctgtgctgtttttctatctacagttctgggttttttacttattttggtttacagtttaaaaaagacaaattcagtcttgtttctagtggcatttgttagaaaaatctctcatgggttggcttggtgcacttttatgctgacaggcgcattttccatcagggcgattgcgctttgttgtgtgttgtgtgcatgcttgtggtgtgctgggggatctttctgtgcatgtatgcacacttgtgtctggaagagatacgcggcaggttctttttctggttttgagtggatggtgctgggctctaacatttgcttctgcctgttcattggttagctgttgttagtatgtccttgctaaactactggtttagctttctgaagatgtaattgtaaccaggtgtgtgagggcagggtagaaagcagttttatggagcttttgttctaatagcatataacaaatcactggaaatgtgagtcatcagcaaaaggctttataaagcaaaaggtagaaaaatgtgcagcattgcaaattttcctgggtaaaaaagtggatatggcagtcagagacttacgcttttgatttgggttattcttttatgtatattttttgcaattaataatatcttttatagtttataggattccattttcttcctcagagaaataggattattctagaacaacaaactattaggtctgatattaaatatttaaaactaacatttgctgtggggtggtttgtgtttggtttctttgactaaacaggattagaaatgtttgaatttcttctgtttttgctctgaagaacactttatgtctgaattttgagatgctatgcaatgctccttttttcttctctttcatactgttcttattttaaagcaaagcctaaccatgggctgttagctttgtgtcccttgtgtgaatgaatgaatcacacttgtagaacatacaaactatttttgcttgaatacaa

SEQ ID NO: 90243 - DNA, 1845 bp, Homo sapiens
ccgccaccatgcccgggtaatttttctatttttgtagagatggggtttcaccctgttggccaggttggtcttgaactcctgacctcaggtgatttgcccactttgacctcccaaagtgctgggattcacagacgtgagccactgtgctggcctatatctttctattttatttaggtccttcatttctttcatcagtgttttctggttttctgcatacagatcttgcacatactttgttcgatttaagtggaagtattttatttttcttggtcttattataaattgtgctttaataaagttcatttccactagctgatttctgctatataaaaatacatgtcatgtgaccttgtgttctaggatgaattaattctggtagcttttttgtaaactatactgtaccaacgtttgagagtacattcttgttattgttagcttgcgaagagtcattgcattgtcatccccttgcattgtggttgcagtcaatgaaagttagaaataattgattgcagctgcatggctatttaatggcaatgcaaagcaactgtccatatctcttgattctgccacaaatgctttatatactcaccattttatgtttatgtgttctgagtgatagtattgtgttttagaaatctctaagcagtgttgccatttaatcaaatcatttatggtaggattagatagaattgaaagcttccacttcaggatttcctttccactggcttgcctcaggagctgaagttgcccatgtcaaaaggaaaatgtcttacaaaggaagcataaatcattatgttgttctgaccttcatattccttactttttcagagatgcggtatttgtaggttgtgatggcagataacagctgggggcttgagagatagggcaggacaggttcaggcataagtgggcccaggtgggatgctgccatggtgggaacctcatccagatgtcattgtgaggacactgggcaccaagctgtgcaggcagtataggaaaatgtggaaacagacaccaaaaggaggtacctccgaaaacctaacctgggtatgtgaattttttgcttagtttacctctaaaaaaaagctaaattgccaaacgcttgtgatgttatcttggatcaatacctgttaacagagatacagattcattatgctaaacttaaaaaaaaattctcctatatataatggcacacatggtttctttgttaaattatgtcaactgcattctttaagagaaattttagaattccctagactcttaataaaggaccctatggaagaataattcctttacaaggaaacatgcataaaattaacaaagttagaaagatgtaattaaccacatggtttcttgagatctcaagggaaataatactaacacaattaacagaacctacctcattagaaataaaagagaaaacattttgggggaaatgtcatccagctggattagtttttttttgtttttttgggggttttttttggtgtttattatttttgccaggaagtttaaaacataatggccttttagccattatgatatttgattatgtcttatgattttgaaaatcagaaagaatgttaggacaggtatccatatccttgagatttgaagtatttgtgatttcttttggcagttgaagaaaaatggagcataaagtcaggaaaatttgtaggacaaagtggcttccaaaatttagatctatttttcttgtatagtttagctagcatttcattaatattttcctgtattgccaaataattagcaaagtggtagtcattaatttactttgagtacccaatcatatattagcctattttgatttttatttagagtcaaact

SEQ ID NO: 90244 - DNA, 1005 bp, Homo sapiens
atagagaaagtgatttcattgtactttcatattcaggccttcagttttccaggcattgtctctgagcttaaattatttaaattttaatgtcaaatttaacatggctgttcgttttatagaatataaacgttatgattgctttcatatttgagatcatagagaaatcatataatacatgccagtgtcatgtatttgtgccatagaattgttttatatatactatgtttactggctaacatttaagcagaaagcacatcttgaaaaaaacctacttaattaaaaattaaatgatgaattaaaacttagattattcaaaactaataagctacattaccaagaccagcaattaatacactacaatatattcaggaaagatgctaacattttaacatttgttttatgttagaattgcaatttgcagtgcatgctgttttgaaacatttattttgaagagctcagcatgtctgagttaaggcataaatcaatgacctaggatttttaatggttatagaatttatcatagattataattctcgagaatacaaacagcacagaagaaaaaatccaattgtttttaaatcagtggcaacatcatatcagcatatttgattacatttattcattgtaatgtgcaggtcaacagtgcagagatgcattcaattgacatcatcctaaaagcgatctattattttatttgataagattgtttttcctttgttcatgcataatggatataaatcataatcctgacagttaccaagggtttgaacttcagggactttctacaaatgaatattaactaaaactaaggacttctgcagttaagaaaatatgagccatttagaaacattctatctagtgattcaataaagcagaactttaagtgtacattttattttaagatggacatatcaacatctagacttataaccagcatagctgagttagtcatttgtctctcacctgatggttcataccgttgtccttctgagctggttgtatgta

SEQ ID NO: 90245 - DNA, 1631 bp, Homo sapiens
agctattttggagaagatagttgtaacctgagctgtgtctaagggattttagacagttttgagactttaaaaatgtctcctggtaccggtgttggagtgaccagtttcatttgttggcagaggagtggagaattagggaggtacacaaggatgaggcgagctactccagtgagtattttacaagttaatccttactgtcctgcttgctggccttggtccttaatttgctagatttggacaaatctaagcagacattttccatttgttttataggtttatgttgaatcgttttcctgttttgtgtgggattttctacagttaaaatattaaaaggaatattaaatcatactttaagtaataggtccagtagtatgacatagattttctaacatctttgtaatacttattttattgaaaaactagaaataatttgtgagagttggttctctggagacaaaattatatgcacatgtttctcttagtaaattaaagttgcccctaaaatgtgagtttgtattacttaaatgatcattgcccttgacatttacaataagattagtgctgtgttcccatagcataaatatggttaccatgcttaaaaaaacacttcaaacttgtaaacttatttatactttacagtcagttcttttcctaaggacatttggatagtaaactatgtttcgttgaatggaaaatattttgttctactttgtgaggtttattaaatttaatattctgctattttctaaatcctcaaattatcgcagagggagggtccatgtgaagtaagttttaaaatacattagtatacctacatttgaaacctttcactttcttcggagaaagttctagataaagccacctaactagtttacggtgagcagtttctacactgccacttatttggcattttctttaggtcaagactgtctttactgctttctaataagatggtagaaagctgctgaacatgtgcttttcgcaaagagtatcagaggtgtgatgtcactgcatggtgatgccagcactttgcactttcctccatcaagggcaggtggagctaactttattatttcatttcctctagtcttctcctcagttctctctcccttgatccccacctccccccaattctagatctcagctataatttctcgattaaagttcattcttctcagccttaactttattctataaaatagtttctgtgatgacagaggagacttagtccccaaactctgttagtttacagtggtagagatactcattttaggagaggagagaagtataattgggaccaaatgtaaatgttttttgtctaggagtttagccttggtcatcttaaagatgaaagtactggtttgcttctggaacctgttcttttttccattaagattcatctgtcaaacattggagcgtatttattagtattccggtggtaccagacatttagtgggagctctggactgaattgtgtccctgaaaaatttgtaagttgaattcttaattaccaaacgtgacagtatttggagatagggcctatagggggtagttaaggttaaatgagatcttaagggtggggtcctcatactgtagaataaagacaacagacagctgtctctctcctcctc

SEQ ID NO: 90246 - DNA, 1007 bp, Homo sapiens
agagtgttagcttctgttgtctgaggctccaggctgtggtgttctgttagggcagcccgagcagactgagacagtaggcaattatcacctgtgctgtttggcaccaaaactagcttgccccttggatcagtgtgttgagcatctcatcgcaaagaaataactattattgcaaactgtgagttagcaacttctttcaaagattggtcatcctgtgatgtttttattttcctttatgtaatatttccgactacctataagtttagctctggagttgaattctgtgtttcatgctatgtatgtataccatagacagacaggcacaagtcataaggcacctgggatcaagaaacaaacgagtaccagaaagcttctcttgcttccttctggtaatcaccgaggcctcacttcccccaactaccatggaaggtaactattacagttaattttttattcaacagttttgacattggttgtatttcttccacatgatggtttttgaattgaatctaatctcagaccctgatttttgcctcttaaaatatttttttctttcattctagctgcttttatattcttggcctttgaactgttaataatttaggctcgccctgtcaccccttcccccaacatgcagtttgtgcattgcattgtaaagagagactattttacagattttaggaaatcgatttcataagcccttataaataaataaaatgtttgcatcagctttattttgtgaatcttgaatttcaaacttaaaagtagagtttgtggtttaatttgcttatgttttagcttggtatgcacatagtgctctgtggggtgccatttcagctaccattattatactgaaaatatctataacggagacatgcctgcgaatattctatttttgaatgctcttctaatgaggtattagatcagaggtggcattacattttggaggggctgctgataactgcagtttgtatattataatattacattgccttttcagttggtaccca

SEQ ID NO: 90247 - DNA, 1028 bp, Homo sapiens
attatcagtgtttatactgaaaaacacatattacagtattatcagtatttttctaaatatagatattttactgattcttctaatatagtgaatattctgctttgagtagaaaaagactgtaaggcatgtggatatttttgaaaatattaaatattttgagttctaaattgagatacatttagttcttctatgcattgtttccagtgcatgtaaatgagttttatatattggttaaatggtttatcaatcagaagcagcatagcatatactcacatttatttatatataaatacatatttccctataaacattgatatgcatacgtatattcaggcacacatagatacatgtacatatacactgatacatagacatgtacatgggtatattacaagcagttggctatacgcagttgtatctgttggtcaagcagtctttctaagactattttaaatgcatgggaagaggagatatttggaacacagggcaagaacaagaccaagtggaacccacaagcatgacctggagccgatgaacatgggcagaaacccatgtctgttcttactgcttcagaccctgatggtataggtttccatagaatttggggctcttcttccaggagcataacttacacatgcctggtctagtggttggagaaactcctgatggaggtggagcagttgcagggctagcccctgctcacccaaatgaggtgactcagcagagaggcgaggtggtgtgagagctacaagtgactgctgcttgtagcagccttcttcatttctcacaagaacctgcctcatgtcccacccaactagatgtgtaaggaaagagaattctgagaaatgtagttcacagcctagatgagacgacccattacagagctaccacagagagttttagatctctctctctctctccccatgtgtgtctctgtctctgtctctctctctctcttttctgagatggagtttcactcttgttgcccaggctggagtgcaatggtgcaatctcggctcaccgcaacc

SEQ ID NO: 90248 - DNA, 1561 bp, Homo sapiens
ggaggttaatggaggattgataaatatagacatggtgttttgacttgagaaaaatacatttttttttttaaaccagaaagtccaacaggctgataaggtacccttgaattaagctcagggaaggtaggtagatttcactttttgtctgcttctacttgttgaggtgactgagtagagactgttgagagagattctgaggctgcctgtgatgtcatggggacaaaagcccacgataaatcagtggcagcatgcacactgactggccatctctgatttggttgaataggactgtctttggaaatttgatgaaaatgctgaattgtgcagatgctgtttattctagaatggctccttaaacttattagatgccttaaaacaacttattcagatagataataattgtaattaaaacgtcttgtacctctattccacatctatagctttatgaatatgtattggtagattagactttttgaatatagctcgctctattttgaatgtagtttgtttataaaaaacatttttttagtgtagcaaaactcagaatttatgttgatgaaattggattttttgtcctttattaacgattaaataagtagggatatatttaaaaattaatagcatgtgtcttgtaaatagaaaacaaatactggacatttttgacaatatgaaaattaaaagaaacaggttaaataaggtcttggtgtgagatgtgaactttcttttgcaggtgagaacaaactatgcatataaaatacgaaactatggttactatgtatagatcaaagagcggtctacattgtatcctagtactctatttgcactgaattgtctatgagccagtgtccttgtcagctactaaagatcattttctgttttcctttttcaactaaagattagggctgaagtagagccaagtatctcattctatttccttctccactgtctcttcccccttcttaagggtattcatatacatatcagtgcactgtggttagtcattgtcatggaagttttggatatggtgtgagatggtaatatgttgacaatgaattatgcaaaaatgagaattctaccgcaaaaattctttaatttcaaattgttgcagaatttttataggattcttcacctttttcattctagttcactgtcttttctgctatttactagacttttgttcaaagctttcacttttgttttggaaaaaacaggaatcgcttttattattgttctttgagaaatgttgtattcattgttcacctatctgtaataaactcttagaattaactgcaattgacaatgattgccttaaatcctggtgggtgggatgatccatgttacctggatttggtcagatgggaataatgtgtattaccccatgaatttggatgctcattcgtttgttgttcattcactcaacatgtatttatttagggcctcatttgtttcaggtgtgtggttcagctctgaacagcactgaccaagtctccacctggaactcaccttcaagtttaggggtgtcagaaaatgagcagcagcaacaaaaacaatgtgagagaat

SEQ ID NO: 90249 - DNA, 1081 bp, Homo sapiens
tattgttggaaaaaatgtaattgcaaaaattaacttgtcatacaccatagctcagcaaagtcacttcttataagtctgtggtcacagtatgttttttgcagttcagcatctggctctgtgggatactgatggcttctaggaagcaaagtaccagggtgaacaattaaatgcaaaatgacagcataaaatatgcttgtggttatatgaaagacacatttatgaattttgcagatcactgtcatttttgcattcatattttctcttgctttgttagcttaataattttagtataatttatttttcctttttagaagtgaacaatgctgttttgattttcctggtacttgttaatatcttccttgtttgtcagttttgaagactagtaactcttttactgtcttctggcatgatgctttcaactttatttttaaatcaaagaatttttaaaaattgcatagccattgtattattggtaaaattttttatgattattagtattatcatatgtgggttgaacaatattcaccacctggaaataagatttgtcagcacttagttttctcatagtatcaggtaatgttttgaagtgtttttttacaatgccaattctcagatttcttggggggtagaacagtctgacataaggagtcaaataggatgtgcccaaagttggtaaattttttttgctttttcttgcataaatctcctctgctcacggtggaactggtgggagttctagacagggcgtcgctctggatagccaggttcccaggcagccttgcactgctccattgtctctgctccctgggtagccctgcctgtctgcctggactgtctacagtgcttttccttacaaaacctacacgtgaaccagttacctttaccagtcatcttccacgtcccgctgccttactttctttttacttgtacttacagtatccccttttcctggaatacttcctaatgatttgggtaaatccactctgaacttgaaatgtggttcacactgcctgttctctgaagactttctgatctctcagcagtccacggtaacttgtgcttccatgtcgtattttgtgga

SEQ ID NO: 90250 - DNA, 1044 bp, Homo sapiens
accatcaccctgtacaattcttcgaagacccttggcaaccttgacctttggctaaaattattgttagtctataaatgtattcattttctcactattttccaaagtggctataggattatagaaagaatgatgtattatataaaaagcttttccaatgtagaaactacaaaagggaaggtttaaatgagcattttgttcagctggtcatgaagtaaaagcataaggaggatataaaagtccaatcatcccccttaagaatttttgatgttgaacaatattttaggtttgtttttctgaataacttgtacattaatatctttaaattgaaaaataactttattaaaaggtattcactgactgttcagacttacacttaaatcttaattatgagatattccatctcttattctgttattttactacctctttagaaggagagaagaatattttttatcttgatttttcttgaaactctgtaggctctcctgtgtttttggcattgatttagcaatttatgtaaaaataatggaatttacagattttgagtcagtgtaagtggaactgtataataatttgtccaaaagggaatgggctaatctacaatcataagcttcctttaatttagaaagacggtaccgttggtaagatgcatttcgggcgagtcactcatggattgtactagtcgaattccatcccatctgattctatgatctgataatcctgtgggttggctagtcatgaatttttttaggcaagtttatcatatttcactaaagtcaaactaaatggttcacctacttctaaaaagtgaacaaaaacaattctatcctcatttcttagagtgaaatttctaagcctgttgaggttaaacccacttaatgaaatgcaaacacattttcaatgactaattaggagtaatgaagtcagaaaactttaattttgacatcttggattttgagaagatgagtgtagtaagcactgctaattagttttcaagttcttttttatccctaatgtttaggcagcctttattccaaatggtca

SEQ ID NO: 90251 - DNA, 1017 bp, Homo sapiens
tgtttaaataaaatacaggttaactcattggagcttaaattttaggttttagcttgctttagacttattacctagtgggcttcattgagtcctagaatgcattgattttcactttaaaataatgcagtttcatcacttcattaattttttcccttaacatttttgcttaattagtactatttctgtactgagatttttttaacatataaaatgtagatacaactgttctatgatggctgtttttgccaaaaacatgcctgcccaggatgcctttgtcagttgttttcatggcatttgcttggtggaaaagttgtgggggttatgtagaaataaaaacgagaataaatttctgcagccgatctaaatacatatttttaaagtcaagaattatgtttcccattaaataaacgttctcatttatggtctccgttcatatagtgatgggtcctattagctgtcattatccttctattctcattaggagagaaaaatagtccaggctcctaaaagtatcttcatgagaagtatcagctcctaattagcagtgactgtaatcttttggaacacagggttaacacttcctagataagttgctattataaagtttcttcatcttttaaaagccattcctgctagtaaaactaggtcgaaatgaaaaagtagacagttttttcttttatcaaatgcagttttgtaataaaattgtacgatgagcttgcacaagctttttaaaatatcattgctgccactgaatacatctataatttatttattcaagaatgttggaggcatttttgatttatttgtttttagagaagttttgttaagcaagataatgagcagagctggtgttaatcatttactatgcaactctaaagaatgaaaattttgcatatctttagcactgttggggaaaataaattcactcagtgctaatggtctatctgtgtaatttttgaaaatactatcttactctggagaaatgtaacacaccattgtgctttgctaaaagctaaa

SEQ ID NO: 90252 - DNA, 1120 bp, Homo sapiens
gcaaatgtgattattgctagaactcccaaatcagctcggtaccagttttatagttgtctctgggaaaacttgcctggggaaacttggctgagaaccattcttttgtcccagtagcagtagctggaaggcagctgcatcacaggaagtttgagattattgatggtcaagtgatgtcaaaagagtgattgtgacatataagatggcttatggaagtccttcagtggataatatgtaaaaccaaggcagtaaaccagttgagaaaaatacatgtatggatggtgaaatcaggaatacgtttctatagtcaggtcgggagcattttgtatatatacatatatacacacatacatacacacacttatgtggacttatgttcacgctcgtgtgtgaatgtgtgtatatgtgtatctacatttgtgacgtgttataaatataaatgtatatatggaaatatatacatatacatatacataagtaaatacatgcatacaaataatttggataatcatatatttacttctaaattgttggctatagcctaaaacaactgttttatgttatttggactagactgtaatgaaaaacagctagaatctaaatgatttataagctctctgaataaaattgatgaaaggatggtgttctatgttaagtttagagccagattaaccaaaaaagaataattgtaaaaacaaaggacagtgtggtgtattatagatatagaatctatatctgattctctttcagtatatatatatttttcatgcctgatttgcacatttcaaacaatagtaaatttccttggttgtcagatatacatacctaagcttggtgacaagaagggatactccttggcatgaaaaccgcccctcagatatcagtcatagaagaaaattgctatttaagagcctgcgaacccctttgtgggtgttacttggaatctgtcatgctctatgaaaaagctgcccagttggattttacaattatttgctactataggattaaaaatgaaaacctagaatgagttaaagtttacaaaggaaaaccagtgtggttcttgcctagaattttacaccaagtgggaaagatgaaataacaattagcagaaagcttgaagtgc

SEQ ID NO: 90253 - DNA, 1541 bp, Homo sapiens
atgtaaagtcatgattggataatgaaaattatcttttttagattacatcattttaggaagagtgatagagtattttttagaaatttgtttgttcgttttgcttacttgtagaatgtagctgcagtagctcaaagtatccatttgctcacatttttctcctgtgtactccaagagcagtgatgcatcattcctgtcatccaggcctcttgtctgcttagtccctgtttctagctcataaattctgtggtctggctaaaaaacaatgtggttaccttgtgcataggaggtcttgaatgtatattcagttaatggctgaactggtataattatgggtcttaaggccaattaggatactttttttaatagtccagcaatagatagggaaacccttaggtaatgaaccagcaaaggcggtggatggatggaagatgatagattcaggggtgtgaggaggcagaacttgacggctgaataatgcaagcgttgatggaattggaggagtgaagatttgctttacatttgtagtgtggctgactagccagtggctgactagtgttctgttaaccaaaatagagaacgctggagaagaagcaagttacaggggttagggattacaatgtgggagggaaggtgacacatttggtttagttgtgttgaattttaaatgaccacaagatactcaaaatatatattttaacaaggcaatagcaccaattttctcttctctttgatactgaactcggaaggggattgatgtggttggtcaggatttatcttgtcttgtcagatctgtgtgtgtgtgtgtgtattttcatgtacacaagatgtctcgattcttgcttaatggtttggttctttagttgtaagataatatgatggtaatgtctaactttcatatttataaaataggagattctgagagttttaaaattactaaatcagataaggaccactgtaaagttgtatttgaaatatataatattccttttttaggacaggtagtgataaaatcctaatgagttgtcatgttttaagatctgtgaagttccctaattggtattcatacaggtatttttaatggaaataacttcttgcaatctaaaatgttgtgaaagaaactttactatattccttctgccattatctctagaacattttcttttcttagatatgttgtgtctgttgcttctaaaagaataggtatattgtgatttattaaaggcttcctgcttataagacatactttttaaaatatttgaacatttttgaaattgtgatgtgttttagagttaattggtacattaatttgttttttcttttaaaacttttagaaaagcttttattaaatcaattaactgcctcaaaatggatggtctcttagaataacataaatactgtatgttaaattattataatgtactacataagacattcattgttctcatgggaccttttgattagttgattccaattttggctctcaagttatttcttatataggaatttagtgtttgaacttcggcctcaaacactgatttttg

SEQ ID NO: 90254 - DNA, 1062 bp, Homo sapiens
ctgcaggtttttccgtattgtttatttaacatgctcattaataggtaagagaagtaggtgagaaaaattctttcctgaagtcttgattaaacaatataatatgaacctgcttacaaacatatttaggatgttagataatgtatttcatcttatatgttataaaaatgaagtctttaataatttcagttttatattatctaacatattttacatgttaacaacaaattatagtatgccccaggtttctgacactttaaaaataaaatatatttattttgattttgtttatgataaaactggtgcaatctatctcaattggctgttctttaagaaatgatcatctttatttttaagcataattattcttgataactgattgtgtggtatttatttttgtctgacttgtttcataggtcattaatttttagtttttctcttcatcatataagtattttcttttaaaaatattgtgtatacttaatcccagcaaatcttaaaaaaaaatctctatgcttatatcaattactagatttgtcattcattagcttggataattcacattcatttaggaaagtaatgtagtggttttatttttgaacagttttatttcagtagtagtttcatttttcttactttctatgaggctataatctttcattaggcaagaagtatggagtggtggagagacttctgtataaaggtcaccaggcatgaattctacttttgcattttcagcttctttgccccattttcttgaaaaagtcaaagtcacttatcttgtctgagccccactttcgtcctctttcagggtgatctgattatgcccaaactgcatgctcatacactcttgggtagccattgaggagacatataaaactgttgtataaactatacatctgtaactataagcaatatattatttgttgcttttttaaattacagattttacttatagaaaaacaaccctataaatcatctaaatctaaatcccatgtcagagtgaatttggttgatgttggcttcttttcatgtatatatttgttcatgtatatgtcagaatac

SEQ ID NO: 90255 - DNA, 2748 bp, Homo sapiens
gtgagccaccgcgcccggtcagcttatatatttttttaaccgaggatgattttgaggcttttaccttatttgtactttaagccaaatttaaagaattagtacttcttttaagtccagtgttggttgaataaatattttgcatttgaacacaattgagctgtgttatagtattaaaactttttccatttttctccatgataataaaaattattatttcactaaatattcagcactagagacactcagcacgttaggacattgtattaggcaaaagctttttctccctatttcctctagtttgtttccctgtgccatgtaatatttttgcttcaattcttaaaacctaagtattttaattaataattttgttttctattaaaaactgcactgtggattctaagttcccatctcttaatttgtacttggtcgtgtaaataagctgtgctttgcagctttgggtttttaacctttgctctttgctattagctttatgtttttttaattatagacaatggaggacagtagggaagttatgacttaaattcatttattatcactgtgttcttttttaaggaaatgaaaaatgttattttgtcaaaaccaagcagaaacaaatacagaatttttgtacttttttttgctcagcatttaatattatcacagtttttttatgtgataatttcattttagtgattgatgttggtaccagttgtttatagttgtaaagtgtgtattgtccatagttgttattacctaatatttaagtagaatgattgttattttcagtgtatgtaagtgcattatttgaataaagaagtcatggtcatttgttcttaaacctgagattctgtaatattatatgaaattaaacaaaataaattagacatttagacatgaaaagaaaagaagcatgtttttagaagttgttttgcttttggcttttgtcacaagtcttttctgcaaggatacagtactttacagtcttatgtggctcatttgtgcaaacatgtccagatgaattcagtgtttaatgttgagaatcttataacatgccaatttgatttgtagcctttcatatcatagaatgctaattaaaatcatatttttgcatatgtcatgtctttcatgtacatatgcaaatagatgctgttgcctttcagctattagtaattaactttatgaaggacagctgtaatacataattaacaaaaatgtttgcaagcccttttacactgaaagttacagcagtaaattttttttctgcttatccagagagccattttagttttgatgcttctgaatgtttctgatctaagttttaaataatcgcatgacgtaaataaattgatactgcactgtgttcaggggtagaatggcattcatgtactgctgattcctgtccatttcatatttatgtcaacaaaattgaattaagtaagctgatttgtgtataaaataagatagtatgtcaggtaatactttttgtttgtttttgttattgatatctaggtacttcaatataattttttgtgctatagatacagtaaacatttgtattatttttaaaaacctctcttcaagttattaccatgtttttaaggaagctccatgaaagctattctttttctcttttacggtcctttaaatatttaataaaatgacattttctcaaactcatttcatgattgaagtgtgcgatgacctaggggctgtgcatgttatactgaggtattgcttcatctttcttaccaactggaagtgaagacagggattgaagaactacaatcattgtgctcttttgctcactgttagtgtatccaagtcaaaactgaaccagtcaatttagatgtagacttcttttgaagtcctacagtatatttaatctgtatgcaagctttggtgtagcaagagtgccactgtaatacgctttttatgttatgtttgcatatatatattattcttaagttctctttgtacagatttctagtggagagtcaagttttagttttataattacttttgtttattttttagggttgcttttgtaatgaagaagcacttaaatactcatctactaggcaagcatggagttggcaccccaaaagaaaggtaattttcattctttttttttcatttaaaaatacaatttgatttttattttaggctttatttaatgacatgacttctagacttttttttcacatcagttaatcatgtttctatttgtggtactcttttgtcaaatatcatattttatgccatcgtttcacaaaaatttaacatattttaattaaaacttgagtctagaagtagttgaaagcatttggaggactttgaatttgtgaaacaaccttgaaatactagaagaattaaattggagggaattaccttctgaaaatgcattcgagtgtgataaaacaaatatgtaaaactcaactttgttttattatatattcttattttgaggttttaaaataacagttttgaattcttactctagacttaaagattgctgatattaagaagaaatacatcttgtgtcatcccccaaataatactacagttgccatgtcatgaaaaataacactacaattattatgtcatcaactgccaggttttcttttttcttgcttctgtatcataattagcttcatcgcatagacttaattatattaggtgaactgaaatatagcagtgtcagctaccaggtgaacatggctacttctgatattttaaatctttaaaatg

SEQ ID NO: 90256 - DNA, 1063 bp, Homo sapiens
gtaattctttgggtaatgtagatgatctgtggttgcttcgtcagcaatgtgttattactaacaataatattttctaacttctgcttcataagttttgcagatgaaagttaacaaaagtcagcatctgtgctgcagaatctcaggattgcaggcagatacttatggctcctctgcggggtggagagccttctcttcaagcttctctcttggttgggttcctcagctcttaggaagcaatgtcaccggtactcctgcatcagttacatcatcaaatgcgacatcaaatatctggattccatgtatttgtcagataatttactttgatgtcacgattccttctttcttctattcatttcttaatgtcctttcagttttagctttcagttatttccattgctagagaactgcttttcttcattgacttgtttcgttttcttcctttcgtaaattgactccgctcatttagcacacagctatgacaatgacttaaatttaagactgttttaagaagtaacctcataaaagttacatgtttattgtgaaggtagtatttaggatgctgttcatggaaatacatctttcttttaagactcagaagaattatttctctctggtctttattccagagaaagttgtacttgtctctaacacttcgttagcctttgatactagcaaatcatgtatatgattgagttttcctctttatgtttactgttgggaagctcatggccaaaattgtgatccatctctagtcagcaggatagccttaaaggcatgcattttatttactactgttatttccagttttatttattttttccttatggggaagtcccattttatgtccgcaatatattttaaaaacctcccataaatcaaagctcatgtaattcaagggcagttttgcaatagaaattgtttttgagtaaaaccaatatttttctggaagtgcatatatctttagccatttggttttgggggcgttgtattgagcattgtgcatccctgtgattaggcatattttaattgtgcttgctctgttgtaggaaactgctgtgcactt

SEQ ID NO: 90257 - DNA, 1040 bp, Homo sapiens
gaaatattttgaaattatgaattttgttgttacaatattgaggtactcttacttaaacaaaagtaatgttccttctacattaattgatagttttaccatggtttcccttgtatgttgataatttttgacatcacacttgtatgtgggaaaaatagacaagcatgtaaattatgaactaaaccaccagttcagttctgggcattctcaccaaatgttttgccatgtactgaattgtgtatgagaggaagagttgagcagagacctttaaactctttctttgaaagctgaaagtgacttggatttaagtttctgttgtaaattccccacatttcgtaaatgacgggtacatgctttgaccctggtatcatccagtaccagtgtaataaaagtcacatgcaaaagcaatggagtgttatagagccattatatagtgagagtcctccacatgtggcatttcataccagcctcccgctgtgcacacgcgcacacacgcacacgtgcccttgcagcacatgaacgagtctctggaaagtaattttggaacatgagcattgagagcatgcaaatcggctgctcttttctccctcaggtggcagacttagtctgtgtgcagatggtatttagtatattttttaatgtgttattttcattctagaaaaaaatcttaattttatcatggtgacttgaagttattttattcgttctagagaaagtgtttctgcagtactgaatataatagaactgtcatccaaatattgatacatttttttccaggctgaagaagtctagatatatttttgtgttttatatcttcagtatattaatggctttaaacaaaataaatagctctttgtgcatgactgatagagcgttaggttttgttactcaatgaaataggcttgtggattagccccaggtcatgatcagtgcaaaaagcaggcaaatgcacttgttttaatatctatttgattgagatcccaagctgcatttttctatatagcagagatgtgtcacacgaggttgtaagtatgttcagtata

SEQ ID NO: 90258 - DNA, 1049 bp, Homo sapiens
tcatattatttttattttcagattttttccaataaacaaaagtttagtcacattgttccctcttccacattttttccagttgttgagatcttcagtcttttttgcttgctttcttgtagatttgcttaacggaaatgaacgtttaacctcttgcctcttaaaattcatattctccttgccatctatggccttcctaattatttaaattatttttagaaaaatgaacagttcaaaaagaattatacgaagataattgtttttctcgtgatgggagaagcctaaagccaatcttagtcatttctcattggaagcatatataaactcagtttgttttatatactgaaagtttttgattagtttgcttcctaggtagaatggaagcccagtgtctcaggaaatgtttctgaaattaatacgatttttacattgaatgtctctgataacttgacttcatttgtcagtgatttgccctatcactgataacttttatgtcatttgtcaggttattgtttcaggatggaaataattatgaccattatttgtaactcaaacatagcttgttaacagacagattcattataccgtttttttttaaactctataaaatgtttcaaagagtctcttccataaatttaaagcaatcctagacatttaggcactttgttaggttttctttccccgttagaaaataagcagtccatactcttagtgatattctataatttctttttggaatacttggaaatagtaatataatgatcattagtgcttatgaatttttgtcttgatcatcaattatcaactaatttttaaattgtttttctcttgagtatgattaatgattgtgtacctgaaaaatgtaaaacattcagtttgtcacattcctttgtcaaggtatatgagattaattttataaatcagtatatatgagattaatttcataaggcttcatttatatttttctttcattatcagtgtgttttcatggaaatctagacttactgtttatattttatatatacttcgagtatcacaaacgtgggccatga

SEQ ID NO: 90259 - DNA, 1128 bp, Homo sapiens
gactgtccaatcaaagtttttgtaagcatgccatgtgacaaatgcctggcatattcagtaaggaacatattaattattctaattaacacatgacttcagagaagtctttcgttaatcagcacatggatcttggttatttgtacccttttgggaaaatttcacactcagatgcaaaaataccaggctaaatacattgctttgtttgtatgtggagaggatattcatcacaatggtactatacatctaagaaaacagaaagtaattaaaatgctgattactatagccagtctctaaaacgtctgattatttgtatttcatatgtgctcacatttctgagaagttagcttttgtaccacaacctaccatgattatctgatattctccggaaggttagccgagttgtttcctatattacttaggaaaaaatttcttttcacaattgaaaatgtcagcatcaatttaaagtaacactaagcatgtgcttgctttctgaatattatcctcctccacctccttccaaccaccctgccgaggatctggctgtgacagtttgattagatcatcaatcctcactgttaacagcacttttcctgaacacctgggctgccaggtcacatctgaattcagctaccgttgtttcagtgacccgacgtgcattcaccatagcaattgacattatgtgcacaaattaaaagttaccttataacaacagtttactttaaaaaatgacctcttttttccccccatgttgaagttctgctgtgttataggaggtgcatttttgtatgatgaaagactattttagaacatagtcacacaccttgatgaaggtgtttcctttttctttttacttgggctttcatttcagaacttctataatgaaaataatcgtctttcatcttactcttctgctatttaaaaatctttgattgcatttttaagatttgattacattttggatttaagcctaagtaaataattgaatttctcatatattgcggaaaatctttctgctttctgctcctaaattctccagttgaactgtcacaatagtctgatttacacttttctatttatagttgtagtgataaagataaatacctacttacattttcaatgcaaattgtc

SEQ ID NO: 90260 - DNA, 1012 bp, Homo sapiens
tatcatattatatttctggttactttggctgatgttgactttgaggtgaaaaattagatatttcaccttctgattcaacccctctggttcattttctgaaagagctgagtggaattttctttccaaaattaagatttcattaattaacaagagcttttatttgtggaaataaaaatcagaaagaccttttgggtcagttagcgtcctctgtcagattttcacttgccctgtctactctttatttgtagtccattttgtcataagaattgggtacttcccttaggaaaaattctgtttctataaatgcatttaaaaacctttctgaatgtttatggctcttaatcttgacccatttcttactttgttatgccacaatattattggcattttgtttggtggctttgatttatttaaacctagaatttggcgttttatttgtgtgttttaatagaatagtgatacaattggatatgacatttgtcatttaaattgatatccataaaattcaatacacaaagtattattctaataagtacctaatctgtataaattgctgaaagtattcacttttaacttgcaaatatattaatgattttgagttttgatcaatatttgcgtcaataaagacatgaacttattaaattggtggtataatttatgtactagataataaataaggaattattttctatagacctttattccattgcatttcttttccttttgtctgttaaaattgctaaggatctcattgattccctcatatgtttgtgcacaaaaaatttatctttgaataaaatcttgttgttattttatgttaattataattagggttgattttttattgatctgaaagtttaatatgttcagaaatttcagcaaatatcttgaatgcagactctaagagtttccatcttagctgatacaatgccagtttagttggtagtgaggctcacagctcaagtagggatatcatgctggttttataggagaaacatgttacaggtaaaac

SEQ ID NO: 90261 - DNA, 1075 bp, Homo sapiens
cactctagcggcccttcatagctattgtattctggatttcaattcggcactttatgtattagctaaaaatttcatgaccagatcttttgaagtatacaaagtaaatcttcaaggtgatagtttatccaagtgtaaatgtgttgcactaggtcagcttggaattttgagatgacttttggcatcattgcatacatctggtttgtgtactgtgctgtgcacgtttggtgagtccgcctgtgcccatgtctcccttgtgtgttagtagcaggagtcataactggagaagcagtgccagcagcaaacgcaggcattctctctcgagcatagcgccatcccggaacctgtgactgcttgtccatgggtcaagttgtctcatatttgatttattaaaatgagttgttcttctattctggacatgtggataattaggtttgtgtgctacattttttttgactttgtaatttctgtattcttcagacattgtagtatttgtttcttacattgtacctacatatattacacatgcaatatgtgtttattaacctgagtttgattttttgcacatgcacataaaatggctacttgaagatttttattttagcttatccagtgaaatttgttcactgtccttcttttgactaaaataagcgaagctccttttacacacagatgtattttaattcagcagctgcattcttacacttttttaaaaacacactttggctaaatcaaaaatcaaatgcaaaatatagcacagagaaatatcacacatatttgtggccctctctggaggactgaggaatagattacattcactcatatgtggcctgtttccaatcctgataagtcattattcaatacatttcaataatacaactttaaaacatatttttcattgtatttaactggttttaaggccattgaacagtaaaaaaaaaaaaaaagctaaacatgaataaagactaaagcattttaccatgactcttgataaatcataaagaaaacaatttttctctctgtctccctcctgcccttctgcgctgagacatgtcacagctggaaacatggcttgttt

SEQ ID NO: 90262 - DNA, 2044 bp, Homo sapiens
aaaagaggtatagtcagtcttctaggttatccctagactcaagtatccagcttgctttgtaaaaatgtcagcgtcattaggaactatgaatccttcatgttatctcctacgtttgtaccttattactaacgttgcagtcctaaaattgtgaactttctttttcgtgaaaatttacattttggattacagtttaatattatgttcctgaggtgagattcatagtccttattcttaagattagattaagatagcttagtcttacatgatttagatttctttggtctttgtgttattttggtcagacatttatgcattaatattttttggaaaggttgcctaagatttttttattctgttggatactaggctgtaggctctttcagatcctagcttaccttattcatggctaaattgcccgcaccacttagcaaatgtggtagaaacgacaggtgcctaataaaaggatctttgatttaactcagtagccaatttcactttctttgtgttggcccataaatttacagcctctttgaaactccattataacattgttaagtgcacttctcatatttgaagtaaattattttataatttgcttatataaaacaaagtatttcaaaaatttttaaattcctactactgtgtttaaatctttttaataatgatttatgacacttaatggagtaacaatattgttcatattgatgctttcagctgcgtttccttctatcctcgtattgttccttgttaggtcattagtttgtttttgaaaaacagtgacgcctttttgaccctggaagtttttccctagtgatgtgtgtgtgtgtgtgtgtgtgtgagattccttttcattttctttgacctgttgagtgtgtcatttagacaaatgtttgcttattttatatactatattgttcccttttcggctatgctatttatttatttattattttttgagacagaatatcgctctgttgcccaggatggagtgcagtgttggaatctcggctcattgcaacttctgcctcctgggttcaagtgattctcatgcctcagtctcccaagtagctggggcatgaaccaacacgcccagctaatttttgtatttttagtagagacagggtttctgcatgttggccaggcttctctcgaactcctgacctcagatgacctgcccgtcttggcctccaaagtgctggaattacaggcatgagccaccgtgcctggcccttctgtgttatttaatactaacttttcatgggctctatagatataagtatgtttctcacatctatccacttaaggagttgagcttcctgcatgagacatagtaatgcttaaccaaaaatactttgacgaatgagtatattgggcatatgtgttttatatttctattttttgtagtattttctcttaattactactttttgagtgcttcctgcttcatcttctttggaaactaaccctgttaaaataaaccaaatatttatataaataaaacatatgtaagttctaaactttctatatttctagatcgtttatatttattcagtcatattaagattacagagttaaaaatgaaaaattgcatagtttttaccttaacacaaatttgattccagtggagacatatatatatcttctcttagaataaaatgaacaaaagtgtaccttatccacacttcatctttactttttcatttgtttaaaaatgatgattaaaagtgtattacagaagataacagcacaatgaaagaattctcttacctatatgcttcctatgcatgggactagcaaatctgatcttatttaatactatgatttattctcagtgtctgtaaacttatactcatactggagggaatgagattatgcttggagaatcccaaaatcttgctttaattttttttcctttttctgctatcttggtttatgctagaactatgcaagaaatatgtattgaatttatcaagagtacacagatcttaccttacagcataacagcagccccttgaagggataagccatgttccacttgtgttta

SEQ ID NO: 90263 - DNA, 1036 bp, Homo sapiens
tgtggtgactttgggctacttttgtttcttttttttttttttattttttattttttgttgctgttgttgttgagacggggtttttctcttgtcactcaggctggagtgcagtggcgcaatctcggctcactgcaacctccgcctcccggtttcaagcaattctcctgcctcagcctcccaagtagctgggattacaggcgcctgccacaacacccagataattttttgtatttttagtagatacggggtttcgctatattgggcaagctggtctcgaactcctgacctcgtgatccgcccgcctgtgcctcccagagtgctgggattacagtcgtgagctactgcaccccgccgtttctttgcttttctaagcacagctttttcatctcttaaaaggtagttgtaatgtttaccttatagaggcattttgaggtgtaaatgagaccacatctgtacagttccacagagtatcttctttagatgagaaagtgtgtggtcaggggtgggggacggggagttgtcagactctgtgccttgagaccctgggttcacagccatgagcaaagcaaaacagtagcggtgccctgtccgctgcacctccgtgctcttcagtctttagtgcattcctgcctacacctgtgcacctgcttagacagtcatccttccagcgatgtcctgagaaagagacgaaggagattccctgagacttaccaccatgggtagcatgcttctggaggaaatgagtgccagcttcaagaaaagataataagattgaaatctcctgtttatgtactgtggaatattgaaaagttggctgtgtagagtttgatttccatttagtgcatgtaagataagctaacaaaacattttgtttttactggtctttgaaccttttattaatgaataagtataacttattttcataaggaggctaatcctttcagaagaaagccttttgactatgaggccatatgttaaaattagagggaaaaatagccccattcatgaaattatacctgaagctgtggaataggtg

SEQ ID NO: 90264 - DNA, 1435 bp, Homo sapiens
taatgttcagacctgtgtttcataaaatcattaatttaactcgagatggatttttgtaggaaagtagaaagataattaaggaggaagcaaatcttttcatgagaaagtataggataggtttcacagcgttgtcctgagaaggagaattgcttgatattggaatagattgccatttgaatctaaaaaatacatttatctgtgaaaagataaattacttactttgagatgttatttatgtgtttgcttgtctcttttccttatcagattttatgtacctggaggataggccctgtgtcctatttatctttgtatttccagaacacaggataggacctggccccatggtagatgtttaaaagatgtttgtttaattgataaattaatagtagagatacttgaacttttttccttccagtagctcacaaatagtgtcatacctaagaaaacgagaaacaaatggtgtcctctcaacacagttaagatattcaatactcccttcatggctactgcctagctttgtcttattaaaagagaatatggccaggtacagtggctaacgcctgtaatctcaacattttgggagatcgaggctggaggattgcttgagcccaggagtttgagaccagcctgggcaacattacaagaccctgtctcttttaaaagataaaataatccatcaggtgtggtggtgcgtgcctgtgaacctagcttcccagaaggaggatcccttgagcctgggagttcaaggatgcagtgagctatgattacaccatcgcactctagccttggcagcaaagcaagaccccatctcttaaaaaaaacgaagaagaagaagaagaagaagaaaattcataggtctccatcacccagaccactttgaatgcttttatttgtatgaaaatcacatgcctatatttgttgagaagtatgtaattgttaaataactaaagtttgacccagaataatttgtaacttagatactaaattgcagaacctctatattattattattattattattattattatgtcttagacaagcaaaaaatgaaatcgtctattttcagcaagttcataatatttatacagatacaatttactcattatctttctactaacatttttgttgctgccaaagtaagttttaaaccatgtttttagattcatcaaaccgtaccagtgtgttaattctgtaatttttgttttgggtatcatagtggggataagaagtaggttaattaataccagatgactttttcagcattctttcatctcagtgttacggttttttaggactgtgataagtcattggcatttcattcatttaatggactattgcaaaaatattcattataagacatggcagctgtaaaaatagtaacacttatgtattaccattatgttttgtgtgattgtgtttcatattttataaata

SEQ ID NO: 90265 - DNA, 1041 bp, Homo sapiens
atgtttgtactgctatatatatttagttatttcattgacttttatattcgtgttatattcaataccctttcatgtttttcatttaaaaaatatttttatttcattatttccttactgtaaatggtaatgattttgtgaatatggatatttaactatgaatctgtaaattaaatcctactcttgaggataaattgaagtttttaattctgaatttatgactttcaagtcacatagagttacagattaattcagtgttttcataggtgcttagtgagaatagaatatctttccatgatttaaagattaatatttcattagatattaattgtgaatagtattttctttgatacccactggataagacttagaactttaggaattttctttaaaagttctctaaaattgtttaaatttgttattaaaatcttcattttggttttatccaatacataattcctttgttaactacaaataatggatggaaacattgttggttattttaagcagtgaggaaacctaggtcctagagcagagtattttatgaccggtaactttacagaacacacgccagagctctcactcaggaaagctggctgcacgttggatcgagtgtggcacacacagttccctgggtctacagatgctgtaagtagccagatatgtctgggagcagccaaatgtttttctgagaattttaacaacagtgataggagagaaataaaaaaaaattaaatcatacatttatgaaaccctgatgttaaccttatagaataaatgtataattgcagttctgctgtttttactataaagctgtagctatctttttgttttgtttgccgaagtaccaagatataaaatgcatttatgtagtactgtatcgaagttatttattactttaatacatgatagtgggtccacataatttgtcaaattttaattggttttgtcacttgtcagagtcaaatctcccaaattgtcaaataaatttattttagaatcatacatcctaaaatttgataattctgaagtttttcttcttca

SEQ ID NO: 90266 - DNA, 1086 bp, Homo sapiens
cttccagtcagttttgattatgcacttaataatattataaagaaacttagtttaatattttgaatgctggaaggtacataataaatgataatgttattccacatggccttttgttgcaggtattgaaaaattagtataaatgatctatatccagtatttattgatgtctatctgaatttatcttttcaaaataacttagaatatatgagaagtagattaaatctgcaaatctgttttgtaaaaaattcataattgcacacatccaattttaaaaataaatttcttttgtagtgaaagtacgctaaattaatatgtaattgcttgctctatgaggtttttcccaatgatacctcacatatgtgtgtattctctagttttatttgtgtttcattgccagttacctcaaagacattgcttagtggaggcatgtgtcagaaacagtgaaaaacttgatagtattttattaactacttattctcagttgcatcacagtttaactttaaaaccataaaacttgtttttatgttaattcaatctttgtattttcccttgaacttacgatttaccaaggaacaaataactccctacaacatgatctttcaatatgtctgcatgtcagaatattatgatttagagcaggctgtgatctatgtcgggttctactgtgtctatgttgaattggtctactgcactaaaatcgcatcttggtgatgctccagtgcacaaatgccccaagatatttactctagaagtgtagtgtaactgcggctctttggactaaggtctctgaaagggtcaattttgtactgaactctgggattactgggtaatacatctcaacctttctagctaatcttaccttgagctcaaatggttccttagatcatcctgacatgctagaaggccgagatgatgacaaagtccaagacaatgaaatgcctaagtgtggaaagctgcccttcctaactgcagcaaatcacacacagtcaccatcagagaggacagtccattctaaatctagcatatgtactcaaatttcttgaaattatgtatccataatagatacataaagacctataggataag

SEQ ID NO: 90267 - DNA, 1475 bp, Homo sapiens
caatacagactgtccagggggctgacacaaaacatcttccattctaagatttacttttatcacctgtcagggacccttgattcaagggcacaggagaagatcctcacgtgtggttgaacagtgttggccagcttaataaccaccagcccgcccaaaagaatgtgggtgtgtgtttccatgagacgcggtcagcccgtctgacggacagttgacacacaaagagcaccgcactatgacgacagcccttctgctgttcatcctctggctttccttatcaatggggcctgagatgcagtatgtttcttaatggtgatttgagccaagattactgcttgtaacggaaagtgtgaaaagcaaaacaatttaaactaataggtactgttatgtaggagggaaacaggaggaaaggaaatttcatccttgttctgcttgtttgaaaagcacatgtacaggtagccctgttgacttacagataacattgtttgagagtagccaatatcttacttagatttatgcatccgtttgcctttaaaatgacaaaggatttcaaagcagcacttttgccaatatgcaccaaacctgtttgatcagtctgccatcagtttttccttaacaggtatatatcttttcatataatgtatgtcatcttcaaaccattagcaaatatttagcaaacttaaattcttatttcaaatttgtgatattttctttccaactttacagtctagaagtcaggtctatatttttgtctgcatattgagactaacaaacacaaaactccttctatatttctgtagtatattttcctgaagaaattacccataaaagagaagaagaattaccaaattatgtattagagtaatagtattgaacatgtaactgattgatgagttacaaattgactattatatacagatttgaatcatctgtggttgtataaattgacatggacttaagctatcaagagctcagatgtctgagccttgcttagcataggattttatgtaccatgatatttttgtggcattatatttttccctgtcatcctgtatgtaattcaaacttgcttaatattacacaatgtaatctattgtgtggtcaaagaaaatatgaaagaaccatttataatttattacaatataatactaggttaatatgaactatagagaatatatatgacattattccttagaaggactgtttttaaatttaaattttgtcacataaagattttcatgtaagtttaaataaaataagctacattaaacagagttttttaagaggttatgttaaactacgaaaccaagaaaatgcagctcagagatcttagatgacctttaatttataccattgacttaggcagtggagttcatgatgtcatccttttaccccacttcaaatatcagcagaatctatgaaaaatgaatagtttgaagacacctaccaacactattgcgataaagaaaatagcagtg

SEQ ID NO: 90268 - DNA, 1056 bp, Homo sapiens
atttctagaagcacgatttaaggcttttgatagtatgactggaaaggttgtgattttttttcctctgatcagtactgtgctttggtagattcatttatgcatacaagtatttcacagtatttcaggttttcttggtttgaaaatgtattatacgttttactaaggttgagatcatattactcgtccgttattcaagttatctccctgaaatagcctcacttctgtttaggaccgcatttgagccagctggatcccatccatgttatacctctgtcaggtactacatttaagaggatggtgttttctaactatattgttactgttctataaataaaagacttatgacattgaaatccagtgatagctaccagatttccctttgaaatgcttaatgtgcattataaaggagtaatttttaatctttatttaaaacttcggaataatttgattattaatgaaagtaaatggtttgaacactttctgttcctgggacagcttcaccattctgtgtacctatgaataggctttcttttactactgaacaaaaggcaagttcaccttgaccgggagtataaaaaatttgcaaaagtttgaatacttctgaagtgagagacttcgaatgaaatatggttcgaacagatatctttactttcttgttgatgtgatgaaaaaaagatttaaaaatgagcagatagttaagtttctaaggattgtttttgttgcgtacgatagtaggaacaggatcccatatctgcctcacataaatgtatttgttcacagcataaatgaatttgaatatgtattattttcatagatttaataagtctttaagatgatcacatatttcctaagaagaaaattgtttattttcatatttatctcactggtttattttcataatattttactgttcaaaatatttaacttctagttttatgtttttatttgtataatatcaatagataaaaattattcctgtggagtattcctatatttgccattattaacacttaatctgcaggcagcttaccatcattagaaactgaaatattattt

SEQ ID NO: 90269 - DNA, 1103 bp, Homo sapiens
tttttctatcatttttgtaatttggtttccttatgttaaaattttttaatccaaatggtatttatttttgtatggtgtaggacaataagtcacttattttttcctataaaataagcagttgaatggacaccatttattatatagcccatcatttcctaattgatgaaatgacatctgtgtttcttatatacatggatctttgtgctgtctgttctgttctagtggtgcatgtggtccagcactccaaatgacatgcatctatttgctaaacatcgttgataacatgttcccttttaggcagaggaatttgaggttctttattcttgtagcttttaaccgattttaaatttaaacagcacaaatgttcagtaatctaaaattatcagactctttccttatgggtcctttagtgagaacataagttataaaggagtatatatcttaagctgtcttacataaattgtgaaacaagctccgagtttatatattggagcacattcttccaacctacagtgagctttaaagcaacatatatggaggcttatattcccctctactttgaacattttttgtcttttttttaggatttatttttgcccagaaaatttataaatcataattaatcctggtaaataaatgtaattaacttcttgagtttaatttacataaagattttcttcggattattctatatgcattttggaatcatattacaaagatacagtagaaaccccctttcaaccaaagttttatataaacgtataatattgtatagagtaattctttttgtggatgtgagtttttaaagtatactataaacaggccaaaaaaaaaagaaattgcatacctgcctaattaactttgcacacatgatacacacctcacatgtgctcatacatatactgtaactgtttgggaatctatttttagtcagatgaattgctgttgcttttcatgtataataggaaaagcgccgataatgactcacatagttgaactcatttgtgtttaatataaaaactagtggtaggaagaaaaaaagaacaagtacctaccgtattacctgaacatacttaatgttatttaccttaatcctcatgatg

SEQ ID NO: 90270 - DNA, 1078 bp, Homo sapiens
ctgtttagttactgagagatactggcttatttttgtcctagatacagccttcttgaaaacaaaataatctgttttccaagttatctctttcttcccttccctgaatgttaggattcattgcttatattattctccatttaaatatgcatcatacattgaaatgtatttattttggcaattttaatttcttcatatgattggtgattgtctttgatgatgtttcatgcctagcattttacataaggaaataatattggtggtaccaaagaatctccattcctgataaacagtactaattaagtacagtagtagctttttgttttctctccccagtgtcagtaaacaatggtgaatttaggaggtgtctgtaatgctgtagaaaacatgttggagatctgcagaattaagggggtaatttggaacggtttacccagcttgaagaattcaaaaaaaaattgttccttttccttttaactgtcataaaagtggacatttgtgtcagtcaccttcagatgttttcctgtgttatttcagacatgacccagagctgttactctaaggataattacacatttaagagactctacagtcctatcctttgcttagaatgtgctagtgtctctgatacgtaaattttaaagggaaagctggctgtggtgtacttgaaaacataccaacattctggccttgaaaacagaaaacctaggttaggattctgccttaaccactcaccagccatacagcctgtgtagccagctcatcattgtgatatttaccttcttctctgtgaattgtgtagcagtcttgacctcagagggtcatgcttgccttcgaagtcgccaagtcagtggaggtacctggcatacattaggtgcttactcttttatttcctcttacagtgattgttagttcacaatagggaatttatatataaagcaagtttgacaattcggtagtgactcatgagagaaagaagcttgtgtgcatacattcactgtcttgcatgtatttagtctaagatctcagggaaatgtaacacccagattgacagagcctttgcccaaagcaagttgaaaat

SEQ ID NO: 90271 - DNA, 1058 bp, Homo sapiens
gagccgcgccagcgcttccttcccggctcccttccctgctgcgccaaggtcacccagccacgtggcattctcttacctcatggcaggcagcactgcgatcttatcagagctcacatttgcagccttcgtgaactggattttgaaagttaaaacagttaaaaaaaaaaagtaaacaaaattgaaaatcgtgatcttatcccctctgacagcttcatttatcaaaattttaagggaaaaaattgattgtgaaaagttatagtggggacggtatgattttatcaggtaattgatgtggtttttacttttatatagactttttatcaactaattcaatataacttacatattttaaaaatttgcacaccctcacacacatattttgacccccacctaaacagcagttttagatgaggaaacaaagatcatgttgcccactcgtgttgctactactgcagaacaagttactgttccagctgaagccgtttactaaagaatagcatgacaagtctttcaaattatcagggaaatttagatacattgtttcattagctttgaaatgtagttcagaatatgaagtaatgcacattattactctttgcaatttcatttatttctatttgcagtgaggaaaattactatttcgcaagtttttatcttaaatgattttaaacttacagaaaagtttgcagaaatagtacagagagttccatatatccttcacccaactttcccaaatgttaacatcaaacataaccatactacttacgaaagcctgagaatttagcattaatacgttgccattttctatgctgtattctcgtattcagagtttatcatttttccactcacatcctccttcattcccagaattcagcccaggaaccaacattccttttagttgccatgtcttcttggtcttctccagtccaggacagattttcagtaccttggcactcttaaggaacatggatttgttattttgtagaatgtctcttaatttggaatagtgtgatgtttactcatgatttaattgaagtcatttaagaaaataccagaag

SEQ ID NO: 90272 - DNA, 1132 bp, Homo sapiens
cagatagttctcttgcaattttaatatactatttggtagtattagaagttgacttcatctaaagctttattattttaaaacacaccaaactcataactcttctcatttatcaggtatctcagtcccatagtttgacattctttatgttggtaactaagtatttattgagtctattgacattttcttagagcatctggtcaacactgaaatgtggtacttcttggtgttttacaaataaaccaccgacaggattaggcttttttagattaaccttgttgttcagacaaagcaagcttcttgctgaaatcggggaccagatagaatccccctcatgcacatttaattgtaatcaattctttcagcttggaagtgctcttgccatttaaaggagtgttggaaatagtgtgtgctacggggtggcaatgtggccgcagctcatgtaacttgtaaacacggatgattaatctgaattgcatgaaggcaagggggagggtacttggttttgtaaaacttgaataatcagagaggtgagaagaggagatcgatggaagcaccgagcaggcagaagagactgtaggcaataatgtgtaccagggaggagctcagaagttgaattgtgcggcacatacagtaaaagctgaaaaaggaagataatccaacagctggctctttagaagaggctgaataatactttaggtttctgtttgttgtcttttaatggtttcctaatgtattatctccatccatatttctggccttttctccctgtatgtaattttttaaaaaagttttttctttttgtgatgtgtgcttttagatcatgatccagaactcaatcaaagaagtaattttggttttagatataattctgtgatggcacttaatatattttcttttacttttcactccaatttctctatctgcttctaaggaagtatgttacgaagacattttaaagatatttgatgctcagtttgaacatattaaatttttaaatatcttttttacattgaaaaggacaattgaaatccagagctatctatttttattatttatggcaggatcagtttgggtgtgtttatcttctaggcattaagatgtcaagatattcgcctgttacattaatatgcat

SEQ ID NO: 90273 - DNA, 1081 bp, Homo sapiens
cacaatacccatggctcacatgtgatattattattatctgcataatgctcatattcaggacttctgcagttgtgtttcatgaatagattgtcattttaattcatgacctcttttttaccaatcccagcgcattatgcttatgagcgggccccataaaattcagaattcttacattgctcctttggcttcttttagaacatttgaccttatttatgaccttcttttgtccatatagtcatcataattgtcttgatatgtctttccacatattagggtgatcttatccccagcatcatgctctgagcacgaattggttacctctgtatttagggccgttatagtaaccaaattttcgtcatatactggtgaaaaatctacaatgtagactttctgtatctgctgcctttgggtgaatttccaggtagtatttattagagtgatctttccacctatttcttgactctgactgtgatattaaccttttgtaattaagacgctctgtctctttgacacatagtgtacccttttagatcgtcttaattttttttttacctccaaccattttttaaaattttatccatttactcgtgtaccacttcgttggtacctttcaaatgttaaatgctgtcccatttatccttagtaaccatgctgaatttttctgtcctttttaatatttaggttttattggatgaatgtagattgcaccttctctaagtgtgtcttaaataattgccacttaagggaattaagaactacaagggaaggaaaatgctgacccatagactaaagcagagggagaaaacgttcccactgggtccaattttctaagaaggaccatcaggatagtggctagggcctgaaattatggtctgaatgacctctagaaaatgatctgttcacaaaggaacttgcctgtgtttgcaggaagcaaatagggataggtagcagtcaccccactgaagacagacagctcactctcttgtccttggttaggttataaaagctcaagaagagaaaacagtcattaagagcatagagatagagttgacattgcagggtaagacataatctaaggtgt

SEQ ID NO: 90274 - DNA, 1319 bp, Homo sapiens
tttctacaaattatgctagatattacctgtatctcatccaaaagaatgtggattgctaccagaaataaactagggtgttaggaagtaatatttccccccttcttagttagcatgtcacctgaagttcaaaagtggattatatataatccatctaattatacgaggcgcctgtagaaatgtgtttagtgtttagttcttttgattaaagtgctgcttgatatttacatcccaccaaaggcacctactcaaaatgtaagtaagcttactagcttttatgttcttacaggaaataaaatctgttactaatttttttaatttaaaaagtctgttaatttacaccgatttataatttgtcttggattccttagctgagaagtatagttcatcactgactgttctattacctgacagcaattgataaagtatccatgcacaaagtgtcagaaaaggttaatatttattgatttttatggtgctacaaccagtgtagttttgccatcaaagatgtatggccaccagcaatggaatctgtagaattgcaggatgcacactagattttattctaacctatgccagtattctagatttttttaaatgacagatgtttaactaaatacaaaaagccctaaatgtgcagtgactctgaacctgtgacttgaattcagtattttaatatgaaacataagaacagcacttaaaatctaaaaattcatccttgctttgcagacagcaatcacatttagctttttcttccacttaactctatgctgttgatccgaatagatgcccaagcaagtgatagctgagattatgaacaataaagagcttgcatctttataaacaaactatataattagcagagaaggggggaagcctctgtttacttttaaaggagttccaaagaagcagtttgagtgccacgtcactattcaagtatctgcaaacaaaaaacctcagggcccagaatcatgcattcattctctggttgcagactggggatagaagtgaggagtgtgcatttttttgttgttgttgatttccacctgtatttccctgacagaaatgtactccttggtttacccataacagccagcgacgactcgtatgcatttgcttgcctgaatatacccacagtttgtattagttgcctatttccagtagttaacaggtgagataagacagtttatgaattacttttttaacccgggtagaagtgtatcaaaacctgttgccttatctttaagaccctggacttgtaagtgtgaatcaaaactaaaactctccacctgcatttgagatttttaaaagcgggagttgga

SEQ ID NO: 90275 - DNA, 1053 bp, Homo sapiens
accaagttaatttatcatttttacatgtgattctgaaatatttttatctgtattgaaaattatatttcttaaaaaaataattctctctcatcacatccatatgacatcaatcctaaggaaagatcaagtttaccttttaggagaaagaggacagatatttaagaaaatatgctgggagtttaaaataagcttgtgtaagaatgctatgtaaaaatacagataactaattagaaattagagaaaacaacagttagaatgtctggccttaaaataagatttcaaattagagttaatgtattccaaaaataaaagtcagaaataaagaagaaatactagaacttttaaggtgttttatataaaggtttcatttcagtatgcaaattagacagcacactagtgtgtaaaaagaaaggacaatctaaagcttgggaagcaaactgtggaaaaatcaaggaagtctacagccagccatggtgtccacttacaaaaacaaacagagaagaacgcgaagaaaactagaaatggaattgtgtggctaatagggcaagaaaatttgagatagtacagaagaaactatttatgatattttcagtaggtacatttctttctgacaaacacacatttgaaataaatatttataatgaatggttggaaatttgtaaaaagtagaggcatattagcaaatgaaaagcccttcgaactatgagctagtgggtctggaacccaggcattttgctcatggtcaggattcaggggaatcacttaacctcactgtacttaagtttccttgaatacgaaatgaaagaaacaactttatattaatagatgagcttgctggctcttcctgctgtcatacacgataattctgtaaaattacaaataatgctagatcacaaccctaatctcctggtaatctctttcatggttttcatttgttcacgtctttgagattatgaggaaagcaaaatccctgttactgaaatatcaatactttcctcaaaatccctgttagtaaaatatcagtacttttctgaaaggtggcccacacttttg

SEQ ID NO: 90276 - DNA, 1045 bp, Homo sapiens
tcacatggaggtcaatgccctcttgaacagtagcatagaccttatttagaagtctcatttatcaaggtatgaaaacttacaagcagggctgaggtagaaagaaagtgttgttttgatgctgatttcctcttatccaaggaaggagaaagtttgggtcactgatacaattgttctaccgttacagatacctaaaaatcttgtttgctttaatcttcaacaaaatcattacgataacattgccacttctgtaaatgaaagcttctgtagggcatttcctgcctgtctgttttgctgcgcgttaagaagctttggaattaagttctctctaaacccagggaggtctcccattttcttgctaatgggaatactcccaacacacatgcttcatgctctctcacctgactctccagggttttcatacttttaacaggatatggtttttaatgaggcttctagaagctttagaaacttctttaatgattttgttttgaccttttgctactgcctttactgggaccgaattgattgtctcaactgaaaatttgctgccaaaatttggattttaatattttcagatgcaactttttttttccttttgttgattctggaatgggcacatattaaatattacaatgaagaataatagtcttagttcccttcatgtggtagcagggcagcacacaagagtctaaataacttctctattatgaccactactactgtgatacccccagtgcctccaaatgttcaaatgtactgaacttttcttttttctctatgatacagacattttaaatagacgtaagcagaacatgttcactgcaccaattacttgtaaacagtggaaatccccacaaggcaatgagaagggaaggcaggagtaacaaaggcttgcccttggtgtggggccaagcccttcactttctctcctccctgttcttggtttcttgactcattaagtcaacattgtccctctgttgatttgcctaaactgttttgcacagagatcttgtagaaaattggcaaactgcagaacactgagcgt

SEQ ID NO: 90277 - DNA, 1021 bp, Homo sapiens
tgtcacatccccacttcctcatcacatccagctctccgtcctgcttgcattcctcctgacatccaccagcctgtccttgctggcctcggtgtggcccacgtgtgcccacaacagagaccctgctcttgacgtcctctattccaaggggataataaggtttttggcagccattctgttttattggtttatataaaacttcataagctaaaatctcttcatccttcttccccaaactgtactcattttgtttttaaaccaaaatataagactacagttgtctttctccaatgtcatgagctcctttgtcatttttccattctagtgtacacacactgtgtcctgacataatatgtgcagcaagcattacattgctgctgatgttgagatgaaggtttgtatcagtgggtgtcgtgatgtgatgaagggacagtggtgaatttagtcagggttggtttcatggaggagaggcgtgttgagccgtgactggaaggaaggaaggaatatgcctgggagaaggatgggctgctggggtggatgtagtgtcttgtccagggctttcatggctggacggtgtgatctcatctgcattctcagcattggtcttcaggttgcagttcttgaaacatgacttcatcaatagctagggagaatctgacaaagtcgtaatcactaaattttgtgagataattacatagatcatagtgtttttcctttaaattgagaaatattgtcaagcagactgggatactcatgtcagcagtcaacatattttcttgtagaaaagctacttgtgaagccaagttataatcagaatgttgctttctgagtttaaaaccagaagagagtaagtgagttgaacttaagagaaagtcctgactctgatagcctgggccataacctgcagctttaggccccacccagtggcctaggactgtggacgtgggactccaggatgcctcctaccctgagtgcagctgaaggttgccttttctcatgccccgtgaggttgtcgttcttcgct

SEQ ID NO: 90278 - DNA, 1020 bp, Homo sapiens
tatatatatatgtgtgtgtgtgtgtataaacattataaatacataacttatcacagtctgttggtgtcagcattttaccagtttgagcaaagtgtagaaactttgtttccatttgctctccttgaccatctctcatttataaaattatatagaataactacatgcattgagaccatgttagacagtgttctaatttttgcttcagtcaccaaacataatttagagaactcaggaggagactgtgtgacatatacatactaagtagtcgccttgaagtaaccagtaacaggttttctagtgtttatttgattatttctgtcaatgtaggctagtggtgtaggccaacacgcgtttccagaaatgcagccctgttggaggcgattacaacaaacatcaatgactgaatatccttttgcacatctccagttttataattattacatatggctaatattataaaagtcatcatcataactgaaacaaacatgcgatatgtttgtctgcacaggccgccataacaaaatgagggccttaagcaacagaaatgtattgtctcacagttatagaggccagaagtctgcgatcaaggtgttggtcaggccatgcttcctctgaagtcactaggatggaacagttccaggcgtctctgctcctggtgggcccttggcttgtggcagcgtaactccagtcttcacatggcattctttgtgtgtgtctgtatctgtccaaattttcctgtctttaaaatgacactagacatgttgaattagggagctgcagtactccagtatgatttcttcttaactaattaacatctacaatgaccctgttcccaaatacaggtcattttctgaggtggtggggattagaactttaacacatgaatttttgagggacacaatcaacccatgacatatggcaattcaattaatttatcatagtatatataagtattcagatgtatattctgatagctaatatgaaaggaatttgtaagctctacaactgtgcagatgtgcg

SEQ ID NO: 90279 - DNA, 1034 bp, Homo sapiens
catctcactttttccccccaagtatcaaattacgctcggcaactttacctgattatgttaatcatgctaaatatgaaactgtctttctttgaggcattggaatttacagaagctatatttatgcctttcagtagcattcactacagcttacatagtgaaaactaccaatgatgaagtagattatttttttaaaaattctgtaaattgtttagtaccccacatggaagttgggggatggggcatgaggggacactaatttgagatcatcagagttcttcatgcaatgaaagttgtgcatctctgatattatcactttaagtatggggtaaatcattatgaccttagtaactcccaaggtctatcctatgtatacagtacatatagtgacaattacagctctcgagattcttccgctcatctccttctttgctgtgtctttgggaggacaagaatgagaaatagtttcaaatgaaaatattagtgaaatcttagttgatatcgatctactgatttttatgtacactgtatagaactgccagcagattctgggactgtgcccattaatacatacttacgtcatgcaggattttgtcttaatatgctcagtctttatgtaaagcgtaattctgaactcatttgagtaatgtacatttagcataagcagagttgtaggctggcattattaaaatgcatagagctgacatcctgggcttctgctgaaatatgcttttaattgaagcagagttatggcgatatattacccacgtgagtctgattatagctcagcattggcttgtacagtagctccttgctccagaaaaccttgtagtagcccatatgttgtggttaggcatttaaatattctgtagtatgtatatctgaattgtttgatcggtgtaatctaagcatatgttatcttgggaaagatgcatcttgtagccaagtcggtttgaaaataattttttagtgataattgtatttaccagtgattaaaggtcattcataaagatataagttgtttgatcgaaattcta

SEQ ID NO: 90280 - DNA, 1013 bp, Homo sapiens
attctgtcacatgttcgtgtcatgtgggtttccgatatggaacatcagattatttaaaattggtggattaactaaatcgagaattttcccctgatctatgaggaaaacatctctactgacaagttgaagccctttgaactcttccagataggcttacatgctaatgcataggcttctgtgtctctgaggagcagtataggctggacaggcagaaaagagaaaaggattgctgtatcctatggcatagacttttaaccatttagtcaattgtgattttgtttaaatctccatgtttatgtgtttttaatttaacttgtttgctttctgatgcatttgatggctttgctgatggtctggataatacttgcagtagctctttatatgactgtttatgtttcaaagccaacaagaaacatctgtgagttaaaatcaagcaacttgtattcatgtagatcagcgtcagcaatgccttcctcttacctcagcagtcagatggtggtgagagcctaaaaccaaccagtcatcagcgaagctgtgcctgcctacaaattccacactgccaccacacacatcctggtaagatgtttgtatggaacatctcctcagagaagggaccatgcaagcaggtcacattccatgtgagtttccttcttgtatgtttcatggcgatgtttagtagcctatctcacacacgttttcacatcaaagatggctcattttaagccccttcttgactttaagtctaaacagatgttaataaagaataggagaggaagaagattaatcttataagcctgtgactgagtggaaagtatagatgtctcacatcttggcaggctccacagaaggtgaggcagtagagggagcagtgcctgttgatcggccaccgaaagtgttcctcactggagagtcccctctctgcgagatccccacagtcagaatacgttcttcttcttttgatgtttgtgccagtatgactcggagtaagttactagtttcattggcatttgccg

SEQ ID NO: 90281 - DNA, 1105 bp, Homo sapiens
ggcctcagttgagtgacaggttctgtcaaatgctcataactcaatatcactctgctcgagacccgagggccaccaaggaaagtgtaatggagcatttggacttccaagaagcttacgatctgttcctggttcagacaagattaagtaactttgtggaaggctaagaacatgatgaggttcatagagtatgttcagtcatgtgacagagggtaaatgttctcaagtacttacttcaacagagagggagactatgaggctagaggggtcccgaaaggcttcctacggagggcactgtcgctcggccctggaggagcgcaggatgtgactggggaggacgcggcgtggaccagccaagccacacacatggagacccaagcgttgatctctgagaagagtcctgagcatggtggtttcatttcaaatgtggattgttttccagttacaattttactttgctttaagctataaaaactataaacatatgctacaaatttattctaaaatatatgccacatgaaattgaaacttacccaaatgctggtatgaggcttgtaggatttagtggctttgtaactgaactctgaaatagcacattttcccatattccactttttctgttggcttaaaatgggaattcagcacacagccaataatttgagtgcttatgatgggcttcttcacaagatttatctaagagaaaggtgagtacttggttttcagagagctaccaatacagcaggacacctccattgttaaaggtgatctaggagtagtattgaaaacatgtgcctacaaatgtgcggactttttagcattctctaaggtttccttcttttgcgaacttttcaacatcatgtgtctttaaaggtttggaaattgcctgcctttatgatgtgttaaccttttctacacagcgtcctattgaagacaatctaaccttaaagcccgttattgaaaatacctccactggtaaaacccagacattctatagtctctttctcaaagcaccactgttgaatctttgctttatatgaaattaacttacctccttcaaaataagaaaatccaataattattattggcgattatggaatacttaccgagt

SEQ ID NO: 90282 - DNA, 1052 bp, Homo sapiens
tttcctatatcatattaattcaacttctttttgttgatgtcgttgacatgaggaaagtctggagtctactaagtgtttattaataggaactatgagaacaaactttagactaatctttgagttcctggctaattattacaaccacctaaattagtgttatccttagggaaagcaaacaaaaataaggaggaaagccagtcttccaactaataaccgatgttaaaattcggaattaagagaaaaagaaatgtgtggctctaaatcattccattctggaggcctttagagaggatcgagcagaagggaccttctggcgctgttctgagctgccactcactgctgggacaggagccacacgtggggcccaactctgcctgttgctttgggccattgaacagccagggtagtacaaaaaactgtcattgcttgacagtgaaacaggaaggaagcaaatggaccccgtggccttcctaaccttagaccacactttttccaggcagagcgtatggaattgtgactgccaacatcagagttctagtctagccctgccaccagactatggactgatatgtttccctgattgaacttcagttataatctttgtaaaatgaaaataatttcttgttgactggctcatagaatacttatgaggatggaatatgaaagcagtgtgtgtactgcagcatcctgtgtgaacatacagcatttttgccatctccatgtcactgtgtgtcctcagcattggcactcattgtatgcagacacatccactgcccctcacagcacacagcagtttcaccataagacagacttcggcatacaaactaataaatacaaatgcagtctagtgttgatttttctgctgacgtttgacaacttactgtgaaataggaataaatgtgagctctcggtgggaatagttaacatactttaggatgctagatgcactgccagaaaactttaactacgtcatgtactctgttaccaaaggaagtattttgacatattatagtgaaatggcactactgttaaattaagaattgtcaccaaaa

SEQ ID NO: 90283 - DNA, 1271 bp, Homo sapiens
gtgctttccttagctacccctcaccggggtggtaaatacgcctctcctcggccccaccgcacttagagatggcttctggcagcgctgggatgggcaaatgacctcaagctcctgagggcctctatcagcggtgttccacattattgatagcagcagagatattgacagtctgtgcttggaaggaaaataggagtttgatatgacatattgtgtgtctcagcaagactcataaataattttgacaagtttttgtatgcatgggaaagtccttgattcagcctcccataaaaataaacttctattatggaatgtatttgtcaagtgactgcttgatggatggagctgcatttaccccttggcagttcgatgagttgtagatgcacagcttaccagagaggatttacgggcagtacagaaataattattcagtatgaaatgcatagttcctctacctgaattttcattttttattatatttcgtttctgttgcatttctggtctaaaacaaaagaacttgccttttttttctctagagctattgtttggttgagggtttatattaaagcctgtgaagaatctgattcagcccagaccctgtcccaaacttagctggcgtattttcattgaatgcagagttttagggttatttcttgagagatttacaaatatatatatataaaatatgctctttggaaaattcatttctattgagattgaaaaccttggacattgactgccttattttttttctgaggttatcacagcttatttacttacttaaatgtaattattcatccacatttctgctacagaaagcagaatttgtacttaaattcttgtctcctcactctgaaaccttaaaacatgtcatccccgccaccccccccacccaccccccgccgccaacttagaattactttcttatcatacacactctaagtgagtatccttcagtaagctggaaacttaaggaagtatcaaatccccaccctcctgggatgctgcccagcttatcgcacgagagctcttgctggtcatgtctggtcatcctgcaacaaacctcagacttgggaatgtatgtttgaggagactaaagtgaacagcgggtctatgggagttttgattcttcgttagaacatagtactgactttttagaaggatttccatttgttgaatctccgttaaaataaagtcctggatccaaacaaactgcggtgaaatcagacactgagagaggcatgtcggatgaacggaccctccgtgctgtcttg

SEQ ID NO: 90284 - DNA, 1039 bp, Homo sapiens
atccatttaagtttttttcccaaaatcagaaaacacttgtcagtatttaataaatttttgttgaacaaaagaatgaatattggatttattttggtctcagtattcttatcatgtcaaaataagctctacttaagtagtaccattttaataaattgaatgtatcttaaactcgcattataattccactttgaaaaggcttataaggagaaatgaaaaattattgaggcaaatttggtatatttgtttgaaatacttccaagaaatataatttgttgaaagtataaattagcccaatgacaaatagactttttctagcaagtgtttaggaagatttttttaatagcctagtaaaatttacatagtcattgagaataggagaatttaaattcctgttttgtgtttaaatatttatcatgtgacatattaaaactcttctttttaaacctgcaaaaacaagtttcacctggttattgatatatttaaatattaaagtaaacctgtaacactagcactctgttacagctgtttgacatgacagttgagctgtcacattgtagaatgtatcgtcaatacattctgtttatggtgtccttgggcacctgtgctgaaatccattttccgacactttttgagttagctgaatgaacatcacagggcttgaagcccacctgctatacacatagtgtatgtacacatagtgtatgtacacatagtgtatgtacacatagtgtatgtacacatagtgtatgtacacatagtgtatgtacacatagtgtatgtacacatagtgtatgtacacatagtgtatgtacacatagtgtacgtacacatagtgtatagcaggctctgggggtatctacagtgtacaatgctgaaatgatttgtaatcattttaaccccaaatattttcttttccagtgttactacactttgccaacgactcatagacatgacatcaaataaaagcatttttttccaaattattgaaaatctgaattagactagcaataatagaaaggttggaagcagttctgccccc

SEQ ID NO: 90285 - DNA, 1046 bp, Homo sapiens
tttttagagacagggtctcactgcgttagccaggctggtctcaaactcctgacatcaaggtatcctcctgcttccacctcccaaagtgctggaattacaggcatgagccgtcatgcctggcccattatacattcttaaagaggactcacaagtcaatgtaaaagggaaatattatttaatatttaataaattttgtgagacttactaggatagcagtttgacagagtctatttagaaccttattggatatagttcacaaagataaaagttgatgcactaaagagttaaatttttttaattataaaattctatacggaaataaaattaaaccaaattctgatgagagaactttctcataatttgaataaaagaactaacaaaataactgattaatagatataactatataagctacattctgtatgtcagaagttcccagaataaaaaggcaactagaatactgagaaagtattttgtcctcaaacaacacattaaaattttatatatttttatataaagagctcattatcattaaatcaataggaaaaacactacaaactcaataaaaacaggtagaaaagatggcagatcaatcataaaatagaaaatagaaattttataaacaaatgtctggaaaggtatttattataactagtaacttaacaaatgcaaacttttttaaaagaaaaaaatgatatacccttttgtctatcaaagtcacaataaaagatacataaacacttggtgtaacgtgcatctgctgcaggtaatggtgctcattggttcctagtttttggacattaacttgatgatgtgaatcaggtgccttaaattttttcttttaatgagagcaagagaaagaaagtgagagaactattttcacagtgctatttactgaaagtagcccaaatatcaaggggttggggccacacagtcactttgactgtcattcacctgtgagtctgctgtatcacatagtggcttagagcactcctcagacagagctgggtttaaattctggatattgtttcacattgtacatggcc

SEQ ID NO: 90286 - DNA, 1154 bp, Homo sapiens
ctactacatactgggcttaatacaccatgttacctgtgtaacaacctgcacatctttcacatgtaccctggaacttaaaataaaataaaattaccacttagcatatgtcatatattaataaaaagccttgaattaactattcatatgctaccattaattgtaattaacagacataattattataaactggtattagtgatatatcctaattataattaatagtatgtatattacatgtaatataactaataatgtatcatataagttaattagtaattaatggtagcaaattttaataactacctgtctaagtaaatcagagactgaatcagccaaattcttgggggctaactaatcaaagctaccctctgatttaactgccgacagctgaccacttcatcgtgaccacccactccttcatcccacagtggcaggaagtcagctttctctaattatagtcggctttctctaattatagttgtgaatcgtcagctactctagctatctgagcacctacatgaatgcaagtattggtggtatagagtaatttagtcattccccacattcaatagaacctactttaaagtgggaaactcttctttagattactatatttagcttatttcatgtactactgttgtagttgcactttgaaatagttcagttatttaccattgtaattttactagtttgtggtgcgttggttttgatcaatctgcaacaaatattgagctccctcttcagaacgcactgtgctaagttatggggcaagtttcgatctagaggcctgggtttgaggaagaaaacaagaaggaaaaaggagagcatgtgggagtctcaagcttatcctcaaaatgtatgtgagttcatgattaagtttgaaactaagattttgtttgtagactttcaagagaaaagccaaagaagttaggctatttggaggatttcaattatgttttcaagaactcctatttgggtttctgaaaaagagcctaaaactggtgtgctggtttcaggggtgtatttgaaattctgttcatttgttaagagggagaattctgttaggactgattaacttactcgcagatactgttcctttatcatctatgtctgttgattaattcattatgtaatcctatcctttaatcacacca

SEQ ID NO: 90287 - DNA, 1038 bp, Homo sapiens
acttaggagttaaacgtgtatttaaaatccatgtttcaattactgtatcacctaatcttccaagcatacacatggaatactgttcctttgtgtggcagctgtaaaaatcctaagcagtttttactgtcaagaaaactctgaataaacaggggctgttaacttaggcagatatctgaggttatttggtggcaatcaagaactcgcagcacttcaactaatgggttatgatcagaaactgttcctaatagccagctagacggatctgaatatgaagatttctataattttgttgtcagcttgtgatgtactctagtgctaattatttggaacaattatgttttcctaataacaaaagaagaagcagtgaattaagcaggcttaccttcacatctttagataacagtttaaatgcacttgccattaagaaataacatttctttttgccttacggagccctaattatttaagatgcttgtcttttaaaatctaccgcttccacttcttctaaacctgttcgatgtgtcagtttacactgatgatttcagtaactagtattttctcagtcttaggtttatgcctgtacctccatagactgcttacttcatttagttattcaaaaaccataattagtgcagtaattaacgtgtggatccttcaaaggaagactgctagaatcatgggacgtgtctcatcattcttactgatgtgtggatgataaagagactgaggctgctgtgacaacaggacttgtattactgcacagtaacggtgctgcagggaaattcagacaggaccttggtccacagagccccaacgtttgaaaaaagtaattatccacactgtttccataattcagctaggtgttatcctgcatttgcagctgtcaaatcatttgttttaaatgtttttttaaatatcttatgaatacttgaaagttttgagttttgcagattatctctcagcctatttctaagcacaggggccaagcttttttttttttttttttttaatccattacagagtctttcctgacaattt

SEQ ID NO: 90288 - DNA, 1051 bp, Homo sapiens
tcatcttctgggattattgttcaagaccagcctctaatgggaggtgaaacggtacgatggtctcaacacctttcttctgaactgtaatacatatcacaaaaagtacatccataattcagggcaattgtcagtctttttagagaaggggccagggtggaacaatcccagtgagtaaattatttctcagcgtggacttctctgcatgtcgggcttaaggtcaccagccgggcagggtggaaggagcttgcctctttgagaaaccaaggagtcccagtgatctgttaccatttggttatgacttctaaagagccaaatgctattccttcaagcctgttttgcaggcagaaaataccagcagtgtcatttaggggttcctttgatgatgactactgctgttaactgacctcagcattaaaaaaaaaaaaattcagggaatagtttgcaaagaaatgaaggaagttttgcatgatatattctataacttgtcattatatgatttcatctggatgaagttcctcaggagtaggatagagcctctgtaaatggtcattagtattacattctgtgtttatctaatgaaagtgcagtgacaagtagctgcttcttattaaaatgaaaatcctgcattatgtacttgaggaacattccagctaatgaggatgtaatgtcctcagtacaacgcagaccttctttttgtgttcaccaccacaagatgctggaagcttgacaaatgatatcatttaagacacatgcctgccttagggacctggtttttggcttcctgtttctggcttttatttgggtaacgtttataatggccacccgacttgtacctgggtaatgttttaaccccttccccagagttctcaattagcatgaatttactacagtcagagtttcctttaaattggggtgggggtgctaagcactgaaaatatctttcttgattactttaccatgtggacatatgggataaatactgtatttcagatttacataaaagtagattagtaatgcacagctttcagaataaaaactgataaaaaagacc

SEQ ID NO: 90289 - DNA, 1049 bp, Homo sapiens
tgagtgaggcctggcggtaggtgagcatggcgtggagctcgcgggagagttggagatgtgatcgcttctgtccgtgtgtcagcgtgatggcctgtccacgccgctttcttctgactgtgagctggcccatctctgtacgcttgccccacaacctcagcatgccctttggaacatcagaagtcccccacagcctcagcaggtcttctgagaactaggaattagagccccactgtcgtggaaatcaactcgtcatcaagtagggccgacaatgagacagctgaccatcctccacattccgagcctgaaggggaaaggttttcccaaggagaggtgctggtgggctcgcacgccatcctgagcacagcagacagcagttaatgcaagactatatctcggtggcgggttttacttaatgttctttattatgaagaatagcgatacctcaaagccatacattttttgagagtagcttctccatgttgatttttctttggatgggttgcttagaacggagccaaaagagagccacttggtggagaggcaggtttgcactttgccctgtttttgtgtatgtggatgtcaaatgtcaatttgtttggtaaaatgtgaagctgaatttataaatctgtgctaagcaattagtttggaaattagtgctatctctaggaaaatccccttagcaggcatcagattcaaacgatgcaactcagtaggtgtgggggcaaaactgcaacatattttcaaggcaaaatcttacaaatataaacattatatcaaatataaacatatgtttgcagtgtacaaatgtcttgcatattcaaagcaaataagtcctgatgggggaggaaaaagtatttggatgtagccgttatgtttaattttcctcacacagtcagtagatagtctgtgtctgcaaaggattggtcctttcttgctccccactcacccaactctgtggttctagaaccttctattaattcccattggtgagcccatgaaatctttgattccttcttgattgctctctgaagacgcctatcaggcactgt

SEQ ID NO: 90290 - DNA, 1040 bp, Homo sapiens
tgtgagaatgtgagaaaagttattgtttctctcatccccacccctttgtacttcgtacagtccctaccacactgaagttatttacagcatcagataccatttaaagagatagtgaaggagactgttgccttcgccaggaactttccagaaagaagtcctataaattagccattgctcaggagtggctgtttcctaggcggagctagccctttcatttttctgcataaggctaatttatttttgcagccagatgtgggctgacagccatcactcagggcttccttcccccgccgttaggaggtctggaagacagtcacgttccccattttgcagaatccccatcaacattattgaagatggatgtatctttaaagcaaagattgattgtggatatcggagttatggtgtcatttatcatggtgaatattatttagacttgggttgtacaaggctgtaacttgagacacagccaggggagggacaacctgaaaacgcggatccatgaattttaatggatggatgcttttttcaaagctcaactcactatagcgtgatttacttttcttactgcaaggaaacaagcatttcagtcttaaagagacagcatgccagtggtcctgttctgtgggttccacccgggaaggcattaccaagggcagtcagagcccaggcaaaaatgctgagaaggcgtgaatggtgcaacagactctggccatagacatgtacattaaagatggctttccagatggatctcctcctcgccatccttataggaccctgatagggttagaaatggagatgtaccccagagctcaccattatcagggcagcagttaagatgctatttatttgaagccagctaacctctcctaagtgctacagatagcggccatttatatttaggaagacaaatgaagcccaggctctcccgtgtcaggagcatgatgctgtggggagaacgcacagttatccttgtgtgcctaaaggtagtagcatatgcaatacaagcagtcttgttgacctaattaatatcagtcttt

SEQ ID NO: 90291 - DNA, 1021 bp, Homo sapiens
tggtagtatttattggcttgctttttcactcactaaatggtgaacagctttttacacaattctttatacattttcattattctttctttagggtttttttttttttttgacattgcttggtcaagctttggcacctactgcaaacctgttttcaaaatatatccatctatctttccatttctagtgcatgaaaacgatcatattcctgggccgttgccagcatgggtattttttaatttgacaatctttgccagtttagtaactgtgaagtagtgttgtttcagcttgcatttcttggattacacgtgaggggggagcaatttttccatatgttttatgagacaaaggtattttttcctttttgaattattttcggtcatgttatttgctaatttttctgttgctttgttccatcatcttactcatttggaaaagctggaataaaggtgttaactcatcgctttagcatctctatacttgcagtccccaccttctgttgtcttttaagattatgcaagtgatacaggcttattttagaaaaacttgaacaaagaaaaaaatttaaaaattaatgaaacttatttgaaatcccatcatccagaaattaccaaaattgatatttgggtatatattcttctggatcacttcctatgcagatctattaatgtctgtctgtctatctatatttatctctgtctctgtatctatttatctatctttgtcattttcagtgcatgtatagtatcccattttgttgttatgcacaaattactggagaaatcaaccattgttggaagtgtggttttctcccactttcatattataaacagctgtgtaattaatatctttgtatgtatatcttggccatagtctcatcatttccttgataaattcccacaagtaaaattaccaggtcaaaggttttggatgttttaaattattttgttgcgtgtactgccaactggccttctgggaaggtcgtgcacattttcagtcccaccagtgacatgcatttctctgg

SEQ ID NO: 90292 - DNA, 1021 bp, Homo sapiens
aagtccaggatcagcagggtgaggcagtaggctggagacccaggacagccaatggttttgttccagacttgagacccgggagaacggatggtttagttcaagtacagaaccaggaaaatacaaatgtcctagttagaaaacagtcaggcgggataaacttcctcttacttaaggggaggctggcctttgtgttctatttaggcctccaactgattggatcaggcccacccacactggggagaggggtctgctatgtagagtctacctattcaaatgcggattcttcctgtaacactcaacagagtggtacttgaccaaatatctggacagtgtgggccagtcaagttgacatgaaaaattcaccatcatatctgtctattggtagatgaagtcttcattcctaaatattctactttctcattactctgtggattaggactcatatttagaagaattaacttgcctccctaaattttaaaggaaggtgtccactctgtaaccagctgtgttatttctaatgttatagtgtgcccctgagagtagtaactatttctttttcttggtatttaagtatgatgttggtctgctagaccatttgtccctaaggcttgtagatcatttgacttgttcagatttaaattttatttaaattttgactcaagccattatttctccaccaatgtaagggttatagtctctgcagttgaccttaacactgcaacctgtgaaccagtctccttagcgtgaaattacatcatggaggggaatccccttttgtccattatcctgggcgtttcagagacaggcctcttgaagagccaggatgctatagatcaggaggggttgggaggctcaaggggggagaataatagtacgaaggccaccgtggcaatttcttctattcttaatgccatagaaagagcactgtgaagtatgggcatgaggtgtttcttcctggcaccttgtcaaaggaaaattattttatgcaaatggaaatattctgttccgagaaataatagat

SEQ ID NO: 90293 - DNA, 1049 bp, Homo sapiens
gatctcgaactcctgggctcaagatgtcttcccatctcagcctcccaaagtgttaggattatagtcatgagctactgcacccactcggacttatgtgtgtattttaatgttaatataattcagaaaaatgagaaaggccattctttttatagcttttcccaaatcaacatacatatgaaaataaaaactggtctgctcaatgaacttagaggtattttaaaagcaaacgtacacttgggcttgctatgatcgtatcattgttaattcctgttgatccgattttatagtgatttatttagattttctgcaagagactcaaatatcaaatgtccagcaaattgcacttagatggaactagaaaattctaatgtattttaaacagttgttaaattacctgcattggcttatctcatctttgaaatttgctgatcctgcttctgaatactgatcatggttctagctttttatttatactgtttaatcttagatctgcacattaattatagttatgcagagcaacataacttcttgtaagcttaattgtgttttgaaccaatgggaaaaggtactgacttcctacgtagctgatacacagcctatagcctccaagcactgagaaaatgtatttggcagaactgcagatacagcagatacttatcaaattgtgtaagaagtgctctttctaaatggaagacagctgtattcaaaatgcataaatgtgagtaaaaatgtacacttgctatcaacacacgtacttattgagcaagcaagataaaatactacatattaagtgtgaaatccctacctcacatccttctaacttgaacatacagaatctacaggcatatttattacctattataataaagagcttatttagatagagttaagagaagtaatgaataaaagtgaacatattctgcagaataaaatatcaacttgattgtccagagtttgttaagagaagacttccatagcttaatatagttgctagggtattttgtcttttctgaacaatcttgtaggtgtctgaaagaaggtgcttttcc

SEQ ID NO: 90294 - DNA, 1012 bp, Homo sapiens
aaaatatttagataaaacatattcattctattggaatttgaaataaataaaaacatcttggagttctgagatttgtaagacatttttccccaatttcagagggtggcgtaaatcgtttgacagcccgctttggtctgtggttatttatttttgttggctgaacataaaccaaagtgttaatgctctttatttatggaagagttttagggtaattcacaagatcgttcatctgaacagatgcccagatggcccgagtggtttttttccaactcttttgtggactcgaggacatacagttttttaatggagacgctgtgtttttctcattttctttcacagcacacatgttatttccccactgaatacacccactgttcttacccttgcactgtcacccatacaggacgcacagggatggacgcggacggaattctgactcagccacacctggaggaaattattgtgtcaaaaatgtggggacacaagggctggcactgtggtttgcaatggtttactgatgagacagcaaaaatgagacaggaccatcagatgcaataaagattctaatttaaaaagataaaatgtgttttaaaattaaaagatagaactgtgtctctactggctgaggaaagaacagactagataagttcccgaatgtggctttccagatgtgctgggcaggaaatggaactctgaacagcactgggcgtccttcccccaaccggagcgtctagccttgggtacgccactctgcgctgggtacgccactctccgctgggtacaccactctccgctgggtacgccactctccgctgggtacgccactctccgctgggtacgccactctccgctgggtacgccactctgcgctgggtgcgccactctgcgctggggacgccactctgcgctggggacgccactctgcgctgggtgcgccactctgcggtgaaaatgctgttgtggaagcccgaaggcctttgatactctgaaaggcccttagatgaagtgcaga

SEQ ID NO: 90295 - DNA, 1055 bp, Homo sapiens
gtttctctgtgttttagttattaaaaagaaattctgtacccaaagtgacacgaaagtgtagtctacatttttactgtttcagaagcggcatggaaaagtgcagttggcctttggagctggaagtgtcttgctggtgaggctccatcctggaggctctggtggggagtgggctggcgctggggccctgccggccgcgtgctggatccttcctggcttgcaggagagcaggcgtggaggacagtcagcttgcggggccgcgcagggtgcacagagtgcaggaggaaggttttcacccagttaaacagactggggagcccccccaagaacgccatcccttgaggccagctgtgggcaggcctggatgtgtggtcccttccttccacccatcgtcagtattgtgttggtttgttaatttgttgatttggtcatagtatttaatatgatttgtgtttccttatttatttagccaccgttttgattgcctttttttttccgaatggtaatttctgcatgatacacttctgtacgttgtcttctgactgttacagactttctactacctctcccgatctgctgtttccttgtttcttaacaggattttttacagtgttgcgtctaatgtaacttagacaataaagggtttggttgtctacactgcagcttctcggtgtctctcccctgctttccgctcgctgcttcccgctctgcccctgctggggcctggctgcaccctggcctgccttcctatactctcctgtttcctgctcatatctcttcctcatttttgcgttcaaataacacacagctaatgagcttctaaaaatcttttcaggttgttcacttgtattccttaatttgaagaatgaatatttaaattctctcaaaagtcagatattgaggatcttctctgggaaattggccactgtacctgcccacctttctgcctggttccctggaaggtcttattgtcatcttagacggacagatttcattctcagcaccatacagatttggcttcaaagccaggtgaattttgcctttgaggctctgaaaag

SEQ ID NO: 90296 - DNA, 4238 bp, Homo sapiens
agtcccagtagtcaatatccatccctagaacactgaaataccttcaagaaagatagtatgtctttcagcattactgaaaagcccacagttcacagctgcagaaaagaaaagcgaaatcttccgaaagcttctcatgttttgactactctttcccttccaggaagacaaggcgatggtgggcgtgctcaaaagattatagtgtgtccacttaatttgaatatttctctgcctcctttcttccctgttttattcatttcttaaaaatgctctagggctgctttattgaataataacatggtggcctccggtgaatcaataacttaaagcaactatcttaaaaaaatgaggtattggaacacatcccttcagttatgaagagaaaatgggcgtctctgcatctggatttgtgaacacaatttaaccacctagttgtttggcttatcccgactttgcagtgcttccaaaataaatatttttaaagccttctgagccctgtaatataaaacgttagcccttcatggacggagggccgtcttcctgttgcctctggaacagtccattgatgcctaacccaatgcaagtctgtgacttctggtccaaaagaagagctacccaggtggatgtgccctgggggtgctgtccatgtgcaatctaggcacacacagcacctgtgttcacaggcatcccctgcccgcctcttacggtccctgacgtctatgtttgctatgcagagacggtcaaggccaaacacccaatagctaactataactcccagttttctttggtaaacacgaagaccattttccttccagaatgtatttggaattggttcttagtgagccctgttgatgatgaatatttcccatcagaacctcagagatgtcttcacggcctgacgtcactgtacaaaaatgtaaaacagtctttgtccgtttactgcaggaaattcaccatctacttagggaagttttatcacatctctcattccattactgtttcctacatttcaaataaactgctgtctccaccactttgcccaccccctaacccctcgtaaaattttgtccagtatctttctgacttccactacatgccaactggtagatgtcacaaacacagagccagctgtaagtaggagttttctggaactattaactaaagaaaagcccttaattcattatgtcaaccagaccttcccccactccgccattatttctggggttcctataggcatagctggaaacagaattttacacgagtcccttagtttatgtatgcatgttaatttccactggtcagtttcacttcatcaagattttagctgaaggttaatgcagttaagtaagattaatctggccatactgtttctgtcctcagattgtaaatgctattgttcaaacagggatgcttcaaatgtcattggagagcattctctgaaagctgtggacccccatttatgcttggttttctctcgcagttcactttagaatactccttccctttttccaacttggtaattgtttatggaaatgggtgaacacgctctgaagttctgacagacctacgtgagagccgtgctcttctttttgtttgtatgacccccaaattcagccttgttttggaactaccgttcacttgtaaatctgctttgtactatacagttttacaatctggccgcctcctcatcttgccaacttgtaaccttctctccagagctggttcagacactatcatctgccattcttacatgtgaaaccattagagaagcctaatgatcctttctaaatcacactggaaatgattcgttttcaagctgcctctctttaaggcaggaaggcacatttgaaatacttgctgctcattttatgaaatgagttacagctcaggtcagggggtcttcgcctacttggttggcttgctttgtgaaggtcattgtttgtgttcttggatgttgattagaaaattaataggaaaaatgcatttagaaaccaaaaggcagaaatgagcttttctcctgttctttcctttttctcacccaggggagagaccattctaacacaggtaccgtccagacagtgcctctgagaaagggaacctaaaggcgtgtttccgacgcaccccaggtccccgtaacggccattagcagtaccctcacgatgtcccagcagcctcccacctgtgacctggccgctccatggaagaacagccggggaactcctgagcagacacctcacatcccgagccgctgcgctggagtggaaactgaaggcagatgcctctccttgttaaacgttcagaaataaatgaagatgctatattctagaaatacatgtagatactatatacgcatttacgtgctcatcgtccatagtcccatattttcttataataaacagtagtactggcaggcacagtaggggcacaaggcatctgtcttattcaagacaagtttgagacactggaaaaaaagatacttgttgtgtgtgttggacagagtggcgaggctgagcactgtcacaggggcctcccatgttaagagggactgtggggatgatgtcagaacaagacgtggtggatttgaggttgatcgagtattaatactactgcctctccttgtcttagtgggtatttaaaatagtaaataagagagaggaaggaggtgacgttcaggtgctgtgggaagcaggcttggcggaggggtatgatgatgagaccctcattgttcactggctccatcgcactcctccctggggccgtgtgcctgttccattcttcccaccattcgaactgagcgaatctggcaaaggagacacgtctgtgggaatgcgtagattccgcctcggaagagagctagcgcaacactaagaaaagcaggcttcttgtttattctcaggacctttttgtaacagggctacattctgcaaactgcttacaaaggaagactatacgtcttaacaaattatttagccactgagtcctcccgattcggacctgttttagtaatggcagaagaatccctgagcaggttcaggtgccctagatgactagggtgctgagctctggcgccttctgtccccactctttgcctccccgccccttccctgagccaccccagcaagtgggtgtcttttctccctgggcctggtgacctccacaggatgagtgactttgttcataaagggtggggatcaccagccccttgggtgggggacggcttcatatacctcttcctcagtaatgcaaatgcgagtttttgtggtgggggttaaggcccataacaaaggatcttaaaccatgcagtgtacgcaattgaaatggtattccacagatataaatattttcttttcccattgccgtgacactatgtgtgatggtaatatttctgagagtttcagatttttgcacatatgattttatgcattatcaaaagttactgctgccttgaatgaaaatgttctgtgaaattttttgcaaaagctttactaggtttttttttaattgtgaaattttgtaaaggcaggaaatggattaaaacgagcatgctaaatatatttttcaaaaaagcaataattttacatgtacagaaattatcctaacctttaatactggcgagagcaacagtttacttaatacggtaatggactagtgcagtttttgtagacagtgggcttctgatacaaagtcttgtttaaacacagacacacacacacacaaacacacacacacaccctaaagtgtgggtttcctgttctaatgatttgttgaatattattatattattattattattattattattattgttattgttattagtaatgtttggttctggattctacttgttactgagtttaaattacttgacggttcaggttactttgcaacactttcaaacgatgcaatgtaactggctagcttatatatatatatatatatatatatatatatatttttttttttttttacttatttttttctgatattcttacaccagatatgtacgaaaatgatctgtcctgttggtgtaattaggaatgtccatgcagatacagttaaacaactgtaattgactgttctgtaaagttattttgggcaaagttgcggagacacattcctctgtccacctaagaaatcagaagactcttctgttgatttatgtttaatcatttcagtagtttccccacagtgatcatttctgcattttctggcttttgttttcttggctgaaagtgaatggt

SEQ ID NO: 90297 - DNA, 1080 bp, Homo sapiens
ccaagtgtatgacctccactgcagttaggaagcattgtcctttttaacagaaataaaaccctcttgccacaaacagtcaccgtgatgtgtttgtgggatgtagtaagagcaaggtcatgccgtaattgagaattacaagttgatgttacaactggagtgagtgccaagtgttcctgcttacacaggtgacccgttcaacccaccaaagacctggcttttgggtaggaatgtttgacaggggcgggaagccaggccaggtggatctaggaacaagttggtgagattcttcaggaatgcatgtcagtttatttgctgcctattaattctacctaagcctctttgaaaaactcttgtcccagggagaaataggagatcaaaaagcaaatcatttagactattttaaataatgtctgtgttacttattggttatgccccagcataaccagttgtttataataattttattatatgagtaacaatataataattgttactcattcttgattctgatatagaaaagatgtacttatattgttctctttgtctctctagactaaaatattgttattttatacttcataccaactatcctcttagtttcaagtttacagtaactcaatattgtggtctgagtgaatgtggctttcagacttagcctgtgtattaactgttggtgtgaagatctcggtgggtgagctttcctttcattcataggacagtggcagttcaggcctggcattaaaactgagctagatttgtatgcgtctcctgctgtggcagttggtttgttaaattccatatctgagctcatggcctctgatggtactttttgtctttcattacatttaaagtagcttttggtgatttatcactgaatgctctgcagagttctctaaggaaattccattttccttaacgtactttggaactataagcattcctatagagatttgttgggtaggataattgcaaaacacatcagtaataggtagaggtttaaatcctagggttccttgttcttatcctataattctcattgtttacagaaaccacaatagctgtgttaaatttaagatacct

SEQ ID NO: 90298 - DNA, 1013 bp, Homo sapiens
aaaaagggcagtggccccaggcagccattatcacagtctcttactgtaagtgttacggtaaattggtattttccagccacaggctaggcgctggtgtctttttttgtggaagtacttaatctgtaatggactcatttaatgtgcacgtccggaagctcacacgctgatctgttaacaaaccccttgttcccacagtggtgtttgagtccgatgggcctcggggttctgaagttcataccacctccgcagacgcccccaaacaagtaggtctcatgatgaattggatgtctgggtttcgatgcggtagctgggaaaggtgcaccatgatgctcatcactgaagcatgaccttctttttgtttttttcactagatgtgtaaataatcctatatgctttgacttggaacctgacccttcggggccgtctgtgggcagtacccgcacagaggtcctcccagccgggtggtgcagggtctaggtgcacacagctggttgttggttgtattggggaggaggaagtcgggatagactggcggtgactgcaaacactagaaactcagtttttccaagatggttttggatgtgagtttgcttgagaacaaattgtggttaacctccttgaagaacattatttttgtgttattccgtaagaaaagtttcgtgtccagcgtggtgtcttgcggctttgtgccttgtttctctgcattacgaacacgactggcaaggccagagtgcctgaaagtagctgtgtgcctgtgtctgtgatgcaccttaccatccaggcgtgacctgtgtacatgcatgactcagtacacactgagtgtgtgggaccctggcactagcacacggttctgagtcctgctctaaagtagagaggcacccacagcccgcagcgggtctcttgcattctctcaggctgagagtatgtattttcattgctctcccattttgccctcctggaggacgtcacacctgtgttgcacaagcattctctaagtaacattctggctttct

SEQ ID NO: 90299 - DNA, 1022 bp, Homo sapiens
tcttctcttctcaccgcatgtgtttgttacgtgtctgctaggtgggtgtcgtctgcagctgtaaagatcacaacttccctgtgagtggtcattgattacccctattgctgtagcatcattttgtagtttggggaggtagaaatatgcagaggagaatggtctcagagaataggaagtcatctcacgtgtacatgcaatagttgtgggtgctagaagtgtgattctgtgattttgcagtggacatgttccatttatacagagaatgttgctattggaggatgcttctaagacaggttttattcagaagttaggaaacggaagtctcaaagacttccccgcccccacatgtgttcgggtgatgtttctgtagatatgaagagtctaaaaactctacccaaacaggaaggaaagaactattgctacctcctttagggactccctgaccatttaagaagaaaaacccactgcattttctgtaatcattgtacagtgtgactaccaagtctataaacatacaggaatagaacataaatgacttattgctacaacagtaataaaataatacatgatctgtgttttcagaccttacggccagtctagatgatctgatagtatgaatcttagaataaaatttgaagctaataaaataattccagatagaatagatggtatttcttattgggacctaaaaaagtcatttataccaaggaggccttcatattgtggtgatgaaagctttgtgctttcttgcagtttgatctctctttgtagaatctttttcatctcctctttctctatggatagcacagcaccacataatgacacgcaacgtagcagggctgggtgtccctctctgaagttggccaggcctttttctttgaccgttaagtccactttccaaacacaacttgaatttctaggtgagaacatttgagctgcgtgcttaccaggtggtcttcagttcaaatgaagtttataacctttgtgattgactcggaatgttgtagcttgggcataatatt

SEQ ID NO: 90300 - DNA, 1030 bp, Homo sapiens
tttttcccaagttttaatataccagtcaccctctgttaactagggacagcgtcgttacatgtaactagatacaccactgctattgtattttttccctgtgatctttcaggtcatttaaattgagaaaagaagtcctgcctgactcacccccttttgttcttgtctgggtggctcctcaggggttttctaagagccacccagactcaagggtggcttctcccgctgaagacagatggcttggaacatgctgtagctgtacgcaccgtgtgtcttgctgtgttctgatgagaaatggtaacttcccgtttcatattttgcctcctctagggggacagccgcgccgctgctgcttttccgaagaggtgacttcgaccgagctctccagtggagaccagagtcacaagatgggagataacgcctcggaaagagacaccggcgagtccaaggcagggatcgcagcttctgtgtccatacttgaaaacagtagcagagagacttctagaaggcaagagcagcacagattttctatggacttaaagatgccagcatttcaccccaagcaggaggtgcccgtccctggtgatggtgtggagttcccttccagtacgggagcggagggccagacgggtcaccctgcagaaaagctgtccgatttgcacaacaaggaacactctgggggagggaagcgggcgctggccccagacctcatgccgctagatttaagtgcgaggtcgacgcgggatgaccccagcaataaggagacggcctcctccctgcaggcggctttagtcgttcacccgtgtccttactgcagccacaagacctactaccccgaggtcctgtggatgcacaaacgcatctggcaccgcgtcagctgcaactccgtggctcccccgtggattcagcccaatggttacaaaagcatcagaagcaatttggttttcctttcccggagcggacgcacgggccccccgcctgccctcggtggcaaagaatgccagcctttgctccttgctcggttcacccgcac

SEQ ID NO: 90301 - DNA, 1063 bp, Homo sapiens
gtgtatgttatagtttgttatagtgttacagtgtgtgttagtgttacagtgtgttacagcatatgtcacagcgtgttatagtgtgttagtgtgttacagcatgttacagcgtgtgtgttatagtgcgttacagtgtatgttagtgtgttacggtgtatgttagtgtgttatagtgtgatagcgtgtgttacagtgtgttatagcgtgtgttacagtgtgttatagcatgtgttgcagcgtgtgttacagtgtgttactgtgtatgttactgtgtatgttgtagcatgtgttacagtatgttacagtctgttacagtgtgtgttgacagtgaatggatgtggtggggaaacacagttgtggggctgccacaggcagtgagaaggagaaacgtagaatcctcatattcaactgacgtttatttttaccgaaaaagctacttataattcaattttaaaacgtcactgctatacttgaccctctggccgagaatcctttgtaagataactagcaaaattgtggaatctcacatttaataagtgacactcttttgcattttgtatatttaaatatcatttttcagaggtttagatgatttaaatatttcttaacttagggctttctgaaacttatgcagaaactcaatggtagtcgtaattccataaaggaaatgatacatatatttgtaggaatagtaagaaaatgttgagtgtggtattttctctaattgaaagctaccaagttaatatagttaattacatcaaaaagggagaaaaatcctttgaagttttattacttcttggctttcagtaacaaagcagtatcagatgtaaattctgaaataggtttttatggaagattacttaatatgatacattaaggtaaaaatccgtgcttggattatatacctatttaaatatgtttacaaagcatgtgctagaaaaattggtaaattacttgtaaatatctttggttaaaaaccaaaagtcattgatgtttccccgttattgaaggcagaagacttttgagattttaaaagtttctcaagattcctggcggtgttctt

SEQ ID NO: 90302 - DNA, 1062 bp, Homo sapiens
tctgaggctagtttttcatgagggatttgtcggctattgataggatccagtatttgcatatataatttgcataagcctttgcatattaaaatggattgccattttaggtctgtattttactagaattttaaaaagctagggatatttgtctctggattaaaggttagaaagtaagactccagttactgagattttacctgattctgtatgcatggttcacatagcgatatccatttacaggaggccttgtctcctgctttctttacaaaggaagccattgatttgaaagaagtattttcacagattagtaagacatttgggcgaactgttagctgccaaatatgttcctgtatagatgtgccaaatctgagtgttactcatgttctttctcttaactccagaatagttacgttcagcactatgaataaattctcttccaaatttaatacaattactgttttatttaataacctacttggttactgaaatgtatcacttaaaatgataattccacggtgccatttgttgagctggccatcctatagaaaacttacatacatgcttgaatctcatatctgaaacctgatggagaatggcagctgccttcaaagtcatgaaattaggttgttggtacctatgataatccagtgattgattccaatatagacattattgggatagtttgttcattggactggacaattagagaacatttttgatattgaaatgatggccaggtttccagtctgactagttaaattgtgtttcctttgatttaaaattaatctgtgatgtcactggtttttaaaaattgattactacgtgactcatgagaatgtgatttttatagattatttcggtattagactaggacatgataggagtggaatggattgaaattttttcatttttaagaaatattactgggttctactttttcaaaaatgatggaagatggtaggtccagggccatgagactgaaatcaaggcctaaaccttcggaagcatcatggacagatagggatgtgttggtaagaaccttgaaatgcagttaaaggtgcc

SEQ ID NO: 90303 - DNA, 1050 bp, Homo sapiens
tctaaaaacaccaacttttcactcacaacagctgcctttaatggtctagtgtagcaacaaattactaattcatggatattctttaaggagagagagaccgtgttccattgatttaactactctcaaaacactgtgatttgtgggatttggcccaggtctttcacagggctagcttggaaaagaaactgggtattttgaatctcatatttaaatctgcagcattcctttctttttctgaaaaaatacacgcaactttgggaaatgcttgcctttcctgttactaaaaagattacttagttctttaagtgttaggttattttaaattctcatggaactctgatgggatgattggttaacactgttagagtgtctgtgtgggaattgaggaacgaaagatcacagtggttcttacaagcagcagccagcctgcctgtgggagcacagttgaaattagaattcagatctatgcgaccattccagtaatacccagttgtgccataattttgcccgaacattttctttgacatctgggaattgatttgaatgctgtttctggatctggaaataatttgcattattagattaagtgaaagaaactcctctcctttttttttatggaacatgtttcgtcagttgaatgttgccatctattcctctggaaagtgttctgatattcatgttacttttatccccacataagacttggtcacagcagctctcgttattgacttaaaatagtagaagtgcaaaattatggaaaaaaagtcagtcattgggaatatgttactagatttaaatcctccactgagaaagagacgtggcatggacagaaagtctacttttggacttcataaaaagttaatatttttagtaagaaagaggggtgaaagggcatctaattggagtttgtaaaaatcaacatttccaacattcccaaacacaagtaggctcagggagcttagaaaccatcactaaggaaaaacgaatattgctttgcaaggagacatacaaaccttcagtgtatgggccaaaatagaattctgctcagaa

SEQ ID NO: 90304 - DNA, 2061 bp, Homo sapiens
acggacagttccttacatttggggactagcatgctggcacttgctttgatttatttggggggtgctaagtaatgtaaagacaacctttgttttagaaaatggggctttgtcattctccttcactctacctcgttttctgaacaaagccggctggagacttacctctagaataaatgttttgagcagaaagacctaagcacattgttctctggctgcccccacatcaggtctgttgtggtcagggggccgcgttgctgctggcggctgctccctgggatagtggcgttttgtgtcctttttcccctagtgggggaggtgggtggagtttcttgtgaatgctgccgattctggtcgccttttattcatttcttcttcttagagtggaaatgtagctggttcataatggattattgattggtctgagaacagcagccgcctccaggcctgtcatcggccgtacttactctcccaatagtgaatgcatcactttatggggctcttcgggaccccagtctggggactataagcctgtaattgttactggtgtacagaatggtttgtagggagaggaactcttcattgttgtgatggaattttcccccatttgttgagagaataggctttttgtctcagtagtaagataagcttgtccaggatgttaatgatgtattttaattcatggttcataatactacagtgtaactagtgaagcccgtctcattgtttcccggagaacaaacacacacagtatactcaaacaccaactgggccttgcacccactcagcacacgcacgggcttctgcgccgaccccgtagtagctgtggccgggaccaaccgtgtctgagagtcgtccttcagaaacgcaccagcgtagttgctcttttagattttatgatttgccttttggagccatcatacgcctttgcagacagccctgtaaatatcggaagcattctgtctgctttgagctttttggcgttttccctccctccccaattcctcccgttcactccagcccctcctgaggaatgccctgtcagcggagatgtgcgcaggaccgggctgtcacccccctgcacccgcggacatccatcccgggctgacatcggtgccccccccgcccccggaaggtggtcagagaggacgcagacggggataagtaaagccacatggcgtcgggggagccagggctgtttcgggaccgcgataaggttaattcatgaaccagaactgaaaaaaatgccaagctagataggcatttggaaagcagcacccacttcagctttgcttccctcccctgacacatgctgcttgtggggacttggtgcaggaaacgggactttcagttttcctctcgctcctttgttcctccctggtgtctcccagtcagctttgcttggtttccgcaactttaagcgttcgattgttgaggaaatgactctaaatacgagagcatatttggttagccttccggtgcctttttcgggataaggttttaataaggtcaacttcggtagttgtagggaaatcagtacacaaccattcagcttttgttttgtactggtttaattcacaggcagaaaatggcaagatttcctgtcgattcagagacatagttattattttaaaatgtaagatgttttacagtttttccctgataacgccatatttaactggtcagaacattattgttgaaaataaggaagaggaaacctgcaccgcgttgctgattttttacttcgtcaagtgctgggaaggatagttaggaatgccagaatacactcagaatgccagaatacactgaattttggctgatgttcgggagagttcgtgttggccacagaaggctttgcaactggagcccgtgggtgggtttctttaatggctttgggcaagcctctaaaacatcagaaagcgatcttttaaaataaaacactgcttttcaattgaaccaggttcctattattcagacgatttttctttgactttctttggaaaacttgagttaactaaaggtagtttcccaacctgcatttattacagccctggagcttctgtg

SEQ ID NO: 90305 - DNA, 1591 bp, Homo sapiens
acagagtaagaccctgtctcaaaaagaaagccccccccccccccacacaaaaacaaccaacaacccagtgttaggacaattacatcttctttgtgagttctactttaccctttatgattataagatagctacttttttttttttttggagatggagtctcaccctgttgctcaggctggagtgcagtggtgcaatctcagctcactgcaagctccgcctcctgggttcacgccgtcctcttgcctcagcttcccaagtagctgggactacaggcgcccaccaccaagcctggataattttttgtatttttagtagagacagggtttcaccgtgttagctaggatggtctccatctcctgacctcgtgatccgcccaccttggcctcccaaagtgctgtgattacaggcgtgagccaccgcacccagccaactacttttgtttaattgccttttttgaccacacattaaacttttaatggtatattttttccatgttgcttttgtttgtacttttctgatatatttttctctacgtgtccagcttttccgagttcctcagtcataggtgttttttttttttttttttttttttgcagagagcaaatagtcaatttaatttttaaccctatcatggagtctttttttaaataagtgagtttattccattaatatttatttctgaaactgacttacttggtcttctttcctaattaaagaaaaaaaaaacttttgtgcttcctcgctttttcttcttttctctttattggaatatgaattatatttcttgtcctttaattattaaaatcagaaagcatatagaaagcatataatgcttttgcttccactagtggcggtatttataatgttttcttaaagctgtattaatgtatcaacatcagtagtaatacaatttgacttcccctttgggaaagaagttagaacacttctattaccttcctcttctttccccatctcctccctctccccacattgctattgtcattccttttttggctgttgttttttagtctattagtgttaatttttaatttttacatgacatagtttttatttcaagacaggtaaggatcgcatgtttattttatgtgtagatcacagttatttggatgtaattctatttatatttatttccttgcttactggatttagtgatcattgccggattttattattgctttttctgcctgtgaggccttcatttggagccatcctgtttgaccggatgacctttccaggttgctcttaaaggactctggtgaggacactcgtccttatggaggagctagcctgagctaggtgagaatccaagcagcagaaaagtgggtcagagcccaggagagctaaggaaatttcatattgctgaagccagaggtgcatacacctgtgtgttcatgcgtgtgagcgcacgtgtcgcaagtgcatatgtgtgtaagtgtgcctgagtgtacgtgtatatacacacatacatgcatatgtgaatatacacacgtgtaagtgcgcctgtgtataggtgcacgtttgcaagtgtgcccgtgtagtgagcctatgcaaatgcacacacacatgtgca

SEQ ID NO: 90306 - DNA, 1013 bp, Homo sapiens
ttctcagaaggaagagtgaagtaactcaaagcaaaccaaactcctttaagaagatgcttcttaaagcatcttcttaaaggagatgagaattaaatgcagtgtaatgagtttgcattccttcgtttcagcaggtttttttgtgttgtttgtgtcttattcccatgctattgggaattacagtgagataaaaaggaaccctttacagtgggtcattttgtgagtgcttgagaatgtgtggggtggtttggaagccaagtggaagggaaaatgtaggggatttaaagtataaaattgcaagagaatcacattttgttggtgtatttaaaagtgccacaaagaaagcacaaaaacctgaccttgtttttccccggacagaacgaatctcgccttttgtcccatgtgtctcaagactgctgtccaactcagttttgtcacattttcaaggctaaggcagagttaaattgcttcctcattgtggggctgggtcccgttcttggaggtgacacttcaggttacctgttactcctgcttatggatctgatgttcagagcagcaagtttattactttcacggagggtcagttttcgtgcttgctatattagtcactgaaatgcttcttttgataggtcagatgatattgaaacaaactagaattctgtttcctgtctgacttgtggaattgcagtatcagtgttcagaaaacttaccagacttttgaacgtaagatcgactagcattcaagtagaattacaaagtccaaacgatatgactcagctgggataaaaagtgctgttttatcttttttctgttccagtgactcagcaaaaacagtgctttggacatacggaaatgtaggcaaacgaatatttctgcataaagggaaaatgtagacctttacttttaggacgactgtttgttagtggaccagcccaaaattcttttcagagttttgcaaatccacctgagtctccacaagtgcaatttcatctgtgggttcttctcttgaaagtgat

SEQ ID NO: 90307 - DNA, 1135 bp, Homo sapiens
agattaatcatttcaaagcttttcatgtctttagcatgaccattagcataatgatgataatttgtccctttgagtaacaccaagcataatttaaattaacgttattgtgttgagtgcagtgcaaccccaggtgctcaagtagcttccttttttcaaaaatggctttttactttttaaaatgagaggcaagcaagacgatctcattcctaaaaccaacttaaaaaataaaagtgttaataaataagtgaattcctaatgtaaaagtgcttgccgtagcaacgtaaacttggggacaattctgtagagtcatgcgattagtggtttagtggtaggattaaaattagcctcggtaaattaccctggtgacagaaaagcagaatctgttaatggtttcacaggaagattggcttatcagttattttctaggttgatgaaagattatgggctgctaagaatttgaactttagaaagtaaggttgattttcctaatatttacatattttaaagtataggtattgattaaaaagaaagttattacagttagaatttgggattttatatgtgtgtgggagatgatttacaaaccaggttttttgcttagctgtgaacattaagggggccgtcgagagtgtgtgttttaggcaatccttaaatcccgtccaggggaatagtagaccattttggaaagcattttacatgttttggacccacgaaaactccatttagattcctacaaggtggtaggtgatgaaactgcaccttcttggcccgagcggggttagggcggccgccattttagagcacggtgttatatcgttaggagtgttacattgacttggtgtaatgaccgtgaaggaaagcatttgctttcgtgattgtttatgtttctttgtaaacttacattatttgtatttgggcttgttttagaaggttaatatagacaatcatatatgtgttataactgcaggaaacttggaggtgatttttgagtgaatcctgacattttacaggtactgaaatgcagaaagatttaataactgagccaaggccacaggaatggtgcagagctcaaatccaggcgtcctgattcccagcttagcctttttctccatacgctgtgctgaatgcacagaat

SEQ ID NO: 90308 - DNA, 2750 bp, Homo sapiens
ccctccccctcaaaagttctagaagctgtgggaaaagttcagttgtctatctactgaacgtagtccaaggaatacccgtgggtttgttcactgctcggggagctggacgtgtgccgctctgacttcctttgcacatccttgcttccctgaatttgcatttattgcctaactagcatcccgcaaaaaggcctttcctggctgcctgcgaattggcaccttggagcttcacttccagcattgttaatggctaaacgtgaagaactaattttattactgtatttagctcacagggccttggaagcggcccctactctgttgttgggagctgcatctcatttagagttgcatttttcaagtgaattgtagtgtcaggctgtgcatccgttgtggggtctgagtgggtgatggttggaatacatctccccgtgtatgagaggcaccgagggatgtggaggttctcggaggcagatggaggtgggggctgtggacaagcctctgtttgtgcagcagtgattatttggttgttcgactgtttggttaggttccccttgggctggtcgctaactggtggcatgagctgacagtgtagctgttcccttcttctccctcccctcctgggggctctcatcctcagtccttccacctgactggccgaaagtgtagtggcagcagcctattacgggaatgtatctaggggccatagaggagacagcatttttcaaattcaagctctggcctcagttttctctggtcccaggaaccagtgagtttgggagtggggcaggacattctctttgatagaggaatgacctctgccctcagttaagaccaccctcccacccaccattggatgagaactatcagaatcgttcgattttcaggaattttgaaaaggcacaaacctattgtaagaaaagaatcatgtcaaatgtttacatttatgaataattaataaaattaaccttatgggaggaggaggaagaaagaacaacttttactatgactttagaatgtctcctgttctttaaaaagtatctttattttaaaattaatttttctaactgaagaatattttaggggaatgacttaaatagctataaggaaggatatatttataggggctataaatgcatcatttgtatttgaaatttctagcatccactacagtgtacgaagtgtattttagatggactggtaaaaaccagcagttgcaactgtctgttttgcattccttatgctctgcatctggccacacgtgacttgaacagctgaagcttctctttccaaagctagagccatcatcgtatttatgtctagcctgagatgttttccgatggtatacattcgaattgtaaagcagtgtaatttgtggctctcaacatgccttaaaagtcatttccaaaaaagatctggcatttaatctttaattcaaatggtactgaaaattacaaagcaggagtaattagaaatgcaactatttttagaaagcaaacatgtaaatatatgttaagtgatgactaaaacacaagcaggagagtaggaaaaattatttaaaagacaactatagtaggtttagatacatcttaccatatactgtattttaactctgtgttaattctggtagatttacttcgtattcctgtttctgtaccttccccccgaaccttggtcaggaagtaagtaaagtctatagaatctcagaatttactgggccgagaagagatgtatatcgtatgtaattgtgaaatccagacagttcctcaactgagtggtgaaaatgggatgaaatcttagtgtgttttgttatcttcaaggcagagggaatctggtgtttttttttttttttccttcaaaaccaggtagacaacgtctctcaccgccctggggagttgctggtgctggctcagcctccaggatacagctgtcctgttattttcttgcttttttaggagatggtgtgcgtagaggaagatgtggtgttagttttcaggacacagttaaagacaggcttaaaaaatcaaggttctctattaaaactataatttcttgttaatggctaagaattaaaaatttttcagcgctattaacacttgaagaactctctaatcccccactcttcccatgtgaaagtaaaggacatttgtttaggaatttttttgtttcagaaaagggcaacatgtgtctgtctttgccatatggtactatttaacctatattgcatgagctgacaagacactgtgtttgggcattgatttattttagcattcgagaatgttctttgaaatttagtacagtaaatgatgcattgaaagttgtacagaatggtcgtttgtggctttagcagattctttctcagttgatacttaagggtgtagtgaacaagtttcactttttttccaccgatacaatttttgtgagaaatagtttgccattcaatgctgagtgactgttaattcaggaaaacacagacttgaatataagtagttaagacttctgggggtcacaaataaggctaagagttgggcaggtcagaaagagaagattcactgtttagttcctgattattctggtgattttaacctagagcaaaaaagtatgtttattattattattatttttgtcaaaaagactcagcttttgtccccatcttttttttttttttttaaagaaatgagttaatgaacaaatggacaatcctatttaatagttcccctgagcttctgtggtgcggccctggaattatctacagg

SEQ ID NO: 90309 - DNA, 1051 bp, Homo sapiens
ctgcgcggggctccgggccggggcaggcgggggtccgcgcggcggcgtggaccgggctccgggggccgaggcgcggcggagcccaggtaattggtttctattttaaacttcactttgttctggcggaggtggggcggtgggaaaggcgtggccccgaggacgattacataagtgttcacacctgaaccggtcctgcgcccgcgagcggatttggggtgggagttggcggtgggcacccgggcttggggcgcctcgcgaggggctgctgcgtgggggttttgtgttctgcgtgtgtgacctcacagtgtctccgcggtaaagaggccggggatggctctgtggactgcctggaaaagcccagatgtgcccgtgggcgttgggctggccttccaggggtgtcccctgcgtaacaaaggacggagccctcggaccctccggtccgctcgtcgtgtgacttaaccagcaagtcacaaaaggaactttagtggggatcctacttacacatacagcagaaaggcattgcccccgtcagcctgccatgcagtttcgaatcttgattgaaggtaatttaaaagctgagtgatgtacgttcaccatggggctatggagtaaatactattaaagaaaatgacccgagtagatgcaacggtggctagcctcccaaaaggagcttttccagcttattttaaaaaccaccttattaatatgattgaagtattttggtttagggatgtgttacttaaaagagctaggcatgcatgttatttgataggatactggctactgccgtgtaaaataaaaagagctcattttatcatttgttccagcttcattttcacttgcattctttgattatgtcgtcaggtaactgttatttatatttacacagaccagccagaattaaatatgccacataccactattgtgcatgggtctgagaacccctcgcccccccttagtaaaattggagagtgaagttgcgtaggagcctgccgtggtgtcaggggtttgagagttgggttacttgtaggaggacgtctttaatttcaca

SEQ ID NO: 90310 - DNA, 1076 bp, Homo sapiens
gaagaaactggagggggagtgtgatttttcagggagtgaattgtgacgtcaggtctttttggaaaagatgttatttttaaggtctgaaacccggctaggtaaagtgcttacaggaaaaacagattacaagattaacatctgttaacatgatcgtttatctccagccaaaaataggtcagttctttcttaaggaaacacgattgctggcgcatgcttaaataataaaatcaaaacggcgagttcataaattaggaacgagtgtttgttacaatctgacctgtgaagaaacgtttttgaatttcgagatcaatggaaggtcaaagtcccttttcggtgtagagagcaactctttcccctgcgtcggcccccgcccccccccccgccccccgcggaatgacccctccttctttctcggagctccctttccgcctccactcccttcgtgaatttccctttccatcctttgtggaagtacaaaatatatttaaatggatatcgtctgacgcctccctccttaaagaaggcaaactctgcgcagatggctaactttcagagctctgctgttgttttaccattaaatgaaacggtagggaggagaggaggaaaaaaaaaaaaggaaacagctttgcgaagtctccctgccccctgggcgtgagtgacggctctgctggccaatccgcagcggctttctccatcccggaggtaatttggggtgtgtgtgtgagcgcgcgcgtgcgcgtgcatgagcccatgtgtctgcacactgtgaagtctggccagccccgcgcatccgcaggcttctgcatttacacagatgtgtgatgtagacgtggacacgcttttattcgagtcagttcggctacatgggcacgcagcagcccccacggagcgcctccccctccgaacgttctgtgaagcatggggtttagaagcactttcagattcaggtcggaacctgcagaagggggagaaaagaggagggctgtgattgtttctcagcaactggggactcgaaacgtgcggtttctctggccttggtgcctgggcacgcgcgccctggtgcgtttttggttcag

SEQ ID NO: 90311 - DNA, 1097 bp, Homo sapiens
ttgtggcctaacgcatggcctatttctgccaatgtctcgcatgtgtgttcacaaacacgtgcactctcttaggtctggagttcttcttatctctaatagctccggcatattaatcatattgtttggatctttgacatccatgctgagcttttgtcttcttgctctgtccatttttgaaaaagatgtactaacgtctccaactacaattactgatttaactatttctccctgccgtactgttgcccgtggctcagtgtgtgttgaggctgtcactgatgttcatgaaggacatcacttccagctctcaggctgccttcatcagtctgtaatatcatcctttggcctcatggtattttttagccttatattctcttttgtccgatattaagattactacaccaactttctttaggttcatagttgcttaatataaactttcattctttttctttttaacttttttttttcattttgtcttccatgtgtttctttaatattcttgtttttaactccaggttgacggtatctgtcttttagtcggtggatttaacctatttatgcttatatttactcatatttaaaaaacttacttctggtagcttattatatttttaacttactgaacttctcatttcttcctttttgtttttgttcctgattttaattgtatagatcaagttttcttctgctggtttagaagttgtttttatacttgttatccttatcttaagatatagtctcatgtttacttatccctactgacttcttgaacttattaatatctgcatttttctcctaagaggaaaagtactttatcatattgtcatctgcctttaatattttgatactgcccagaatttaaattctgggtttgcttgaatagtgaatattaccaaaatatttggttttcattaattctctatctcttatagcaattttcagggatctgtttctctctttttttttttttttttttttttttttttttttttttttttttttgagacagggtcttattctactgcagcccaggctggattgcagtggcacaattaaagctcattgtagtctccacctcccaggctcggttgatcctc

SEQ ID NO: 90312 - DNA, 1044 bp, Homo sapiens
tcatttacgtattgggtccctcatccttcgatatatgtagtcagaattcgtggctgttgtccttaattctttcttaaaggcagaaacaataatgtcaattcacttcatgaataatgtaaaagcaatttgccatttatatggcgttacttaatggttcacagactatagtggtggatgcagttgatgttaaagagacttgggtcagaattccatctcagctgcttcctagctctgttaccttgggcatatcccttggcctcttcaccttccatttctgcatccgtaaaatggacatattcataccgatttggcaagattcctgctgggggttggtgatcgagatcatctgtgtgcaacctcctaacaggatctccagggcgtctggtcctgtgcagagctcacatctctgtgggcttcttgtcttgcctctcaaagctagatgttaggtgtcaggaggtgttggcctcctgggagctagaatattgccttccaaattttccaaagctttttaacatattaggaagcctaagatatgttagccagagtgataggtcaattcactaaccttgaaggcttgaaaaaaaaattgctgattcattttgtttgctgagtacagactttcagtatttttgtgctaaagaagatttatttaacattttatcatttaattaaagaaagcatgtttataatcagtttgtgcctgtcccaaattgtccctttgtcttcccagactttgtcagaaattccctttctcggagcaaaaatgcttttgtgcaggcaacatttcttagatgtttttgtacttagagtttgacttgaggatatttgtggatgggactcagatttcagagtgtgggaggagaagaggtctggccaatgaggaggcggctttgctcgggtcatttgcatctggccgcccaggttccagcagctccatcgcgttggtgaaatatatcctttaggggatgtcacggctttggttaagttttcctttttactccttagctgctagcgcagttttaatgatagctgtttcacatgtgc

SEQ ID NO: 90313 - DNA, 1044 bp, Homo sapiens
gatctgccaggaggagccgtgcggctgcccagctcatccccaccctccaagagcccacagacgcgcagcatgggggccctgccaggaggagccgtggggctgcccagctcatccccaccctccaagagcccacgtgcctctgcgcatcagccacagtctgagctgggcacagaatcgactcgtggcctcttcagtttcctcagtggctctttctcgaccccgcttcttagagccagggtggcaactgagagcaatggcgaaacaggtgaaaatggggagaaagggcagccagcgctgagatccacacccactgggagcctcccctgctctccaggtcctgataattcagatgacaaagcactcagccagtcagctctaatcctgtagctgcactgactctctgtttgtgactttaaaatgaaagcgatcctgtgtgtattgataacaccagtgagccactttcagattctgaatcaaaattgtcagctgtttctcatcagactgtcgatggcacctgccggtgatgacactggtcagggggcagccgcaacctgggtgagaacaagctcctgggggatcctcacgtgcagcccgggatggggaccactaccatatgggaaaacaaagctcgattagtgcatattcgactttacttacattttgatttattgtatttataattatagagacagttatctgctccttgggaagtagattgaaggagagagaagtagaaaaatagttacgcacaatctcattacccagatatgcccactgttgatattttgtcatatttcctcctgtgtttttattactggttttttttaaagcataattgaaatcatacagtatatatgatttcggaaacttgaaaaaatttaacaacataaaaatttcctcatgcattaaacaattttgtaaacacaaaatgtaaacaccattttaaatagctgcataaaactgaaatataggcatggaccacactttgaattttttcctcttaaattatgatgttaataatattaatattggctccttcttact

SEQ ID NO: 90314 - DNA, 1035 bp, Homo sapiens
tactgagtgatttaagaaacaatgtggattattgatgaaatcttaaagtgatttggaggtgaaatgcgtcagtggtttgtagtgactttgaaacactatacagtaggttcacatggtttaagaagcatcattatggcttttgtgtgttttggtgtgtgtggctgtgaagcctcaggaatttagtttaagcttctgaaaagcccaccaatatgtatttagaattctgttgtcccatatcttagtcatctcaatgtttctcatttctaactttaaaacatgtcaattaaaaaaattcagtatatcattaatttcgtctaaaatgtcacataaatctctgacataatttggtttttaaacaataaccaataatttggttttatttatgtgatgagaataacaactggtatttattgtctatacttatgcaattttatagatggagttttaacattgaatgcggagaacactaattatgcctatcaagttccaaacttccataaatgtgaaatctgtctactatcttttccaaaagaatcccagtttcaacgccacatgagggatcacgagcgaaatgacaaggtatgtattttcaaaggtgatgtcaggaatgtgagcgttgaaactggaggtattgtaaaaatgaacaagtaaaatcaaaacttttaatttaggttcctaaatagtagaacattttatattctacaaataaatattttggcctttttaaaagttgtagttgtattcctagctattatttgataaggcgagagagtgagagcttgtcctggtgaatttgtatattgaagttacttatttgtggacaaataattgtttaaaaaatatgactttttaaaagtagtttcaatttcctgtatgactgaacacagaagtggtgtgttttgaagtatttttctccagtggggagttttatctttaagtgatcttgcatttaaaaatggtattctagatgttttaggttgtgtttcaggagggagcaaatattacatactatcttaaatagaaatttgcactctt

SEQ ID NO: 90315 - DNA, 1009 bp, Homo sapiens
acacttatactcactgaaagaaaacagcttatatacagcatttcttattagaaatatttcttttgtgtatgtatgtgttttcatccttataatcctttcagtaattctgtcaggtgctttactgtgtttattttggatttattgacttaagagccagaggagacttcagaagtttctgtagattgtctgtacattatggtacttgttaatattttcatttattgaacaagcatctgtgaaaagattgtatttcagtggcttcttcacttttctctccaaatagccacatcgatgtgaccagtgcccccaaacatttaatgttgaattcaacctgacacttcataaatgcacccacagcggggaagatcctacctgccctgtgtgtaacaagaaattctccagagtggctagtctcaaagcgcatattatgctacatgaaaaggaagaggtaatcatcatcattttgcatatactttgttaactgattgttaaaatacatctgatcatgagtcaggaggattttagatataaacttgttttgaaagccttttgtgtagatttcaaggagtgaattgtcattagatttgccttgacaccagttgactgataagacattttattttctggccctgtcaatgccttagggtagagacattttaatgtgtagtatatttgaaggatcaaagtatatccacattggctggcagaggctcctcctggcgcctcaccctcctctttgtaaacagaaactaacatttatacgattctgccatggccaaaagtaacttttctgctttgaagatggtagaatctccttgcttgctcctgggtcctctgactgtgagaatctgagggaagagaatcatttcatgatggcccaaagcagcttatacaccaaagtgaccactcctgggagctccacaggcccaatgtctgggacagctttgaggatgacaggccacagtgctgggttgggggctgaatctaaggtgccaatggctattgctta

SEQ ID NO: 90316 - DNA, 1051 bp, Homo sapiens
ttacaatcattcgtacattgattttggagttttctcttccacgtggttcttcacttcatctttgatctttaaccacagcaaccgtggaaacttagcttcacaaagacatgatgttattgaaactgaagtacctcaatctagtttctgggtgttattggtcaagtgtggagcaccgctgtttcccttgaacatgtgacctattcctgggcctcctcataagcttgttatggtgcactgcagtgcctcagttcatgggctggggctgaggccttagagcccacatttctctgggaaatggaaacattactctgtcttcaccaaaaacatggggtggcctgaggcatctagagatctgcatggggtgcctattttgggaaatgagagcagagcctgagtggggcacatctgtgggtagccctgggagctgagagcccatctggttgtggagtctgggctgggcgggggtatggtctgctttccaccgctcagccgctgggaggagtggagatggtggtttgcctggaggtgggggcttctgaagcatgtgctgtggaataacaaaggagtcagggccatgggaatgttggcgggagagctgaaatgttgagccgtgtggtctaggcagagaggtgaaacttgaggggtgtgcgtgaaccctctgttaggatgacacaggtaaaggtggttgaagatgtctgtgcatgccacatgttctgggtggcccaacccgaggacgacatgaagggcaaagattacctctaaggctacacccatctacaggggtcaccagcacagtgagctttaccgttttccattctgaagttccttcagatgtgccttttaatacttcactgtgatttcctccatcactggaaagagaaacaactgttagctgtcattcgcagatgttctaaagtatttataccttattttgaaaaccttcccttcgtcctgttttctcttccacagatgggccaggttctttccagatcacttcccacagtggtgctcacattctttgctgtttgcttcagtccctgcctctgctgtt

SEQ ID NO: 90317 - DNA, 1042 bp, Homo sapiens
gtcttcttaaatatacttaggaactaaattaactttttagtttaaggtgttccgtttttaagttttactttcagaacactgaaatctaatttttagttactgctctattgagatttatagtctaaaattcacactggtcactactctgtccaaataaatctcaaacccagaagagtaaaccagaaaaattactgtagtttttaaatcacttaggaatttttcttaaaagtcacataattattgaaggtcacattattttttgagtaaatcacttcccttaaggggtgttacagaatgtttggagaaacaacacatgcatgcccacacacactcaacacaaacaactttcccacggaagacattgttcacatttattgatcatctcagtggcacgtacaaatgaatagtgatggatcaggttctgtaagtgttgagggaagagcagcgttttgtggggtgggtttggggtttattttgtgtgttgagcagtagccgaggtcagcagaggcacactgcattaggaaaagaagcatggcttctgagaaggccaggacaggagacaggatgatgatgggggggatcctggaggggattcggagaaggggaaaatcccaaacactcggagtctggtgaacacacgctgccatccgagggccggggttggacaggagagcagccttgatgcagtcagtacctagcattgcacgctctggtcttttagagatgatcgtatcttcagcaaggtggagacagatgaaaatgccatgcatttctcttgatgatttcccatggccacttagcatcatgagaattaccccaggacagcctctgcctctaggtgagagatgtgatgttaactctgtatggagggtgcagtaagtggaaggcccgttgtcctagtggcctgtgactatacatggggtgttgttcttcttacagaagaacacttcctcaagtgttgccagggcgcgcagggggagggaggagcatcgtggctctttttggcttgcaggagagaaagcagaaagacagtgatgtagcc

SEQ ID NO: 90318 - DNA, 1199 bp, Homo sapiens
ggacggcgcaacattcaaatgatttattcatctatacattaaaaaaaaaatcacaaacttttattttttttccataagtgaactttacttgaaaagaacaggcttttccgaagttgtatctatttatgttgacagaggtggaaaaagcgttttattctttcttgaggttctggtttatgatttggagacagtcatgggtgttgacaattctgagagcgttcatactgcctggccttctctcgtgggtgtgtgggcagcacctgcacgtgtgggagaggaggggggcaggagcgcagagcccccagctttctagtccaccgtgacttcacactaactcttcactcctcctgtctctctgttacttgtttaaccttcctcctgtaccttcatggggaagagctggccaggggtatgaggaatctcagggtgtcgttctacagccgatacctgaaagttaaacccagtgtaactcaaaagccttaaaatagggattcccaagactatttagagacaaccaaagttgtgtgaggtaagatttctgaaagtcaaataaattttaattccctttaatttagaaatgtaaatgcttatattattttgggtgggagcaagatgtcatatcatcagaaaggacgttacagcctcaaagggttggaagcctcacttataagtgatgacttggaattgtagattcttatttcttggagtggaattagaattctataggtaaagcttttgactgattttggtaggcagagttgggccatcgttaccttctaaccttttagttttgttctgtcttagcaagccttagaaaacagtgggctgtcttcaattccagctgcagcacatcctaatgactcctgccatgccaagacctctgcaccacacgctcaaaacccagatgtttccagcgtttcaaatgagcagacggaccccacagacgcagagcaagaaaaagaacaggaaagcccggagaaactggataaaaaagaaaaaaaaatgataaagaagaagtcaccgtttctacctggtaattttcctaaactttaaagtttggacatttgggatagcatattgctggtttttaagaaatgtgcccttcttttttcctctgaaggtgataggatatgtttgttgaatgttttgtagctagctgtagttggttggtatttaaaattaaaaagaatgacagccat

SEQ ID NO: 90319 - DNA, 1045 bp, Homo sapiens
ctactgtccatattttacaatgtaagactttgtcctaaaaatactaaatgttctttttttacttaaaatgctcttataacatgccttaatatctataatatgcactgtatacaaacaagggaaaataatttacaatatccattaaattataagcatggcctaataaattgaaggttcaaatcagtattggaaataataacattttatgttagcatttgctgttgagatgtaatttctggaaataattctaaaatgtgatttcatttttattaggagttagaccttttgcttgtcctcactgtgacaaaaaatttcgaacctcaggccataggaagactcacattgcttcccactttaaacatacggaattaaggaaaatgaggcaccagcgtaaacctgcaaaggtccgtgttggcaagacgaatattccagtccctgatattcctttgcaggaaccaatcctcataactgacttaggtaagatggattgtagggcgtctttataatttattgagtactattttctttgacattttgtgaattgtgtacacacattatggtctctgtagttaaatagttttttaggcatagtattaatgaagtctgtgttaagccttgttttgctttatggactagtatgttttacagtcaagattaaaatctaagttgtatccaaactactgctcaaattgttttctcggattagagacaaataatgtgtaagtgaaaacagtagcgtgtaagtcctcattgaagaaacattgctacctcagtggaaccatcaaaagtgagaaggggtttttatgtgaaacacacagtgcacgttgttgttttcatctttaggttctttgtactgtgttacagattatttgggctactttaatctttggattaaaaaggaaaagaaaaatctgcctgcttttctttttaggttcagtgttactataaccaacccaaactatgattttgttgatgatctagaaagaaaacactgcttgttagaatctttagaaaaattatatttgttagtactagaacaaaattt

SEQ ID NO: 90320 - DNA, 1559 bp, Homo sapiens
attatgagactaatttacattcttcattgttggttataagcagaattcaacagacaagaacaaatggactttcacacatttacctgaagccctgtgattcttttctgatgggttaatatttgtaactagataaacagatccctgagcttgtttatatgactgtcctgtgtgcagtttttctgttgtttcattaggctccctgtatttatctcttttgtgtaatgcagtgaactttttgtggatatggagggcccggcatcacttatctttgtgcccccaggcctagggcacggcctctcatgcagcaggtgcccagtgacgtccacgatgacttggtgcacgctgcttcatcatttccttggttttggagttcagcgtaggccacgtggataaggactagaaatggaagtctctggataaataccttttggtgcctctttctccattctgaagtagaggtgtgatttctgaggaacccagggcggcgttgggatagcaggttgcactagtccctcggtggatcctagtgtgcaccatcctgtaaaaattagcatttgttcctggacagtagaggggaaaagccagccaggaagtttttcagctcccagaggctcttggagggtggagcctatgctcatggtgctccgagccttcgtggcctttgatatacccagtaatcatgaaaagagcctaaggaactaggtacatgacactaggcacacagccctttgaccctagcatagaactttcctttgcatattctcccagtgtgatgcctacctgtgctggcattgtggttgcccctgtttggcagaagagaagatagagagatgctgagatgttaaagtaccacttgtaaaattaaagaaaagtgacagtaattcagagccgggctgttaagtcataccacccattagcttctgataaatataaatcaactactccaatcaaggttcagaataatgcagtggtttagaaacactgtaaacctcaaaggcttgtgaaaatgctaaattcaaattgtaaacaatacactgttaaatttacaatactgcagcaattgcctgtgacgtccgtaacatcttataggtgaaagggattctcattaaagtacttccatccactgattcaacatatttacatccatagtgacagctgagtggggtgggggtgagtgtcgcgactgccatcgcctctgttgattcttggctgggcttttcacaggtcagaagctcttcagctgtcacgtctgcagcaacgccttctccacgaagggaagtctgaaggtccacatgcgcctgcacacgggagccaagcccttcaaatgcccgcattgcgagctgcgtttccgtacctcgggtagaagaaagacacacatgcagtttcattataaaccagacccaaagaaggccagaaagcctatgactcgaagctcatcggaaggactgcagcctgtaaacctcctcaactcctcctctactgacccaaacgtgtttatcatgaacaactctgttctaacaggacagtttgatcagaatctgctgcaaccaggactggtg

SEQ ID NO: 90321 - DNA, 1922 bp, Homo sapiens
atgctgccagcattaataacattacgttgcaggtatgacaccttccatggtctcctgtgctgtaattctcttggcatcacagagaagcatgaagttttcattacaagtacctgtgctgcttttcagattgatccaagcattctgcagcagacgctacagcagggcaacctattggctcagcagctcacgggggagcctggcctggccccacagaacagctctctccagacatcggacagcacggtccctgccagtgttgtcatccagcccatctcaggcctgtccttacagcccacagtgacctctgcgaacctgaccataggcccgctgtctgagcaggattcagtgctgaccactaacagcagtggtaagagccactcacttttgcttattttgacagctggagtttcagtttcttgcttgtgattacatatttgaatttaggatgttatgatgtcattttcttctctttgtagaagagaataaatcaaatgtcctgagaataaaataagcttttcttacaattaatgatatgtatttaatatatgctcttagattattactaccttcatttaattactcttttcatcctggcttcatttcctcacaaggctttcttcttagacgaaggaattagagatgactgatgctttgttttaaatctttgtcttattgaaatatgtaataacagtttaattaaaatatttttaatataaaaacaggggaaattggttattttgaatctcaactttgttttgctttgtaatgacaatcagggacccaagacctcactcaagtgatgacttcgcaaggtctagtgtccccctccggcggtccccacgagatcaccctgaccattaacaactccagcctgagccaggtcctggcacaggccgctgggcccactgccacgtcttcctcggggtctccacaggaaattaccctgactatctccggttagtaagttataattttaaacatcttttcaccctgcaatttaagtactgtatatcttactatctcttttcctacaatactctgctgtgcataaagcccgtgctcaatatgtatttataatttatgggagaaattgaagtttagtgaaaataatgtattctaattcagatctggcaccagaaatgaaaaattatagtttctcatgtcacttccagtttgagtacagtcagttatttaattatttcattcattgactcatttttagagaataagttatttttgtttagcaaacagcagaaagcgtagctttgtggttctcactcatgctccatgaaactggtataaactgtttacattagggcattttagatccgcatggcactctctttaccgtatgtcttcagaattctattaggattatataggaaaattgaaacataggagaacattgaaaagtagataaacgggtaggaaataccctttggcagtaaagcccacctaaaactggcaatctaattctctctgccagtcaccaggctgactcattccctgtcttagggctatgctgctcgcattctgacttttctccttgtgtgccttccttggtccttacgtatcattaattcccatagtgtgttcggatctcagtgagcattgaacatattttcctggtgtgctttgctcacgtgactcttaactataaactctttgtattactaagagtcatttgttaattcagcaatttttagagcccttactatgtgcttgatattattctagtaacttccacagatattaactcattcaatattagttcatttaagactcgtaacctgatgatgatgttaacaaagacattttgctaggaatcaaaacacgctccgtggagatctgatgtgacagagggaagcagccccacttccctgaaacacacctgtggagaaggacagcattctagatggact

SEQ ID NO: 90322 - DNA, 1076 bp, Homo sapiens
cttcaccagatactttcgtttctcttagtatcggctgcaaggggagatatttcagttttgttgtcttttctgaagaaaattaagatgtcatgcaggataaatgaatatttaaaggatttatgagatgtattttgacctcctgtcttttagaataagaatcagtcagggtgatgaaagtgagaaaatgagcagagatggtcagatttatcccgtaagctcaggagctagttattcctcagtggatcacacttgcttcctttcttcagctggtctcttcagttgtggatgggtaagctccggaagtagctattcctcagtggatcacacttgcttcctttcttcagctggtctctttggttgtggatggggacaatgcactggaaattcttgtctgagttttcattctacagtagtagctgtgactgagactatggggtcacattttcactctttgtttactggtttttctctgtgtgtgttatacttaagaagcacagtatattcatatgtaaagatgtttaaaaactaagaaaagccttatcctaaaattagaattgaagaccctgtgatttctttggtgcagcttggagacctcgggcatgaatgctgcttcctgcaggtgggagcatcgctctccctatgcccttacacctggacttgtctggccttcccattgatctacttactttgcctcttttgtagaacttaacactacaagcggaagccttccttcaacaacaccgatgtctccatcggccatctcgactcagaacctggtcatgtcctcgtcgggcgtgggaggtgacgctagtgtcacgctgacgctggccgatactcagggtatgctatctggaggcctggacactgtcacactcaacatcacctctcaggcaagtgctcctcagagagggatgcgaaggtcctttcaaaaagtgatctttgaaaacattattcattgactccttcctaaataaatagtctgagcattttttttccccaaaatcgaagcattttttttctgattaaaaaatacggtaaatataaaaggggataaaaattcagataatgtagaagaa

SEQ ID NO: 90323 - DNA, 1174 bp, Homo sapiens
gcccgggccctgtctctcaggaccacggcggcctgccccacacacagttctgcttctccctatctagaacgaggttttcctggcagattcctgccagactctgagtggagcccccccatgaccctataaaaggggctgtttgtcctcctcccaccctcctgtgctcttcctccctccccttgagggcacatggccgctggtaccacatgttggagcggccgcccccgagcccgggaatgccctaacaacacccatgcttgtgttgctgggagctgacattcaagaaaagtgcattaaaaattccttgagaaggcatattcttttgagagccgtaaatgaaaagtgcattcacggagaacatgctcctttgttgtgagaggaaagaaaggactgttgttgcctttaaggaacaggtttcccagttccccggaatgtcagggtcacatgaggaatgggtgagcacttagggccaagattgtcgtgtgcttggcccggcagcttctctctaagtgacctctccagcatcactctgtgccagtgctcatatctgaggccacttgagtgtcacgaggcagagcctggaaacattagctttggaaaccgttccttcctttttatgtggaggaagtaaggtttcacaagacacctaagctggacatggtgatgtgccacttggatagttcccaaagcagaaagcagccaggacatcccagtaccccacttctccgtgccgtgtacttttagggaggttttcgaaagctagcttcttaccgatgattttgtctatttttctgttttatgtgaaaaccttcatttataacctgctcttctcagtgttcttctattcagcattcagtatgacttctatgcctctaattgcgactgtatggagaagaactgtttgtcattcagtgccgtgggatataatcagtcctgtaaattcatcagaatgttctgttgcctgattttttttccattgcattttaatttcattaaacatattttagttctacagtaacctaattcctcattgttaccatgagatcctaattctgtagctgtgttctgtaatcccatggggcgtgtaccatttggagacacatgaaggatacagtagacagcacggaaggcagcagcaacacacaggggtgtcctccctccccagagcccagtg

SEQ ID NO: 90324 - DNA, 1004 bp, Homo sapiens
tggatgggtgaacggatggatgagtggatgggggatggatggatgcatggatggatggatgggtaggtgggtgtgtgtatggatggatggatagatggatggatgggtaaatggactgttatgtggatggatggatgaatggatagagagatagatggatgactggtattacaggaatatgtgagtgaatcctgttttctgtagataagtaatagagtttggagaggaaactaactaaatgatatttatttaaacctaacactctaacttgaaagcaaaatggattcattgcccttcgtgacagaaatgtggtattttttggagaaagctatgagatgctggtatacaacatgaaatatctcaatcccacttcagatttctaattgtttctgcttccagaggagaagccaagtcaaaatgtcctgaataagcagttctctattgtgagaggcctcttgtggaatctgggattgaaacaattctaaatgccccacttctttcatgcatgaattgcaaaaagatgtggcaagttttgtttctaccaagaaaactaaaaacaccttttgtcaaataaatgctccttgcatatttaacttatgcaccagtggccttttaaacagtcaatgtcccatcaaggtgcctgcacatctgggctctccgggagcagccatggcagcacccgggaagaaacgctgatgtggctgctctgcatgctcagatgacttcatcgggaagcctgggtgcattttacgctgggtgccaaatctcgagtaactgaggaattcccagagccttctgaaacacagagctgcaataaggctgctccatccaggttagctccatcctaggccaagggctttatgaggactgcacatattctgtgggttttataggagacagctaggtcaagacccctcagagaaagctgctttgtccggtgctcagctttgcacaggcccgtattcatatctcattgttgtttgcaggagaggcagatgcgaacc

SEQ ID NO: 90325 - DNA, 1019 bp, Homo sapiens
ctgaaatatcagcaagcaaataaactgtgtgtgtgctattataatatttattattcttcttcctgcttacctctgaagagatacagatagccaattagcacatgaaaatatgcgcaatctcattacccagtaaggaaatgcaaagtgagagaatttacctttgagagattccataattctccctaaacattgtatgtcctggtgagaaactgacttgttctatttatctccaaacctacatgtttgagctttgccctaagccctgctcccccacagtggccgtggccatgggtggtactgcccagtgcccgccaggtgccactgcctgcctgggcactgccatctgcccatcagggttaagagctcagcgtccctccaaccttagtgtaccaggtggctgctcttgggtgatgtcctcttctcagagaaatagtcctaggcctgctacccctggtccgaaagaccctttaccagccactctgagcacgttggaaccgtctccttctttctgccaactctgcagccttgaggctggggactcaaagggttggtcgtttgtcagggctggggatgatgtgccctcctgtgggacactcctgctttcaagtctcctctcctgctgggctcagtgatggctgagcgcctgactcatccctgggctcatggagccacagtcttgggagggtgctgggcaggagtgcccagggcacagccaggctcctggagtcccagtgctgagcccgcctggggctcccagctccactgggtcacaggcagggaccagagcacaggattggggcatcctcattggtggagtccacccgaccccaggggcagcccctgccagccaagacaggagagaggagcagagccccagcacagggcacgggatggaactcacctgtcaggaatgtgcccccactctgcggatctgctctctccaactctggagttgctcttcagtccacagctcaagtcctcatgtgacaacttccagagaaatgagttctccaggctcc

SEQ ID NO: 90326 - DNA, 1037 bp, Homo sapiens
aaaatacaaaattagccaggtgtagtggtgaacacctgtaatcccagctactccggaggctgaggcaggagaatcacttgaacccaggaggtggaggttgcagtgagccgagattgcaccactgcactccagcctgggcgacagagcgagactccgtgtcaaaaaaaaaaaaagaagaaaaaaagaccctttaaaaacccgtgaatagtcaataacctggttacagtaagaaaaaccccaaatggagccatgtctgacttgagaatgagcgtaaggcatggtactggtgtggttttatgaaactgtgtttgcatttgggagccagcagcctcccctaaggcgtgagcgtgctttcaggctgctgggcggggtgtccagcagttgcagcgcccgcccgtgggaatttcttgtgaatgttgtgtttgacatgcagaatttcttagtgatatcagagaacaatcttacgaggttcacccttgatagcagcctctcaaacgttttgagtcagtaatgttttgcttctggaggagattcacgaaggaagtctctcgtccatgcttggtggaaagcacacctgaaggtcattctggttttggaggcagggaagtgggcatttggcttcatctgataaacggtgacctttgttaaaatccctttgttaagttggaatgcaatgattaaagatataaggcgtaattagcaaacaagggcagcctctccacaacctttattaaaaataatggggtgatcgtgaagtggtgcctcagggcaatgtaaacccacagggcctccacacacctgcactttgtgcacacgccccacctgcggctctctcctcatgccgccttccctctgctgcagctcccagacccagctccggtcaaccccctcgaggtggcccctgggaccgccgtatgagcctctctccaaccggatccctgatgctcccggagagccggcccagcctcgaccccgggtctggctgagggcgacagggctccaggcacacaatccagcttctgctcagacaacccagg

SEQ ID NO: 90327 - DNA, 1034 bp, Homo sapiens
ggagaagggaaggtgggggactggggagaaggtccttgtgacacaagcatgggaaatctctattctgaaaaaaaaaaaaaaattcacatatgtcataggtttttgccccctgatctataagaagaaggttctcgaacacaaatcacctgtagtgcttctgaaagcaaagagttcagggcccaagaatgtgtgtttctaagaagttctcaggtgctgatggccggtccccacaccgcatcacgctgcctcgtatccgcttctgagaccctcaccactgcacacttctcttattgtattgattaataatttaggaatgtagaatgtcttaggcctactgtcatactttccacatgggacattcaaaatgtaaataactctgttcataactaaaatatattcctagaggcattctcatagctagattcagtcttctaaactttctcaactgtaaaatgggaatgaagcttacagggttattcctgtaattatctaacttaggtttatagaaacatgagggataaagcaaatcattgtaaaataaatcctgttatctccatagaaacattactttaggattgctttcttgaacatggactcaaaaaaaaactgtgcaatcaaaagcatgttatgaaaacaacgtccaaagaatcctaagtctaaaagtaacacaagcgtgatctgtgtcctataatatgggtataccctgcagctctacacaatgcaaatgttttgctaataagcctaaacaaaatgaagtgcggagagcatatgatgaattccacgccatcataaacttgaccttgcattatggcacctgacatgcttgtcagcctaaccctcaacaggcacgatgtttgctccctacatttttgcaggtttgggagtgggagtaagatgatttgggtaaccaagtgccaactatctaggaagactggcattgaggtcttctctatctcacgatgcatttatttctacaagggatttcacaataatcccattgcttgtaaaattgcactcacaattatttcaaaaac

SEQ ID NO: 90328 - DNA, 1050 bp, Homo sapiens
ccttttctttttcttttttttttttttgacagagtcttgctctgtcacccaggctggagtgcagtggtgcaatctcggctcactgcaacctccaccttctggatccaaaacagtctcctgcctcagcctccccagtagctgggactataggggcgcaccaccacacctggctgatttttgcgtttttttgtttgtttttgttttttagtaaagatggggcctcaccatgttggccaggctggtctcaaactcctgacctcaagtgatccacccacctcggcctcccaaagtgctgggattacaggcatgagccaccgcgcctggcctctaattactcttgggataattttaaataagtggccattaagtagtaagacacttctgttggcccattggaacccgtgaaggaagctctggagctgtttaagggaagagtgctcatgccacaggccctaatgccagctgagcagaaatgccaggcgagtagctggaatagtctctacaggagattttaaatctctgtcaaaacctgtagtggacaggcttcatccagagaaacagaagcaggtggagatacacattagagactcatggcaaggaatggcttatgcagaggtgggctggccaggtttgtgggacgtctgtaggacaggccagccagaaggcagctgatctccccggccgactgaagctgccttccacagcaacatctcccacatgccagcaacaaccacgagtgcatgttccaaagctattagtaatgtctcacactcaatagccattaaagcgtaaaaatgtcattccgaatgttcttttgttctggactctgtgaatagcactgcgttggtctgagtcaccattgtgaaaaataggtggatatctaaaagatgaggagaaacagacctatgtgaggccaggatctagaatacagaaacagttctaaaatgtggtaatttgaaacaagccactcaagagtaaaatatgagactaatgagaaaacccagatggactgataaaataagaaaaggactttaaccctctgggaatcag

SEQ ID NO: 90329 - DNA, 1009 bp, Homo sapiens
ggtcctactgtatatgggtgggccctaatacaaggactggtatccttataaggagaggggtttatgaagccacacagacaaggggaaggattccatgagaaggaggaggcaaaaactgagtgatgcaggcacaagccaaggaactgaggggccaccagaacccagaaccacaagaacatggaaacaccagagccaggaaccaccaggaccaggaaccaccagtaaatgaaactactagaatcaggaaacaccaaaacaagggaccatcagaacccagaactatcagaacctagaacaccagaaccaggaatcatcagtacctgacaccaccagaacccggaacccccaaacatagaaacaccagaaccaggaaccaccaggaacaggaaccaccagtaaacgaaactaccagaatcaggaaccaccagaacaaggacaacgaatcatcagaacccagaactatcagcacctggaacatcagagcctggaaccatcagtacctgacaccaccagaacctggaaccatcagtacctggaaccacaagaactagaaaccatcagtacctggcagcaccaaaacgtggaactgccagtaccagaaccagaaccaggaaccatcaacacctggcaccaccagaacctggaactatcagcacatggaacccccagtacctagaaccaccagtacctggaaacgccagtacctggaaccatcagaaccagaaaccatcagtacctggcaccaccagaacctggaatagggaaggaaagattcttcctaaagtctgcagagggagcatggccgtaacgacaccctgattttgaacttctggcctccagaactgtgagagaataaactttatttgttataaggcccaattgtggtaatgtgttacaatatccactacacatcgtaacaacccctaatggttctcctgccccaaccatcacagataaagtttcttttttgttttgtttttctttttgagatggagtctcactctgtcgc

SEQ ID NO: 90330 - DNA, 1682 bp, Homo sapiens
gaggtcagaagggagccagggcttgggcaagtgaaggagcaagacccggacccttcgagctccagaacattctctgcgtggccatgtgggttttacaccttaggagaaaattactcgaaagtttgtcaactgaaagaccgcactcattaatttatatttgttggttttgcttattgtattcaataaaacaagatgtttgcatgtagaaatataaagtgcccagaaaagtccacctgtgttttgttgtccgtaagtcgcgcttgggagcggggtggacctctgtctgctgcgctggaagcggagcagctctgcctccgtgtctaggcacttactcgtgggctgtctccgtgtctcgcgcaggtgcacatggggacacacatgtggaataacgcccccgcgagacgcggccgccgcctgtctgtggagaaccccatggctctcctagggggtgatgccctgaagttctctgaaatgttccagaaggacctggcagctcgggcaatgaacgtcgaccccagtttttggaaccagtatgctgcagccatcactaacgggctcgccatgaagaacaacgagatctccgtcatccagaacggcggcatcccccagctccccgtgagtcttgggggcagcgccctcccccctctgggcagcatggccagtgggatggacaaagcacgcactggcagtagcccacccatcgtcagcttggacaaagcgagctcagaaacagcagccagccgcccattcacgcggtttatcgaggataacaaggagattggtatcaactagccagtgactcgctcatctgccctgcccaggcccacgttttgaagttggagcatcaggcctccgacctttcttgcctcggttctcattacactttcacccatagcagaaaacactttgtgcggctgccgagaggtggtcttgtaagcgctgcatggcgctcccttcaacagcaagcctgactgttctcgagaactctgcaatcttttaaataagcttccttcaaaaaaaaaagtgcttggaaaaccgccttaggaacagaaagagctcagaccatgtccacttcctttctcctgaaacctaataatctctccgagggagaaaggggttctctgcggtattccagtgaaactcatttgatggtttcttttgaattagttagacacttgaacggtgttttttagaactcttcatgttaaagacgtggtttagtactcccaatgctgtgtatcatgacactatcttcgtctgtagtatttatgatgttaagataatgcgggtaacagacaatataatagccccgaccttaaacgaagcttttgtactgcagaatacatctggctgtgtgatttttttttttaagcaagatttgttttactataaataagtggattatttcaatgcaggcaaaattgtgaagttctgttgggaaagatagcatgcttttcgtgtgcaagtacctgtcagtaataagccttttttttttttttttttaatttaaatgtttgtagctgctatgtggacagttgttttctagtgtggtctgtagcccaataactggggaacgagttacagacaaacatcaccgtaaatgactcacaacattataaacagttgtgagaaaatatttcacattatcaaagctgtacaataaaaaggtaatgtttgtataa

SEQ ID NO: 90331 - DNA, 1076 bp, Homo sapiens
tcagatacagacagctacatactgtcgaaagtcacttctagaatgttggttgatgacttaaagttgtgtaacatagagtgtttagatgttgcttggagtgaacattctttgctatagtcatgtttcagaagattggttttttctgactggattaagtgcagtgaggagctgttgagcagcattggttgtgctgtcaggctgcccatccgcaccacagatgcctccaggattatgctcacagcacggttaacagagacttcttcagctagcacaggtctcgttgggcagcttttttaccttagctaacttattcctttgcaaaagaaagcagcctctgcagtcttatttataatgctttccctcagctgaagacagcctaatttgaggaaatattgtccctaaatgaaacacactgtaaagaagactgcttggcctatctcagcactccatttttaccctaactaggtaccagctggaggatgagtctgcgcatttggatgaaatgccactaatgatgtctgaagaaggctttgagaatgaggaaagtgattaccacaccttaccacgagccaggataatgcaaaggaaaagaggactggagtggtttgtctgtgatggctggaagttcctctgtaccaggtttgttatccattgctacctaatttccttatatgctaaggttacttataaggttagcttctaatatacttattagctatattaatataaaaactcaaggagatattccttaaatgatatcatggagattatcagtacattaatcaaagccaaacaatgctaatatgaaaggaaaggaaagccaaattattatcttacgagaagttttaatggttaaaagctggaggccgggtgtggtggctcatgcctgtaatcctagcacttcgggaggctaaggcgggcagatcactttgagctcaggagtttgagaccagcctggacaacatggtgaaaccccatttctactaaaaatacaaaaattagctgggcgagattgtgagctcctgtaatcccagctactagggaggctgaggcaggagaatcacttgaacctggga

SEQ ID NO: 90332 - DNA, 1048 bp, Homo sapiens
tgatttgattatagaggcattttgtgaaaagctactaatcctaaaacattttaagaaaaagtataacttgtacactgctggatatagtttcagctggacttgatgatgtaaggcaatttaaatataagggggaaagtgttcctgaataatcaataatttagaaactatttcgcgtacatagaaatgctattgagtaaagctcctagttactgtctcccaaggacttctgtttgcttctccctcgttgtgcaatatttgccagtatgctttcctcacatttttgtcctcaaaaattccccatatttcattttcctttttagctctactactcagtgaggcttaaacatactgttttcgttacagtgtttatgtatccttggggctcatgccttttactgctagcatggaagtcgcctgactcccctgtatagtggtttctggctgcatgatccaggggcagttctggtgcacctgcaggcctttcacacctcatgcctgttgcgagtgtattcattcagttttgtatagtagcacatgatatgatagtggcgtcttaaccactactttattctgtctgtacacaataaaattattagtagcacagtgatacaaataacataatttatatcatcaaagtctaggcatcttagatttactggtacagggttatagaggaaaaaactgagtaaaatgttgaatatttatgtttttagcagtgggcattgaatttagagtttctcgagtgagagtgatgtcagtgaggcattagttcatgtagttgctgacagtgatggtgacgttaaggtttctgttgtgctgctgtttacagtgctcatgttatgcagacagtggtcttgcgtttatagtgtcgtttgtctggaagaacatgttaatatcagataatgctataaagcttatattttctaaattttatatgtatcttttcaaatacttagatcttaatatttgatttttcattttgaatttgtctgacttttgtatactagaacatcagagtagataattatgtgtcttagagcaaaaattc

SEQ ID NO: 90333 - DNA, 1024 bp, Homo sapiens
gatttgttcacaaaattgatgatcttggccatacttgagtgaagtgtgcacacaagcacacacacgtctgtttaccaagacgagaaaacgtttctctgttttttcttttcatatgattgttcatttccagttccagctgcaatttttagtcctttagcttgaattttcatcctctgttattttgaagtactttatcattttttgacatgtattagctttaattatttttagataattacctcaataagcaactacttcaatattcatataaaagatactgttattccactatatttgcgttttaagattttagagaagtgaaaagccactttttccatttgaataatgcttgacgttgccttctgatgcacctagatgagttctcttgtgtcctgagtatcatattgttcgatctgagaattgatttactttttaaatgattttctttcgttccttggtttggcagcagccacaattgatgctacctttcagataacaaatgatgaatagtatgctttctctgtttatatgcatcttaacctttgattgagcaaacctcttaaaaagttgatgtacaccttaggcttaccttcaaatctgagaagcaagcttaggagagcatattgattcttttaaaaagcttttaaaaacgctgaaaatcaagacaatttgaataattagacaaagttaaggaataattaaacatacactaaatctaaagaaatctctttaaaggaaactatttaaaataatgcaaatttgaaaatatgtataggtgtctcttttttaactgaagaaaatgttcttcaacaagaattcctcataagcccttgagttcttgcattttctataccagtttatattaaccccattatatccagtgccagcaacaccatcatctttatacatacattgacttctttttgccatcttttgttctctaaggttctataatgttctcaagaaaaagatatcagttaacatttccagatttcttctagccaaaatcctgcctctgaggcat

SEQ ID NO: 90334 - DNA, 1034 bp, Homo sapiens
ctgtccagtgccttaaatgttctttggcaaagaggacagcaaataagttatttaagaagctaggacttgataacaatatgatcatttcttcaaaatttagatatgtgtactttgagcagatatataaggcaggtggtcatactattttgttactgtactctgtttagctttctaatactttgttcattgtgtaatagcattttgagaactttttatgctgtatttgatcataaacttttttcgttaaacatgtaattgaaggtaatttccatagaaattaatcgtgatcactatataatgcctgagaattaaaggctattaaatatgttaactctcttaccgtgctacagaataataaatctctcagaaatgttagatcttaattacagagtcagaaaggatatgttttctattcaaaatgttttaaagttatttactgtattatgtgttatgactgtagtgtttctttttctctccttttaagatgtgttgattacagagaatgtgaaaaaaatagaaggaaagaagggtgaattggatagctaggagagagggtgaaattagatgatgaagtaggaactttaggtcagtggggcatctctactgccggatgctttgctgtgaaaagcatagcagtgggggaggaggcctgaagctcctaatgctcataggaattaaagtggacattttattacaattaatgattttaaagctcagttaagatttgtttcacacgtaattctaaagaccattgctattttataatataaataaaaatagcttcagcccttattggcttgtataattgaggcatgtagaaaaaactacaacataatgcatataaaagttttgatatatccaaatctttaggaacagtgtgatactactgaaatacagctgctttaagaggtatttgggaaatacgatcttttaataagttggatatgggtctaaaagtcagtgtaacgagtgtgatgttagtttttgatagctgtcaacataaactgaatgtaaaaggaaggaacattttccct

SEQ ID NO: 90335 - DNA, 1024 bp, Homo sapiens
ttaaaacacaatgaaatatcagtatgcatctatcagaacagctaaaatgaaaaaatggtgacaataccaaatattggaaacaatgtgaagaagcggatcacttgtatattgcttgtggaaatacaaataatacagttatcctggaaaatcgctggatagtttcttaaaaaaaaaaactgtaactatcatactacccaacagttgcactcctggacgtttatcacagagaaatgttaaattatgttgattcaaaaaaacctgtgcaggaatgtctgtatctacattattcacagtagctcaattccagaaagtccatatatcccaggtgggtgactggtcagagaagtagctgtgcgttcacaccgtggcatgtggtgttaggagaacacagggctccttgctcttgtggtgcccctagttttgaggggaagcaaaaagaaacaaaaagtgtccataattatttgaaattatctagtttgtttatgagtactccatagaaaataagacagaataaggacataaagagtctgaatatgacatttttaaaaatacttttaaaggccgggcatgatgattcatacctgtaatcccagcactttgggaggccaaggcgagaggatcacataaaactaggaatttgagacgagcctggacaacatagaccaaaatttaaagaattagccaggcacagtggcatacatctgctgtcctagctacttgggaggcttagggaggaggattgcttgggcccgggaattcaaggctgcagtgagccatgatcattgttgaaacgtattaaagagaccaaagtaaatgtaagacagttcatgcccatggttagaagtatgttattcaaaaggcagtgttccctaaattgatctgtagattcagtgttacccctctcaaaatcccagttgatgtctttgcagaaattgacaggctgattctgaaattcatagggacattgaagtgacccagaatggccaaaacaattttgaaaaagatggacaaactttgaatactc

SEQ ID NO: 90336 - DNA, 1219 bp, Homo sapiens
catgtattgacttatagttttggttttgctttttcttgtgttatttttgttttggtgtcagggtaatactggccttagtggaatgagttaagaagtgttctttcttctatgttttggaagagtttgtgaagaattattattaattctttgttaagcgtttgatagaattcgcccatgaaaccctgtgggactggactttactctgatttttaaaaaattactaattcagtttctttacttgttacaggattattcagattatctatttctttccaagtcagttttggtagtttgtgtctttttcataatttgtccactttatctaggttatctaatccactttatctaggttatctaatctgcggccgtgcagttgtttttaggatttccttacagtcctttttatttctgtcaggttggtagtaatgtaacctcctttgttcctgattttagtaattgaactcttctctctttttttcttggtcagtctagcttaaaggtttgtcaatcttgttgatcttttaaaataaccagcttttggttttaatgatttttctcacttgtttttctgttctttatttcatttattggtttctgtttttattgttttcttccttccacttattttctgttcagtttagtcttctttttgtagtttaaggtggaaagttagattatttacttgagggtcttttttagtacaggtgttcataactacaaatttccatctaagtactgcttttgctgtatttcatgaggtttggccatacatctcaaaattattttctaatttcccttgtgatatcttctttgattcattgcttatttatttttagtttttatttttatttttattttatttttgtagagacagggtcttgctttgttacccaggctggagtgcagtgacatgattatagttcactatgatgatcactgtaactttgaacccctgggctcaagcagttctcttgcctcagcctcccaggtagctagcaatacaggcatacaccaccacacctgggtaatttttaaattttgttgtagagacaggctgtgtctgttgctgtgttgcccaggctggtcttgaccacctggcctcacgtgatcctcccaccttagcctcccaaagcactgggattacaggtgtgagccaccttatctggcctgattcattgtttattaatgaatatgaatttcctcatatttatacattttc

SEQ ID NO: 90337 - DNA, 1337 bp, Homo sapiens
gtatgtgctctgttttattcagctcgtcctctgtttgttcccctttgtttcacaacagtcttctgttattataaataatgctgcaaggagcagccttgtgtgtatgtcattttgtgcttttgctattccatcattagaatagattctgagaagtgggatgatagcacggccaaagagtagtggattttcataatagaatatcttagcatgtttgaaactggataggcctgagagcatatggtaacatttacctgggtcttagcattgtagctgtgcttttatgattgaacattttttatgacggtaaatctggtattttattagcaaaataatactatacactgttggatatttttgtgtatttgttattttgttattatcaaaacatacattgaaagtagaaatgatcaatgcagtttttctaaaatagaaggctgattaatgttaaaccttaataggcaagaacagcaaataggaaataagtgatttaaaaaaatataatggcctacatcttttcatgaaacctgttttgtgaatcaaggaacattgtgtaaaataaaagtttttaaggagttttgttcctgggaatatctagattgttatttctttgtcctactgtgccctggaattattctttgatggcacctgtagctcaggaaaaaccttctgtaacaattcaagagtggtaaatttttattctctacttccaaggttcgtgttttattcgaactgatcaactagatggtgaaactgactggaagctgaaggtggcagtgagctgcacgcaacagctgccggctctgggggtgagcagcaccaagactactccatccttttatcttcaatggtagtttctaggcttcacgtatatttctgtttataccagctaatttatttaatgcattgagaatttgttttataatttctttattcctcatgaaggttcattgaagaattgtgccaaaataatttctgtgatgtcttagcacataatcagttttaggtaattgtgaattttctttgacacttaggttttctttctccttctgctcaccttcctgcccttcctccctgtccttgcccccttccccctcttccgcctcctcctcctcttaatgtccttttcctttttcaatttattttattttttaagtgataggttgtcactctgttgcccagactgaaatacagtaacatgatcatagctcactgcagcctcaaacgcctgggctcaagtgatgctctctccacagtctcctgagtagatgggagtacaggtgcacaccaccacgcccagccagttcttaatttttttttttttgtagagatgggggtct

SEQ ID NO: 90338 - DNA, 1050 bp, Homo sapiens
aatttgtctgaaaaaaaaaaacccaaaaaatccagccaagcaaggatgtcggtacatgtttccattaacatacaattctgtacaagcgatcagcaggtgacagaggttagcagtgcagggataggcgggttgcatgggggcacggggatacttttgtgagtaatgaaaatgttcagtatcttgaggtggtggtggtcacaggcatacacatatatcaaaacaaaatggtacactttaaacgtgcagttattgcatggaaatcacaccttatgaagtagttacagattttcatactgttatctataactttgagtaatgctctttgccatgattataggaagtgacattttattatcttcaatattataaggatactttctttatttttattagtgacagatatatacacatataaattcaaaaatatgtacagaattaaaataaataattcgtacaatgcaactttaacattttcgtggccagtacactttgatacagagtctgattaaggattttagtgacataactatatggtaaatgaaaacattttaatttttgctgttaccacaccaccaaaaagcagtatatcctaggaaaaaaggaagttcaactgaatatctgattcattaatcaattttatattttagcttcacataacttggcatattaggtatagatcttttttctatagagaagaaagctctgatttcattatggatatgggcaaggcaattgagtttttcatgtaatagcttatgcccgtaatcatccctcattctgacattcgtgtctctcgtggtgtagatctgagggtcttctgtgttgtgagctgtttgttgtatcacagttgtgtcacatcagactgtgtccatggtgacagccaggctgagtaaacttagagacctaagaactcatctggaagagctgaggacacagccaagaataacctttgtccattctgttatattctcagagaattaaaatttcagagtcatgtaataataactgtgctgcagagcctgtaatggcaggtgcagtttcttgtggctt

SEQ ID NO: 90339 - DNA, 1069 bp, Homo sapiens
ggtcaaaggacaagtttgattagttaaggatatagcctcttaattgaccttcagtgatagaaccaccattttagtagacagtagtgaaaggccattgtcattatctctattgtcagtgaaaagaatattagtacgtttcctaatgttatatgtgggtacatttgtattgcttaacaaatcatttgactttttcaaagtccatttttaaagttgagattagattttcttgaattagccaaattaaatacactgttggataaatttatataaaatcaaatagtgtgataatactttccatcaaaacaattaattagaaagtgttatcttttactcatctttaaagtatttctacaaggaccactttcatgtttttgcaggtactgtaataggtgttgtcatttataccggaaaagagactcgaagtgtaatgaacacatccaatccaaaaaataaggtaggctagattgaggagcaactgctttaatgaacttatttttcctttcagtaagaaagtctgcatagttctgaatagctcattcttttggcttaacatatatcttaaagtagactttcaaaaatgttggtgacttacaatatgaattctccgtatttatataacaacattctcatactggcgaatttccaaaagtatcattgcttggctaatcagttttatatgtgtcttaaattttcattgtcagatatataatttgcccgtaatttgacagttaattgtggctaatttcttatcttcagtctacttattttacaatttgcactcttttatgttgatggttcattttaaaataaagcaatctgtattaatgtttttatactatttaatttgatgttacagtattaagccagttttatttatttccatgtcagaagaagcatattgaagccaaagattagttttaaagaccgcttgattatatcctgaattgattatatttctaaaattgttatttatgcatccaacatgtgtgtaaaatcataacaaaaagtctgaatcctcagtagttgctatcatcatgataccatatgtgagatgaattcacagtatgtg

SEQ ID NO: 90340 - DNA, 1019 bp, Homo sapiens
cccaggctggagtgcggtggcgcaatctcggctcactgcaaactccgcctcccgagttcacgccattctcctgcctcagcctcccaagtagctgggactacaggcgtccaccgccacgcctggctaattttttgtatttttattagagacagggtttcaccttgttagccaggattgtctcattctcctgacctcgtgatccgcccgcctctgcctcccaaagtgctgggattacaggcgtgagccactgcgccccgccagatttggtatttaaacatccaattaagacataacataacagggaaatgaaatatatacttaaatatttctgagtgttaaatgctagttttacaagaataaaattcaggagaaggttttgagcaagctacactgggcgaaaggtaacatgtaatttatccaggggaagcctcggtattgatacatgttgaatggaagagaattgtgacattggtctctgaacagagacggaaaggtggaaattattgtttattgctggtaagactgttttctgacggtgacatcacagtgttcttctgttgcttagtaaaccaacaaacttttgggcttcaaagaaggctggtgcaaacaaaacggtaaacatgtacaggggaaatctcatctcatcctttacctgagctttgttggatttcttcaggtagcaaaaatgtttctaacactcaattctgacagctctctgagtagaagccatattgggacattgatacattggagttcgtcgtcagcagagaaattgagctgcaaatacatatttttgaatgagtagtggttatcggtcaggataggctgagtcatgctctgataataaagtgcctcatactccgcagtggcttccccagcgttgtgtttctcatgttccaggtccggccaggctggcagctcctgctggtcatgttttcctcatgttctgtatctggcacaggctggcagctcctgcttcttgtcatgttttcctcgtgttccatgtccggcacaggctg

SEQ ID NO: 90341 - DNA, 1361 bp, Homo sapiens
aaaagttatattgatttatattaaaatattacaataaaataacttatttttatcttttcttgtagttgcatacaatcatagaatgccttaatttttctaacagttgctttcttgtaataaaataccgtagagtttaaatacttattttaaaatgtgcccatgtgcttcaccaaagagctacatattgtagaacatattagtagtattgcagtaaatcaacagagatagaaagactcttgggatgctttttttgggataactgttgttaatattcacaaatcatagtgtttcagttcctcatcaggaaaagattaactagaaaacaaacccaccatgacataattctgtagcttctagactagacccagggtggctctttggggtacattagcacagccttcacttgcatacccggcacactttgatatgacagctgctcacaattagaagttgtagttcttcatctgcagtgtgaacataaataaacttataatttcaggaaagtagtaaagaaacaaaatgctaagtgttgaaaaaacaatcctactgatagcatctggggcataatgctctatcagagtgtatagcaaatatctaaactagaaaacttagattttgtccctaaattccttttaaatatgaatttaattagaaaacaggtgctccaaataaaaaatgcaagcatttttattattgtaattgatttctatcacagaaaagacttagttagctttacataaagttctgaataagaagggcttactaattatttgttgcatattaaataagaactatatttgacagtatctcatcatttctaagcggtatagctaaattctctgtaatcaaaattcctaacagagaagtgtaatttattcaagaagcaagtattttcataattgtctttattttttgaactccttgattccttacccctgtgccataaaagctgttagaaatgtatggaccttgtgataatgattgacttatgacatttcctgcaaaactaagcatgtctccctaccagatcatgccccgtgatttctgacgaggcgatctggaatgtctcgtgagactgagaatgggaaagtgctggaacctctgtggggtggaaagcaagtgggcatgtggatggtggttatgtagttgctgaagatggagaagggagagtcggtatcaccttccccaggaggatttctgtgggctgccagactagggagggtctggggttcatggacatgccctgtctcatgcaaatggattccctttgtggctaccatacatcaaaaacaggtcacgtgtgtgctgtgtgttcagaagccaacttcaccagggacaccttcaagccagcagccagctag

SEQ ID NO: 90342 - DNA, 1046 bp, Homo sapiens
ttcagacattggtcagcattttatatatcctcatgtttttaatataattataaataggtgaatatgcatttaattgcaaggggaatgaaatagaatactgattgtagttctgatcagcaaatattttagtcatacgtcttgtcaagacagctaatggctcttgatttaaaaatagtgttgagtagttttacatagtggtaggtgccagatatctggagaatgggatggagatcttccagtggcttataaatccccacatatttacacaataagccaagaaacacagaaggagagtgtgacatgttacttgacagtgacagccttgtgtccttgactaggtcctgtaacatctcttctgtgctgattctgatacacctgtatgtaggttatcaaggtggtggaaacatgctgaagtcagctggaccacagttgagcacttaagcattaaggaattttcctgatcattgtcattttgtggtggtttctaagatactgttagaagaacaattagcaacttcaaatgctatgtttagtgtttcaagtagccttaatgaaaccagactttctggaatctcacataaaaatgtttttcactgatactgtttagtaaattcccttgcacaaaccattaaatatgttatacttgttggcatgccaaagcaagaattcggatgccaacattttgaaattaattactgaagaaatttctcactttactgtagaaactaatctgtatcattacctcttaataaagataatctaagttggaaattaaagttttaattataaaattagtgatcttgtttactaataatcatttaaccattctcttttctaaaattttataagagaaataagcaggtggaaagtagtctccccactaccccccctccgccccctctattctccgcagtttctttaaaaacacagttttcatggccatgttccaggcaggctccatggaaggagggctaggctggtgcctgtctgctgggccacccccctgccctcctgtgcacctacatttgcaaggactcactttgctt

SEQ ID NO: 90343 - DNA, 1082 bp, Homo sapiens
aaacagactgagaaaatgaaaggagatgcgtgctctgtattttaaatcattttaaagaaagccatggtcttccctttcttaccatgtctcttaaagttttatgactcctagtaagagactttcttttacaatatcagtaccacttagagttattattagaatagaatctattttttatatgctttggggcaagaagtatttgagtgtgtgccttgtaaagaagcatgaagcagtcagaactcctgggctcctagggaccctgaggtccagtgacctcccaccccccactgtcaggatctgctcttcttggagttcctgcagagcttgctggcttgtttgtaaaatacaatgagagctttataacccccctaaagtcctgggtattgtgtgtttagatagtaagggttagagaataggttcatgctctttgtaaaatacttgttaaaataaatataaaattacccaaataaactgtgtattagactgaaaaccaaatgccacttctatgaatgatgttgcatgttgaggtttctggtgttagtgggtagcttacgttattgaaggaattattttaaattggtggctggtcttggcaaaaccatttaaaattgatgccttcctacattaagacaaaaaaaacagtaaatctgttcaggatcttgaaatcattaaggaagctgttgttacaatgttatcaacttagtttttagctctgaaacttcgaaaagccttaggagggcaccaccctactgactgaggagggcaccgccctactgactgtgcggagggcaccgccctaatgactgtgcggagggtaccaccctactgactggggagggtaccgccctactgactgaggagggtaccgccctagtgactgtgcggagggcaccgccctactgactgtgcggagggtaccgccctactgactgtgtggaggacaccgccctgctgactgaggagggcaccgccctactgactgaggagggcaccaccctactgactgaggagggtaccaccctactgactgaggagggcaccaccctactgactgcggagggcaccgccctactgtctgtgcg

SEQ ID NO: 90344 - DNA, 1051 bp, Homo sapiens
gagaagagaaagccccatgctggagctccgagatgctgctgtggacgttttacttggctagaaggggatctgctgctgtgaattagagggcagtgtgctttcttgggagaatatagagctgggaatgtgcagtctttgaagagtttctgttgaaaatgagctgctgtctgtgttgctgtattgcaacatggagaagagtttttgtggcaggccaagtgtctcattaattgttacattagaatcaagtcactatttcatataaaactgacactttgtgtttgaagtgtcctcaggagtcttacacagtgaagtggccaagtgagccctgtggcagtgtgcgcaggacagatcacaggaggggccgccccaccccgctgaatgcggcatcccgtctgtgttggtcatggaacccacactcggcacaccagtcccatggctttagggtccttgtcatcgctactgttgtgaaaggccatgaagtatttattaaccgatggtagtgctgactgtcggccacaggaagtgatttaaaacaagcctggttagaaaagaaaacttactattttatgattctgttttataacatagatcactggtgttcatcttatttctcctactagattagcttgtaggtaaaatcttatagttagcttattttcataaccttagagtttagcacaaaatgtagtagacatttcaatttatttgtttaattagttgacttttcttcgcagctgcacttaatggactttctgacaaagttttatttttgcttgataactgcaggttctgatgatctcatgagagtttgtggaaaatattaatcaaaaccagatataaactaaatatatgagttgtgggaaaaggctagctttctattgggcaaagttgcagatttttcaaaaggcactacaaaataaaccaagttatttattagctcagtaattctcaaactttattttttttaatcaggttttttgcagtcatgttttctttgtgtactccttttcaaaagttgttccagattcaggagaaattgagatggcagata

SEQ ID NO: 90345 - DNA, 1007 bp, Homo sapiens
tttagttgctctttccattgttatggtaaccttacaaggatttgtgggtccatggtaccgcaatctttttcggttccttctcctcttttcttacatcattcccataaggtaagtttaaaaatgaaaataaaacaaatgtctggtttcattgagtatgattttattgaatttatctttctcagtatgaaagaaattacccaaacaaagctagagaagtaggagccagaagttctgaggaatcttgaggaattcttctgtggaaatgttgttgggggagacgtcatcagtgccggtagaatgatctagaggtgccatactttcctgatagtgaatgtgttgatggtgtcttcttcaacaatcagaagatatttcctgatgaaacataaaccagaatttcacaaaattagttttgttttttgctgatagacttttaaatgtccagtgccctttgatctgtgtggaatcactggcattttaaagttctgtttaatatatctaatatctgtcaagttagataaaatattaaggctgtgttttagtagggactatcatttcagaatgttaacctatattataactacagattggaatataaatagttcatattagatgcctatttaatgtaaagactaatattttaccatataaacataaatccattttaaactattttctaaaatattttaagaaagatattcttaatatatatgatttaaaattttcataggaatgagcaactgaaacctaatgatggataaagtatgaatctagaatatctaccttttgtaacagagaatggactaaaacggtatagaatgcttaggctcaaggatgtagccactttgaagagaaagatatctctatttctaaaccagctttctccaaaatttgctctaaaaggtgatgtctcttccatttacttacgtcataaagtcagagctataatctgttcttgggatgtgtacacactgcactgccctcacaggcagtcaccaggaatgaatcca

SEQ ID NO: 90346 - DNA, 1049 bp, Homo sapiens
tgcccgtcacagtacagattcctgtggatgctgccttccatggtgttgctggttcacgggtggccaggcctgtgcagagagcacgcagcaaatagcaacttctcattgcggctgtgtaacttgctgctgacatagattttctgcactccataaagctgactgcagagatggctgttccagcctggcttgtggattaaacctaataaggcccagcttccccgctctcctctcccaccacactgcagctatccccatgtgccagctgcttcccaccctagctgtgtcctctgcttcagtgctcctctacctcatcattccatggctgggcttgtcttgtcactcggctcttaccctaaatacctttcctcagagaggctgcgtttgtctgctcagtacagaccaagaaacagccagccacttgctatcatagcagcctattgaattctgtgtagatctctatgacattcatcttgtttgttgcctgtttctctcttctcactaagccctgtgagaatagaggccttgtatgtcccgtttgttgttgtgtcctagttaggacctagaacggagcacgcttgggatgtggtagggcctctgtaagtatttgttgaatggacccattacaaaggccccatcctgctcagaggacccgagcgcagattgtcacagttcttgtgccggcatgtattgagtgccacaggtggactctggagacacaatctttgtcctcaaaataccccccgcccactggctaagtggcaataaacaaactataaccagaaagtaacctgccttttttatctgactgtcatgccagaatttacttcttcagatgtgatggtccttcaggtagttctcatttgttgttcagcctaagcactcactttgatcccaggcccttcacacattgcatcttctctccaccagcttcctccatttgatgccacccactccccaagagtctcctttgtctccatacacatgaatgagccctaatctccattgttgtattgtccagtgtcgtgtgagaagataggttagccatcaag

SEQ ID NO: 90347 - DNA, 1165 bp, Homo sapiens
ttgggattcttctcctgcaagttgcttccagagcctcatagcatgttgttttcgttaccacttgctttgtggattggtacatggtcattttataaatattccatgtgtgctttaaaaatatatatttttttacatgaagttattctataaatatccattagattgatctttaatttttaatatcatgtatgtgctttactgtcttttttttaaaaaactccttaactttttagttactgagagtgtgcaaatctgtcaccataataatgaatttgtctattttcccatgccattttgtgaattctagctagctatatatatatatatatatatatatatatacatacatagtgaggctatgttattagttgcctataggtttagaatagctcttattattctggtgaatgaaaatctcttataaacagcattagctaggtggtagtggtgttttcttaaatcccatgctaccatctttacacttactgtgattaatactttatttgcattaatttatgtcaccttgtttttgctgtttgttttacttctatatttatttttctttcttgcaatctttggagttttttaaattccattttttcttttaacttgaagtgataccctatatttctattattgtggtttccttagaaattttacatatttaatatataatatttagtaaagtttaaagttaagctttatctttactctcctctcaatcaatgctaagaccttaaaatattttaagtcagctcatcttccctctcccatccacttacatgctttatttagtcgacatttgctttcattttgctgtcctgtttggtttatactcagtgtttgcactagacctccgggccgcagccttcttggcattactgcagtagtcaaagggtgcttctagcgaatcatcctacatattcttgatcagtcttttttcaaaaaggataagggcttttagcagggtaaatttcatttacagaagaataaccttaatgattatgtttgaagtaagacttggaaaatacagtgcgtattattcacattcaatcctattgctttttatcttggccgggcgcaggggctcacgcctgtaatcctagtactttcggaggctgaggcaggtggatcacctgaggtcaggagtttgggactagcctgg

SEQ ID NO: 90348 - DNA, 1374 bp, Homo sapiens
acagggtgcacgcagggatgagaaccgttgatgtcaaaagcacaggacactgatttgggaaattaaagttcacattttattaaagccaagtttgttttccttttgcaaattttccgtaaaatatgaataatgatacattctagtatttgctaaatatgcttttggattgaataaagggtaagacttctaaaatatgttttggttttgcacagtatacaaatctgttgtcctaacactcttaaaaggcttttcaaatttaagaaagttaagctgttttataaaaattcctctgtatgaagtaaaatattttgagctacttgatacaatttaccttgtaaatttcagaggaaaatattatagtatttaacgttgacttttgtaattctaaaattcatatatgttccctaaatcctgtgcatctctcataagaaaaggaaaactgatgatcagaattctgtattcatttaaagttctctgaggtcagggacttgcagttacttccctctttattaactctttcgtccgtatgctttgaaatgctatataccattgtagttgataatgcaaaaactgtcttatcagtgctgggtcagagtgtttttactcccacatgaggcatatgtgggtgctagaggcagaatgttgtttgacaaagtgataaaggtgttccttctgagaacactgaagaacctcttgtaaatacagtggctttgttgaaagcactgaaggtgaagggtgtttgtgtggcttagggacagggtttcctctcatttaccaagggtctagcctccaacccagtgagcgtggggatgcttgcctgtgcgcttccagagcagacggaccagggaccccaagtgctctgtgcagtcagcacacccccagatggaagaccaaaagtgtcaggcagcacaggcacagcagtcattgctcctggatttaggagagaacttttctgaaggaaaacttttaagagctttatcaggttacttttcggttaggtaccctttctgtgacattttacaggtttttgctaatttaccaaacatctttagtaagacctcattttccaggtagaatgcttggtgaaaagagtgttttcaacttctttagacctagatttgatattcaggtattgatgatttggaaaatttggagcctatccagatcacataaaatgctaatattgggagattcactgtttggaaagcattcaccaagggtgtgtccaggtggcgttttgctctttgaagagatagattaggggcaggtgttagtccgttctcaccctgctgtgaagatactatactagactgggtaattgatgaacaaaggaggttgaattgactcacagttctgcatggctaaggaggcccc

SEQ ID NO: 90349 - DNA, 1180 bp, Homo sapiens
ggcccataaggggaggaagtaggaatgttaacacccattgtgtgtctgttcatttcagggtgtttgtgatgaatctaagatatctcataggaaatagaacacgtgtgcatctgaagcccggagagaggtctaaactaggcctcgacattttgggtcttgtctccaccatggatcacactggtgggactcacccagggagagtgtttgggcgccggccctgcctccctaatatcccatgaaaaatggaaagatttcacagagtgacaaatgctgggaaaaattcagatcacatggcctctgtgtcctttcagctttacgatctgtaggaaaagatgttaatttcttcggtaaaacttctgattaaatgacttctgtttcgttttgctcagattagaatccaaaaaataagtctgacagaggaacgcatgtgaattatttcaggtagtttcattccctgaggagaatctcgcgcgattctcagacaagttgtgggactgggttcacctggtagtgataaatgctgcaggtttaattataacaaattagagcttaaatgtagcaagcatcgtggtgcctaaataagattgcatggtatattttaggaaaacgcacttcaaatttttcagagtccaagttacctcctcagacacttttgtagctgtggagcagaaggaactttttggacaatagggaggtataattaagagatctgacattccgagatttacgaatgctttcttcctgtagcataaaacaggttcatgtatcttcctactcctaacattgctgaacacagtatttgtttaagataatttatttcatttttcatattgcataaaagtcatgactgccttttgtttcaggtaactgtctgaaatgacaggtacctttttccacttatctggaacaggtctcttggtaacaatttcacagttgctaaattagcaataaaatgagcttaaaatatagctggtattgattactttataatctatttctataattctcaaaatactaggtttaatatatattgagggggggtgacatattatgttacagtatagtactttacagctgagtagagatccaggttttaaaattctataaaattagaacattactaaaaattacacataatgcagcagtgatagctatactctgccaacttagtgtttgaaat

SEQ ID NO: 90350 - DNA, 1038 bp, Homo sapiens
catcctgcagtggctctacttatttttttcatcctgaagatgatctctcaccttttcatgagtagctactgctttatacaatcttccgagagcacttgtattcaacttaccatatttcagtggtaattattatattccatgaaataacttaatattccatgatacaacagctccgcgtaagtctaaccacggaaacggtttcatgagccataggcccctcgtgattgaggagcagcgcccagaagagccatcctggtcctttggcttccaccaccctgagcccagtggccaactgcaagctcttcagaaattcccagctaacagcagaaacccatttgcattatagtagctgaggcaggctgacactcttcaaaacagtatgacacaaatctgaaagaacacagcacatagatagaaagccatgttttccaaagtgcagatatccgagccaaagaatcagagccatgaatagcgtaataggaagtcaaatccccctttcaagcccttttcccctcttctgtacaggaaggcagtcatttcttggccaccttgccccttgcctgcctccttctttcttgagtattgctaacattttagctaagtggtccatgacttccactttctctttctgattcacagagaatctttctccaaagcccaaatcaaagaagagttaatgtaaatgtgttttcttttccttcttcaaacctcccactcaccctaaactcatgtggaacagccctgctatttagtaaccatttgcaggaatgtccttagcttttcctgagcctttcctgcctgtcaaacactcctctgaacatttggcaggcagcagttcacatagtcttcagcacagctgataaaggtttcgtctctagcccatttgttaggaggcactggaggcatacaggtgggtaacttgtaggcgtcagcatggccagccagcactcctcgccagggagctgcagccgtcctgcaccaagaggccaagtggctgctgtgtccggccttgagtgtcatcttgcaggggagctttga

SEQ ID NO: 90351 - DNA, 1039 bp, Homo sapiens
atacgggcacactcacaacagtctgtttttctgtcccatctggtgttacagactgtcttgaaggacagaataggagttacctatttttctgtcacctacaaatattatcttgggtgtaaacatgtttgttgacttaaatgtcagtaaatacatttattttaaagtctaaaatccaatattatgtattttcatataaaatgaaagataatgcatattaaaaaatacgtgtatatggaaccatgagcctgaatgtgtggcctgggtctggatcacattaaccactgcagtgggttttatctggcagtttgggtatgaacttggacatgggtctggatcacactaaccactgcagtgggttttatctggcagtttgggtgtgaacttggacatggctctggatcacactaaccactgcaatgggttttatttggcagtttgcgtgtgaacttggacatgggcaaagcggtgtatggatggatgatgatgaaagatgagaacatccctggcacggtcgttcggaccagcactatcccagaggaacttgggcgcctggtgtatttattgacagacaaaacaggtactgttcgtggtctgtgttcacctttgaatggacaaaatgacatttaataaaaaatagcatagcgtatagatatatgtttatgtgtatgtatatatgtgtatgtattggaacagatcattgaatccatatttagaatttttcagcctctactcttgaaactgtcacacagcttaatcatcttctagtatacacagtatcataagaattatcaaaatgttaagttcttagagctttaagtaacatatttctgtgtttttaattttctacagtcttacagttttttttttaaactacctttgtaacacctccctagtggcttattaagagcaagaattccatgtttgtttattatagaatgatacttgtgagctattagaagaaaataacagatatgttaatttggtatttaatactcaaattctcctaaaaagctttactacagactatttatcccactct

SEQ ID NO: 90352 - DNA, 1034 bp, Homo sapiens
ttttagctttgtacaacattatttaaagaaagctgaaagcagttgtgagtataccatttcattttgttctttaattgactctgcttttagaagtcatgaataaataggagttaaggacatagcaaattagtgccattgttgaagtgaatacagtaaaaataaattgtcagatttttaagtagtatagtgaatattttggtgtatttgacaacctggatatatcgaagtgcttcatagtactaggcttaaaaaaataactcattaatcagtgctttataggagataatcagaatcaaatcaggctacttatttctagctactttgcttgtaaaaatcatatatgttaataattccatgttaactagatagttctctttgctctatctttaattatgtgacgtttcatattctaaagatgcagtctcaagctggtggaaacaatactggttcaactccactaagaaaagcccaatcttcagctcccaaagttaggaaaagtgtcagtagtcgaatccatgaagccgtgaaagccatcgtgctgtgtcacaacgtgacccccgtgtatgagtctcgggccggcgttactgaggagactgagttcgcagaggctgaccaagacttcagtgatgagaatcgcacctaccaggcttccagcccggatgaggtcagtcaaagcacaaaaccgtgggagcttgtccgttccatttggactccagagtcatgaggattcattctttctgggatggggaatatagaggagcagtttatcgtagctttaatgtatgttttagctgtatgtggaaaactgcccaacctattccagcatgtagcctctgacgtagcctgggccttgcacatgcaaatgtgcggccgccacatctcggcacatcccagaacacccagggctggtcacagggaacagcatgagaaataccagcgaggtttactgattccgtaaagtaatttgtgtcaaagctgcattttataaaactgttgaagtttgggactgtccttatggctatggattccgtgtc

SEQ ID NO: 90353 - DNA, 1036 bp, Homo sapiens
aggtcatgagcaaccgctctgtaagaggaagcaagcccccatattcctatcaagaaggggtcgaacacattgttttttctgttatggcattctggaaattctcaaaaatgtcatgtgattatgtattgaaaaagaaggattttcctgccataaatatgagaaacctagactagagatttttcccaaagaaaactgtatttgaagttttaaaaatactgtattacatatttaccatattaccttattccacattttttattcaaagtatctgggattttttatttttaagttttaatataagtcataacactttttgaatcttaaattgggaattcacaatagagatttcattgactccaagattattaaaaatttagagaaactatagacattgctaaccttacagttaaatttttttacttgtctaaaatgtctttctacttgggaaattggacaatgataaaaaatagcagaacattaaataaccttttaaaaatccctaaaacgtattttaaatctgaaaatgaaaacaatagacttcatcataatttttaaagagctctattgatgcaatgtttgcaagtccctaaagcctcaggaaaatcatctaaatggttcattatttagcttattgaactttgctgcagttaggttgacggatgatagtagtgtttcccgatcaccaaagtaccgttttaaaagcattttttatcgaataaagtgcttagaatattgcaccctggagctttatttagggaaatggttcaattgatgttttctatttaacctcagctctgacctatcacaacatctatggttaataagcaacattatcatttgagagacttaactagtttcatccactgtgcacccataccatcctcttaaaaccctgtttgtggcgctgtgtcatctcggtctttaggaaggatgcagtttagtaagtagagtgccctagttttagtcgctgatacacagttgctgttcttcaggaaataagcagtctttgattttcatttttcctgaaggagaaaca

SEQ ID NO: 90354 - DNA, 1034 bp, Homo sapiens
atgggtctctaacaaatgtatttgtcactgagctagctgccgtcagtctccataactgtgtctgttgttggaagataaaccccagtcttgcttggacagcttgattctgaagttgggagttgaaatgacaggttgtctttactggatctgcatatggaccatctggttggctggccatgcagaactcccacccccctccagccctcgttgcttgtagaaccctatcccacttcctcgggatgctgtgggttttacactgggagggagcttacatactaggaaactccgggatgctgtgggttttacgttgggagggagcttacatactaggaaaccttgggatgctgtgggttttatactgggagggagcttacacactaggaaacctccggatgctgtgggttttatgcggggagggagcttacatactttaggaaagtgtgtatattttaatctctcaaacatctttaggaagataatagactcaaacttatcaatcctttacaattttcttttaatttctacatctactgtccctagatgtaagttatttctaagagccttctaaaaagaacaccatgactatatttcagatataccaagagaattcgctaggctgctttcacctagtcaaatccccacacttacgtgctgcagagctgcagagcatgaattaagatatgaaagctcaaaaccaaaaccggagaatctgccgtgtccgtgggaaccagccgttcctttgatgtatcttcaataaggaggaccaggtctgcgtgaagtattgagtacttaggtatgaattcaggagcaaagatgctaaaagtactgcatgtcctcactgaaattatttttcttgtagttatttcatctagcaattttttttttttttttgaggcagagtctcgctctattgcccaggctggagtgcggtggcacgatctcagctcactgcaacctctgcctcccgggttcaagcgattctcctgcctcagccccccaaatagctgggattacaggcatgtgcccaccactcc

SEQ ID NO: 90355 - DNA, 1032 bp, Homo sapiens
cacaccatttagttgtggttggatgtgtgtagcgtgacctgttgaagcctgcgttgccaacacaccatttagttgtggttggatgtgtgtagcgtgaccttgttgaagcctgcgttgccgacacaccatttagttgtggttggatgtgtgtagcgtgacctgttgaagcctgcgttgccgacacaccatttagttgtggttggatgtgtgtagcgtgaccttgttgaagtttgcgttgccgattcttgtgcagccatcaccaccaccccttccagaactgttccatcctcctaaacggaaactgtccatctccccattccccttcccctaaaccctggcacccaccatctagttctttctctgtggattggatggctctagggacctcatggaaatgggatcatacagtatttgtccttttgtgactggcttctttcactcagcgtaatgtcctcaaggttgaaccacaatgcagcctgtatcagaatttccatcctttttaaggctgaataatactccattgtatgtatggaacacattttgctcattcatttatctattgacgggcacctgggttgcttccaccttttggctgttgtgaattatgtgagacatcagaaatgaacgtgtccttgtcttgttgaaattcaccagtttaaattgttccctagatatggatgctaacaggcgataaactcgagacagctacctgcattgccaaaagttcacatctcgtgtctagaacacaagatattcatattttcagacaggtaagtatgtatcttaatcactttgaatttttaaacatttgtctcacacaaacgaagcctattgtttttgtcagaatatatatttattaatcactaaatatctttttaaaaagaactactgtaatttttttaatttataacagcacaccagcatggcacatgtatacgtatgtaactaacctgcacaatgtgcacatgtaccctaaaactttaagtataataataaaaaataaataaataattaattaattaaaaagcatgt

SEQ ID NO: 90356 - DNA, 1032 bp, Homo sapiens
gggacactgttgtcgaccataaggcaaaataacacaggctttgttttccaggtttgtctaaagtactacgagcatgaatttgtggagctggcctgccagtgccctgccgtggtttgctgccgctgctcacccacccagaaggcccgcattgtgacactgctgcagcagcacacagggagacgcacctgcgccatcggtgagagccgcccaccctgctcacagggaggtctccagagaaacccgtaggctgacattgatgggcaaagtttgttccatctctaaaactagattgatttcatctccattcatggaagtttctgaaatagcttctgatggtaaaaatgaaaaacgtgatgatggataaggttttatttcatctcacttttcttgcttcgcaggtgatggaggaaatgatgtcagcatgattcaggcagcagactgtgggattgggattgagggaaaggtaggttcgcccttttatcaacacattagcacacagtcagcacacatcaacacgactcagcacatgctgggccactgtacactcagcacctacttggtcagtgcacgtcagcatgtgcttagcgtacgctcggtcagcaaacactcagcacatgcttggtcaacacacatcagcacgtgctcagcgcacagtcagcacacactcggtacacgctcggtcggcgcacgtcagcacatgctcagcgcacagcacacactcggcacacggtcatcacacgtcagcttgtgcccagcgcacagtcagcacacactcagcacacggtcagcgcacatcagcacgtgctcagcgcacagtcagcacacagcacacactcggtcagcgcacgtcagcatgtgctcagcgcacagtcagcacacacggcacatacgtgcttagtgcacatcagcacatgctcagcacacacttggcacactcgtttagcacactacacatgctcagcacacggtcagtgcacgtcagcacatgctcagcacacttggtacacttgtttagcactactatgcttggca

SEQ ID NO: 90357 - DNA, 1003 bp, Homo sapiens
ttttgttgtcttttttgtagagatgaggttttcctatgttggccaggatggtctcgaactcctgacttcaagtgatccgtctgccttggcctcccaaaagtgctgggattataggcatgagccactgcgcccggcctgcaatctataatgctttggttttgttttttccattaaaagaagaatgaattatgcccggtatgcaggtcaaacaattctgcagtcaagaaaacctgagatttggagctgggcccctgtaaatgcacagtgatgtttccgtggcaagcttagaccgtctggtggcctggccaggtctgtggctgtggccatgagggcccaggacttcttggtcagctcttacctttttctctgtttcctgccaacagatgttgcctttatcaccaccgtgaccttcctgtggaaagtgtcggcgatcaccgtggtcagctgcctcccgctgtatgtcctcaagtacctgaggcgcaagctctctcctcccagctactgcaagctggcctcctaaggggctgtgcacccccagcgggctggccccagcaccttctgcccttcccagcaccttgtgcccttgccagtgaacgcagggtttgccattgctaccaagcaagcaccacaagaaagggagggtacgccaggcgagcccagggcacagatgctgagacagcctctccttctcagtgcagggacgtcacccctgccaggcaagcccagggcacagatgccaggatggcttctccctctcagtgcgaggcttcacccctgccaggcaagcccagggcatagatgctgagacagcctctccctctcagtgcagggacgtcacccctgccaggcaagcccagggcacagaggccgggacggcctctccctctcagtgtgaggcttcacccatgctaggcaagcccagggcacagatgccgggatggcccctccctctcagtgcgggaacgtcacccctgccaggcaagcccagggcacagatgctgcg

SEQ ID NO: 90358 - DNA, 1098 bp, Homo sapiens
ggaactacagcgtcgccgcctgggttgtgtcgccgcggtaggcgctgcgctctgagcgcagcgcaggccccgtaccgaccgcccgcccgccctctgtccgcgatggaggtgccggccgcgggtcgcgttcctgccgagggcgccccgacggcggctgtggccgaggtgcgctgcccggggcccgcgccgctgcgcctgctggagtggagggtggcggcgggcgcggccgtgcgcatcggctcggtgctggccgtgttcgaggccgccgcctccgcgcagtcctccggggcctctcagtcccgtgtagcctccgggggctgcgtgcgccccgcgcggccggaacgcaggctgaggtcggagcgcgcgggcgtggtgcgggagctgtgcgcgcagccgggccaggtggtcgccccagggtgagtgtgctgagccgggcggggccgagggcgggcggctccggggagggatcctggaggacccccgggctgctgcgtccgcggtgggcaggggcgcccctggtgagggagcgataaagcgggacgcaggcactgcgcttctcccctaaaactggatagtcaccacctgtggttttaccaacggggagcattttgagataaaaggaaagggtcctgcgtagcgacacgaagttactgtttggaaaagctatgtttgtttctttctttctgcagtgatagtccccgccccttcctttagctccacctttgtgacttaggaaaactcatgggtggctgtgagcacaagagtcatcaggcaggctccagacctgttattgaaatataaactgttgggtgtgtgcacatctttaaatttttgtaaactttgtgaaacgcagttgtaaaacctggtgcagttctgtttcgtggctaaggaacgggcggaacccaggcctgcagcgaaggcagtagccccgtggttgaccacagtgggcattgtcgcaggctgcttcagggtgacgtgggcgttgtgacagactccacagctctcagtagctgtgctctgaccccagaaggggatatgtttccgtagcaccgaagtgtccagccatgtttgaatctacccttgtgttctgggatgggc

SEQ ID NO: 90359 - DNA, 1017 bp, Homo sapiens
cctgttttctcctgactgaagacgcagatcgctgagtgcctggagcagcccctccctctgggccgctgagcgccccatgctgggggctgctttacctctaatgccaagtgggaggtgcggcagctactttttctgcgttttcatggttgagggcctgtttctgcttctgtgtgactttgcagtttgttttcatgaaggactatggctctgtgtgttcatgagtgtggccacgagctcagtgtttccaccagttttcctgtctgtggagaatgtttccacgtttgccgacagaatcaagtctgtgctaagatagcagcgtgtgtccgttaaaacatcagctagaatcctgtcacttagagcccagtgtgcatctgtgcgcagagactcagctgaaagccctgaacctgtccttgcacttgcaggttgcagagtaagaacgggaagcagcaggtgccgctgtccacggcgaccgtgtccatggtgcacagcgtgccggagttgatggtgagctccgaggtgagccgggcatcagtggcggcgtgttggggaagcgtggtgctctgaggagggcggctgcaggaggagggtggctgcagaagcacggacgtgtggttgtcatcgtcgttactgaaacaacccctcatcacacggatgacttatgggactgcggccttcctgaagcagggacggttgcccttggttctccacagacaagtctgcctgcaaaagcgactcagggccccgaggctgtgtgacctgcgtgtcgggaacaccaggtgctgccgccgcagctgtgaacagccaggctcagcctgggttcccttgagccaagtcctaactggggagggatgtgacagctgctcatggagctcaggaggtggccgcgctgccgaggcatgtgctggatgacccgggagggcaaagcgcatattggggcagataatggcgaggagtcggtggccgggggtaggggcggggggacgtggttggtagcaccttgttggctacaggagcggc

SEQ ID NO: 90360 - DNA, 1131 bp, Homo sapiens
gccccgcgtggagggacaccccgatgcgctgttgccaggcccccgggtctcttcgaggcacaagaataggctgagcgtggaaggttctgagcgcgggagattctgagcgcattgcccttaccagtctctgctgcccagcttgggccacccagcgtctcccagccggccgacttggtttcttcattaattttgcagttcacttttattgagcactccatactgttgaatccagcttttatagaaacaaccagtttcccttccccctccgttttcattggctcatgtatttaactgaattataaaattgtggtcacaagcgaggttgccgtgaccaggttggtgacccagccctgcctctcggcctgtacggcgcagtccatggagcgtggggggctggaggggaacacattgatatagttttgtgtttctcgatgaaatggagttttaccttggatgcaaacatactgactttgtcatttcttgtttctttttaattgtagcaagctgaacagctgggaagagaagaccagcagcgactgcaccgaaaccggaagctggtgctcatggtggacttggaccagacgttgattcacacaaccgagcagcactgtcagcagatgtcgaataaagtgagtgcagtcagcatctacggacagtttcccaggaaccgcgggtcctagaattttgattcagaagtgtgttctcttgttttttagatgatttcccgtaggtcagcctgggtttggaaagcagacttgctagttctgggcgtgggccgtgtgtctgctgggctgttggggagcatccgcggctcccgggcagacatcccgacgcccactgtgtctcacgcttccttccgtgtgtgtgggaaccctttgtgtgcctgcccggcacgatgtcggagaaggcagaaacgtcccgagcctgtgaggatggtgtggtggatggtgcgaggcgtgtcctgagaggggcagtcttggtggggaggacgttggtgttggatgcctttatgttgctaggatgtcaagggcaggtggacgcctgggtttgtgcttgggagaactgggctggaggaaaagcctgggtgggaggtgaccagcgtacattctccaggggaaacacggggaaatg

SEQ ID NO: 90361 - DNA, 1061 bp, Homo sapiens
tgaacggcagcgaggccgccaccccgcgggactcaccccgccccgggaagccagacgagagggacatctggccccctgcccaggcccccaccagcagccaagagctggcaggcgctcctgagccccagggatcctgtgcgcagggtggccgggtggcaccgggacagcggcctgcccagggtgccacgggcactgacctggactttgacttatccagcgacagcgagagcagcagtgagtccgagggcacgaagtcctcctcctccgcctctgatggcgaaagcgaggggaaaagaggccggcagaagccgaaggctgccccagagggagccggggcgctggcacagggcagttccctggagccggggcggcctgcagcaccgagtctccccggagaggccgagcctggcgcgcatgccccggacaaggagcctgagctgggtgggcaggaggagggcgagcgggatggcctctgcggcctgggcaacggctgtgccgacaggaaggaggcggagaccgagtcacagaacagcgagctgtcgggggtcactgcgggtgagtccctggaccagagcatggaggaggaggaggaggaggacacggatgaggatgaccacctcatctacctggaggagatcctggtccgtgtacacactgactactatgccaagtatgaccgctacctcaacaaggagatcgaggaggcgccggacatccgcaagatcgtgccggagctcaagagcaaggtgctggcagacgtggccataattttcagtgggctacacccgacaaacttcccgatagagaagacgcgggagcattaccacgccacggcgctgggagcgaagatcctcactcggctggtgctgagccccgacgcccctgacagggccacgcacctgatcgccgcgcgagctggtgagtgctgcctccctgtgccctgggcatggtcaggcccgcgggctccttgcaggcactccttagagttggcattgctgtttatctcactttcaattttcagaaacatttcccagaatcaccatcttttaagaatagatcat

SEQ ID NO: 90362 - DNA, 1033 bp, Homo sapiens
cctgagccctggtgggctgcagccgagtgagggccctgagccctggtggggtacagctgggtgaaggccctgagtcctggtgggtactgccaggtgagggccctgggccctggtggggtgtagccgggtgggggccctggtggggtgcagccgagtgagggccctgagccctggtggggtacagctgggtgaaggccctgagtcctggagaggtgcagccgagtgagggccttggtggggtgcagccgggtgagggccctggtggggtacagctgggtgagggccctgagccctgcaggggtgcagtcaggtgaaggccctggtgggatgcagccgagtgagggccctgagccctggtggggtacagccaggtgagggccctggtgggtgcagccggatgtgggccctgagcctccagtgctggccggaacagcctgacgcagccgggtctcctgcaggcacagagaaggtgctgcaggcacaggagtgcggacacctgcacgtggtcaaccctgactggctgtggagctgcctggagcgctgggacaaggtggaggagcagctcttcccgctcagggacgatcacaccaaggcacagaggtgggtcctcgctgcacccagcaggtccgtgccaggcgttcccttgctggacagctgttggttcatgcacctgggcagtgcccctcatcacccggacgccccgctcatggccctcgttctcttcctccgacagggagaacagccctgcggcctttcccgaccgggagggtgtgccccccaccgccttgttccacccgatgccggttcttcccaaggcccagcctggccccgaggttcggatctacgactccaacacggggaagctcatcaggacgggcgcccgggggcccccagcaccctccagctccctacccatccgccaggagccctcttccttcaggtacgtggcggcccagccactgtccccagctaatgagggctcttcaagcttgctgctccagtctgttggggggatggcgtcagttgcccgaag

SEQ ID NO: 90363 - DNA, 1023 bp, Homo sapiens
acatcttagcgagcgtccctgtggcacggccacgtctccacccccaggtggctgctctcccagattccaggatgggaaggactgggacgcctccctgaaagccctgccactcaggagtcttgctgtgaatctcattgatcttgaaaatttcaagcaaatattctgattattcaccataaaatccaacagtgcaccaggaataaagtccctgttcacataagggacagaaggaatttaaacccaatctttgcctgcgaaccgactgggtttgctctgtggatttccaagcgtcttttgcccggggctttgttaaggattggttgagtttcaagccccagggctcaggtagaaagcagagtgctacctccagcccccaccctgctgcactcagagccctggactctgccgggagaagcctgttgcggaggaacggggcccgggaaggaggtctgtcgctgactcttggctgtttgtcaggtggacgacatccttggagaaggcagcgacgacagcgacagcgagaagaggaggcctgaggagcaggaggaggagccccagccccggaagccagggacccgcagggagcggacgctcggggcacctgcgtccagcgagaggagcgcggcagggggccgggggcccaggtgagtgcggggtctgaggtgggaggggcctgacacgggctcccggaggtgactctgcagttggtgggccgcctacctgcatctcattcttcacgccctccaccattctgtgtgtgacaccagcagcttccaaactcagcagcccctggtgatggccacttggttgtctccatgctgatccatgtcatcttacatgtgtgcaggcgtgtgaggtgtgtgcaggtgtggggggggatctgtacatctgcgcaggcgtgtgtggggtgtctacacgtgcacaggcgtgtggtgggggtatgcacgtgtgcgcaggcatgtgtgaggtgtctacaggcgtgtgtgaggtatctacacgtgcgcacaggcgtgtgtgggttct

SEQ ID NO: 90364 - DNA, 1050 bp, Homo sapiens
aaaactggaagtccctggtctttaaggaagaagtgaggtccccaaagtccaagagtcacaaaaacccagctggacaggaagctgaaaagaccccaccgccccacccttttgaggggcacacacggcccccagcagtcaggctgctatcgcggccacacgtccacagcgatccgcaaacggcaggcgtggtgcaggcagggagcaagcgccgagtcccacccgtcccggccgtgggtatgagagtcccacccgtcccggccgtgggtatgagagtcccacccgtcccggccgtgggtatgagagtcccacccgtcccggccgtgggtatgagagtcccacccgtcccggccgtgggtatgagagtcccacccgtcccggccgtgggtatgagagtcccacccgtcccggccgtgggtatgagagtcccacccgtcccggccgtgggtatgagagtcccacccgtcccggccgtgggtatgagagtcccacccgtcccggccgtgggtatgagagtcccacccgtcccggccgtgggtatgagagtcccacccgtcccggccgtgggtatgagagtcccacccgtcccggccgtgggtatgagagtcccacccgtcccggccgtgggtatgagagtcccacccgtcctggcggcgggtatgaaggctgcgcagcagaacctgaacagactcccaggacactttattctcctgatctcaaattctgaaatcacccaagcccaccgagtctgtaagacatagagtgaaacggcaattacagtactgatctggtccttgcccgaggagccagaatggagaggcagaaccccaaccacctcctgcagctgggagggcagcatggaagccgcgccagagccgaggggttttctaatcatgctcgtgtggtttcaccagggagggtcagttccgtgcttgcgtggttctctaatcgtgcttgcgtggtttcacccgtgagggtcagttctgccgtgcgcaggtcatttagcaaaaaaaaaaaaaccacaaaaacccaggggtgctaactccagtcctg

SEQ ID NO: 90365 - DNA, 1059 bp, Homo sapiens
aggcggagctcaacgacctcatgtgagcgcgggcagcgggcagggactgaagcctgaccgacctccagcagcactcggacgtccccggaccagccctcagtctcggtccacgctgctttcttcccaaaggacatgtatatttgcagagctccacatacagaaacacattattttgcagaaataggtgtttttaagaagttttactacaggaatgtctacttttgtaagtgacaggtgttaaaggcccaggtgtgctgtgccaaagagctcagcagaggctcacgtggcccaggctggtgcgcccgctgtctcggtaaggggcgggttggtgtgttttccccttgtgtaccagagcacattccttaggggacggctttgggggtcccacgagacatggactaggagtttaagcaggacagtgtgcgtgcacgagctccgagcccagcacagacatgcctggaacccccgccgcctgctgctccctcctagggaacccatttccggggaacgccgtgactgtcgggcagcctggagcttcctgcagcctcctacgcagggtccacgccacgtggcctgggctgccatcctgccgtcctcccactggcatcctggcaagggggcgttgcttttcctgggcggccttttatgtcttggagacacctgatgtaaagtttctgtaaatctatttcatatctgacccaccaaacagatttctctttaataaaaatcctttttgtaagttctcttctcgtgggtgtgtggcagcggtgagcacccgcctcctccctcgctgggatccagctccttagctgtgaaacagaaacgaaaaaattcccacggacaggaccgtgtggaacggcagaaatggaaaccgcagaactgcgagcgtgatgatctcagggtttcgcctctgagcataagaaccaggcttgtagctggtattttaaaacggttaagtgtgaagaattactctcttgcattattttcatccttcccttttgtttgtttgggatgcgggggcccgagagctacaggtaggtgctgggctatggccgccgc

SEQ ID NO: 90366 - DNA, 1049 bp, Homo sapiens
ttaggttaaggcagttcccttttattcgagtttgttgggtgtttttataataaaagagtttgccaaatgcttttcgtgtctgttgagatgatcatgtgggttttattttttattctactatgatgatgtactacattgattgatttttgtgtgttgaaccaaccttgcattcttgggataaatccatgtggtcatggtgtctaacactttttatctgttgctggattttatttgctagtattgtattggggattttttgtatctgtattcgtaagacatgatggtctgtagttttcttgtgatgactttgtctagatttagtattaggataatactggccttatagaataagttgggaaatgttcccctccttttctatctttttagagtttgcaaagggttgacactaatttctctttaaatatttttagagttatccagtgaagccatctgggcttgggcttttctttgtgggaagttttaaaattacgaattcaatctcttgttataagtctattcagattttttgtttctttgtaagtcagttttggtagtttgtattggaatttttccatttcacccaagttatctaatttgttgacatataatttttcttagtattcccttataatcctttgtatttctggaaagtcattagtaatggttcctcttttattcctgactttagtaatttgatcccctcctttcctttctttttttggtcagtctagctaaaaatttgtcaattttttgttctggtcaaataaccaactttttaaaaggtgtttctttttcttttctttctttctttctttctttttttaacacaacacatccacattgcctatcagagaaccaatttttggttttgttcattttctttattgtttttctattctgtgttttatttcactccaatattctttcattccttatgcttgctttggttttaatttactctttttcttaaggtggaggttagaacattgattttttttctttcttcctttttaatgtagttattgacagccataatttctctctaagca

SEQ ID NO: 90367 - DNA, 1048 bp, Homo sapiens
tctcggactccgggcctcaagtgatcctcctgcctcagcctcccatagagttgggattacaggcatgagccactgcgcctgccctcctttgaccttttaatttccccttagaataactgtcctaaataaatacagaaaaatgcaggaaagagcatggtggacaatgcattgcatctttaaaaacacatttagctgcttcctgtattctcctgcatcatggcatacactctcgattttatgcgttcttcagtgatgttaacaagagcttgtcacagtgggaaaaatacggcattgttttcaaggaattcttttttaaagagacttctatgagaatggatgcccttgtttctcgttgcaggaacaagcacatcatgattgacttggggactggcaacaacaacaagattaactgggccatggaggacaagcaggagatggtggacatcatcgagacggtgtaccgcggggcccgcaaaggccgcggcctggtggtgtcccccaaggactactccaccaagtaccgctactgaggcgccctcagtctgcgcggataaatgtcgtggagccctttttgtatggaaacgttttaagctatttaaagcctttggaaaatacaggaagctccagggctggagcacctctgagatggaattgataacatggtcttaactcaccgaaataaacaagcacgtggtgagaggagcaggcctacttgtttgttctcaggaaacttaatgaatagattactgattttcctagtcaaagttaattcttacccttggagtaaaacgaaggtgtttatcctgtgagcctgtgcgttttgcatactgggttggtttgctggggctgcggtgacagcatatgccgcgagctgggctttaacagagatgtgtgctctcacagctttgcaggcgggggtctgagatcagggtgtcgcgggtggggggtcactgctgaggccgtgaggggaatctgctcaggcctgtccctggcttctgggggctgctggtggtattttcagttccttggtgtgtggatacttcgcccc

SEQ ID NO: 90368 - DNA, 1157 bp, Homo sapiens
tgtctctacaaaaaatacaaaaattagccaggtgtgatggtacgtgcctgtagtcccggctgcttgggaggcggagatgggaggatcgcttgagcccaggaggcagaggttgcagtgagccaagatcttgccactgcactccagcctgggcagcagaaccagatcctgtctctggaaaaaagatagcagcagtcacccctaggtgttgggattggaggtgatcttattttctttttatttttctgacttttctaaatctctgataaacttgcaattaaagaaaaaataacagaaaatgtgttatatgcagtattattggaggtactattaatatttgcaagtgttcagacctaattgcggggaaatgatggcaggattctacaggtatattttagagcagttgtgagatgcatgtaactatttgtaaaggttcatacagatgattactagatcagcataaataatatgtctgtggacgttttctgcaggactttgataacttgttacctgagtgaaatttaattcctgggcgattctgggagatggtaaagtgaggcggaaggagccagcggccaattcctgaactattctgggaaacggtggcgtgaggcggaaggagccggtggccaaggtcccagtagtgtcacatgatcttcccgcgtgtttgctgcactgggaaaaaatgttgaagaattagtttgaaaattgccccgttggccaggagtgatggctcactcctataatcccagcactttgggaggctgaggtgggaggatagcttgagcctgggaggtcgaggctgcagtgagctgattgcaccattgcactctaggatgacagagtgagaccctgtctcaaaaaaacaaaacaaaaattgccctgatccacacaaattcttggttttgtttttataaatgtgcttctataaaatgaaagccaaagtgttctgttatttcagtttttttttttaatctccttttaggttaaaaattttgcagttatttatcttgtggatattacagaagtgcctgacttcaacaaaatgtatgagttatacgatccatgtactgtcatgtttttcttcaggtacgttatcttaaagttgttactgaaattgaatattgtcagtttggaagcttaatgtaatcaagatctct

SEQ ID NO: 90369 - DNA, 1032 bp, Homo sapiens
cgtctgttcctattgttccacttcaacaattgctggtattttgctggtcttgtgttacctaacccctcatttttttaggctgtgtgtttcatggaaatcccagatataattatttcacctgtaagttacagtcaggttgtaaagatttagttttatatgaagaaatgttgtgcatatcccattgatttcccgtgactgctgtgagaggatgctgcaagctgaggggcttaaaacaacagaaacttctctcacaattctggataccagaagtccagaatcgaggtgttttccaggctgggctctctctgaaacctgccaaggagagtcctcatgcttctcccagcttctggtgctgccagcagcctcttggagctcctaggcttgtagacgcctctgcagtcctcgatgcccccagagcctcctgtccctgtgtctttatgtggccattttcctctaaggacaccagtcacaccagattaggggcccacctactccagtatgacctcatcttaccttaactgattacgcctgcagtaccgtttccaaataagctgcgctgtcactttgggggtttaggacttcaactgttttggggacacagtttaactcataacacatgtaagtggctacaagcttctaaagggcattgagttagtatttataaagagcctttaaaatgtcatatcctttgttccagaattttaggaatttgtctttaggaaataatgaagtatgtatacaaatttaagggggaaaatgttcacagatgaataatattaatgaacaatcagagagtaacagaagaatggtgtaggaggctcttctcgcattgctataaagaaatacatgagaccgggtaacttatgagaaaagaagtttaattggctcacagttctgcaggctgtacaggaagtgtggtactggcatttgcttctggggaggcctcaggaccttccaatcatggcagaaggcaaaggggaacaggcacgtcgcacggtgaaagctggggcggagtgtcacacacttggaaca

SEQ ID NO: 90370 - DNA, 1076 bp, Homo sapiens
ggacacacacttaaggacagttgaaatgggctcactttggggtattttttttggtcttttaaaatagtctgatttttgtttttgtccaaaaatttggatagctttattaataaacttttaatgcgaatattataatatagttattaaaagggcaaacctaggccaggcgcggtagttcatgtctgtaatcccagcactttgggaggccagcgtaggcgatcacttgagcccagggattcgagaccagcctggacaatatggtgaaaccccttctctactaaaagtacaaatgccgggcgtggtggcacgtgcctgtagtcccagctacttgggaggctgaggtgggagaatcacctgagcccgggaagtcaagactgcagtgagccatgattacaccactgaactccagcctgggcaacaggagtgagactctgtctccaaaaaaaaaaaaagtgcacacctgaaatgcattaaaagaatattcatgttttattttcttcttagtctatgggcaaatatgacttcctaattctggaagcccttttttggagaagctcaacagaaatttttgaaatataaggttttagtataaagaacaatataactatttaaaaatttccctgtgcagaaatggcagataatggggactcttccttaccttgttccgagttctgtctggatattccagctgttttaaagtgagtaacagttgcaaatgttcaggctggacttgatatgatttttcctagatgtgttgtattgatttgctgcttccacagggcccacttgacttcatgctggattagagttgagctgtaaacttcaggaataaagtcagtttggaaacagagctatgcttaaaagatttcacagatgcctagagtttgctaataaatgtggggcaattcatttgataaagtgataataataaataaagttttcatctgggcactgtgtctcacgcctgtggtcccagcattttgggaggccgaggtgggtggttcccttgagcccaggagttcgagaacagcccgggcaacatggtgaaaccttgtctgtacaaaaaatgcaaacat

SEQ ID NO: 90371 - DNA, 1921 bp, Homo sapiens
aaacaagcaccagaaaggaagaaaacgagccgcagtgccgggcattccgggcctttctggacgtccccatccgtggctggaggacagcccgggcggcggcgggcggcctcggggcgggagcgtgggggcagggcacggcgagcccggggcttctcaggaccaccaggccgcctggacgctggggaggaacccccactccgacagctgctatgacggaaccaacggcgctccacggtgcccaggtcgccgccgctccacccggccaactacacgttcgcgcggcgcctatacgcacatgccgtcagcacgcacggcgctagcgcgcgcgcatgccgtcagcacgcacggcgtcggtgcgtgcgcgcccagacgttctgccgggtggcagtcccagcggagtttgcgtgtgcgggcgggaccggatttcgtccgtgggcccgggggcggcgggggccggggagtgaggggccggctgagcccacctcgctgggccctccctggcgccccgccttgggcggcggcgagcgcgcgggccgccatgtcgtacatgctcccgcacctgcacaacggctggcaggtggaccaggccatcctctcggaggaggaccgcgtggtcgtcatccgcttcggccacgactgggatcctacgtgcatgaagatggacgaggtcctgtacagcatcgccgagaaggtagcgcgccggactctcccgctctgcgggctgtgcttccgcatctgccccgcgcctctgccctgccggcgtcgcctgggggcgcgagctgttccccgaggaggggccgcggctccgtcgttcaggcgattcctcccctcgctgcggtcgagcgctctcggggactgtgccggcgtttcacgcctttttctgcggggagctcttgtagtttttcatattttaaagggtttatgatccccctcctctcaaatgaattaattatttctgttgataaggcgtttttcccaaacttatagttcagtgaacaaaatgcacttgcaggttttattgagagcgcggatccttaatttaaaaggacgtctttttttggtacctgagttattcgttgtatgcataaagcaggactttcatgttcatagcatgagaaatcctgcttttctgtgggtgtgtttttttatcccaccacgctttttgtgagtcatgtggtttacagcttacagtgattgaggtgcagtaaacatcaggagaaaatagaaatatgctttgttagaattagttctctgaatttctaatattagtacactgagtggtcttggcatttacttgctgacaataaaagttgtaggacactattttataaccagatttcattctttttctgtggttcctcatagcaattttaggatgacttttattgaggttttgcagctgtagcaatagggcaaagggcacaaatactagggtgttaataaaatatttgccatattaattttccataagtaatttgagaggttattccttttaatgaagagtaaaagtaacattgaagctatcttttctttcacagatgctaaaaagtaggcctgggttaaaataactcctttgagtaaagagtaacagatgtaaggacatattttatattcaggaaaggaaagactatctggcctgccatttattaatttttgctatttcttatttagtaggagaggcatgaagttaggaactgttgttatattttagttattacaagactcccttggagtgcttactagaatgcatctgtgattctgattctatgggtatggggtgaagtccagcaatggctttttaaagaagcccctcagggaattctgatgcgacttgaccttgaaccaccttccatgggggtcagggatggaggtggagtagctttagtaccagccatctcgcagcctcttcctcctggacact

SEQ ID NO: 90372 - DNA, 1204 bp, Homo sapiens
gtcccatcttggggtgatgggagacagtgacagatcatcaggcattagattctcataaggagtgtgcaacctagatcctcgcaggcacagttcacgatagggttcgtgctcctctgagaacctactgcaccacagatatgacaggaggcagagctcaggcagtatcaccagcgaaggggagtggctgtaaatacagaggaagcttcgctcactctcccactgctcaccttctgctgtgcagcccagttcctaacaggccatggacgggtagcagtcctcggttaggaacccctgctctagagcattccatcagaaaaggagggaggcagccgctgctcgacaaagcagaggaggagtgcagtgctctgggaccctgtgctctgggaccctgtgctctgggaccctgtgctctgggattctgtgctctgggaccctgtgctctgggaccctgtgctctgggattctgtgctctgggaccctgtgctctgggaccctgtgctctgggaccctgtgctctgggattctgtgctctgggaccctgtgctctgggattctgtgctctgggaccctgtgctctgggattctgtgctctgggaccctgtgctctgggattctgtgctctgggaccctgtgctctgggaccctgtgctctgggattctgtgctctgggaccctgtgctctgggaccctgtgctctgggactctgtgctctgggaccctgtgctctgggactctatgctctgggactctgtgctctgggaccctgtgctctgggactcactgctctgggactctgtgctctgggaccctgtgctctgggaccctgtgctctgggactcactgctctgggactctgtgctctgggaccctgtgctctgggactctggaatcacacacagcagagtggacccagaactgaggacacagcacagcacacaggcccgactcacaatggcctgactcacaacgggtcaactgtactagagtgtgaaagccatctgcattcagtaatgcccctctcacaagggggtcctgtcagcgtagaggccattgccatcgtaagtggagcagcatctgtgtagttcaaagacgtttccactcaggaatgctaaccaaaagccatggtaggctgcagtgtgttactgggagatactcatgacaatgtccttgtttacacagagtctacatcacaaaacgcctaatt

SEQ ID NO: 90373 - DNA, 1096 bp, Homo sapiens
ccgcgtctccgctgctgcctctcgcagggctgccgcgtcttccgccgagcgcagccgcgtcccgtggggccgcctgcgcccgcccgcgcctccgccccgcgcggcgggacccccgcctcagcgcgcgcccacccccagcgcgactggtcccctcctcccgcgcagccagaaagagaaaatggcgctcgattggcctcaggaagtgacgttggccctcatttgcatgtaggcgcagccagccaatgagagcagagtgtgcttgggggcccctggcacttcccacaggccccccggggcccctgcctaaagctggactggaggctctggggtggcagtggggggcccctgttggaccccctgactcccttctgtcccagggaactgccctgccagctcctttccacatctgtgcaaactctcgtgagagtttgagtgggcaatgacgtcactaaaggggtggggagagtgtgtcatcaaccatgtgactaatcacgtggactcaccacagctttgacttcatttgcatggaatggggtggagctagtggcagctccaggagtggtgaccccgcccacatctcagagccaatgggagcccaactgtgataatgctgccttgccattggaagacaaaactttggctcccagaactgggacaagtgtgccatgattggcatatcctggtgaaccgactagctggggtctcctgacttcatcattcctgtgggaaagtgatcacaccttctcttgagaattctgatttttagatctactacaagttgtgtggggagagggttaattgcatacatttgtataaactcttaacctaaaagttcatttttgcacaggtgtttatcaattgtgtagcaataataatttattccacaaaattagtggaaacatggcgtagggctttcaaaatggctctaggtcttcgttccgtggagtccccaggcctctggcggacgccctcgtgccccagagcacgtgggagtaaccacgagggcagcgcaggcgcctcccccagtgcccctaaccttaaccctaattctgaccctgcacctgaacctcacctagcactaaccctgactctgacc

SEQ ID NO: 90374 - DNA, 1032 bp, Homo sapiens
ataaatggtggagctgatgtaaacccgggcacacaactccagaatcctttttggtgaccatcgttttgtgcgatttcacaggaactaaaaaaaagttctgtggcttaaaaagtattgtttattactgtattacctgaatgacatttttttttttttttttgagacggagttttgccctgtcgcccaggctggagtgcagtggtgtgatctcggctcactgcaacctctgtctcccgggttcaagcgattctcctgcctcagcgtcccgagtaggacccagccaattttttggtaatttttagtagagacagggtttcaccatattggtcaggctggtctccaactcctgacctcaggtgatctgcccgccttagccttccaaagtgctgggattacaggtgtgagccgttgcacccggccaacattttcttttagaatgtatttttttttctataatagaatatccttacgagatcattatactaaaaaatccccagagaagtcctttatgtacccttttgggaaataatattttcttgtgcatatcagtggaattttatggtagttccatgcctaccctaaacattaggaattgagatttattttgaattgaaattgataggttggtgcatgatgtggaaatagttggccgccccagttagcctgctcttttctaatggtgaaaatacagattttactgagctctaagattctatggagaacagtatctatagaggatctataaatatgaaaacattgaactatttcatagttaattcatccactgggcattttacatggaatattttatcttaggattgataaattatgctataagaatggatctaagaatgaataaattgtggtagcttagaatggataaattatgggtaaaagtcagcttcccatccccaaagtggttggcaacagttatgaaacctgtaatttacttgcattttattttttatcctttgttggtttccctaaagcagttaggaaactgctaaacaaaaaaaaaaaggaggggggaac

SEQ ID NO: 90375 - DNA, 1739 bp, Homo sapiens
ctgtaaaagcataaaaattaaaatttttctacttttactaccaccagatgttagtaatcttaatagttactgttttgataataaaaatttgacattttaaatggcatttctttattattaaagttgaataaccaaatatttgccacttgagtttgactgatatatattttagcttttatagcctacacatttaaattttggaatagttggcagatttttaggaaagttacaagtatagtacaaataacttttttccctgaatcacttgagaataagttgccaaaaaagttgccacattaccctaaatactacaaacaagaacattctcctacatatccataacaaaaccatcaaaatcaggaaatcactacattcgagcgggttatagtctatataactatatagattatcactgtataccaaaccaccccaaacttactggagtaagacattttatttaagaagcgcatcagttctctgggtcagttctattcagacagggaagggagatggtttgtttctggtccacagtgtctgggcctcatctgggaagactcaaaggcagggggtgacttgacagctagggctggaatcctcaagaggcatcttcactcccatgctggtagttgatgtggaacacctctacctggtgtctctgtgggctagttggcactttctacacatgtggtatctagattctgggcatgatcatcctgagagaggtatgtggcatttttatgatctagtcttggaattctcatggcattatttcctccatacttgattggtcaaggcagccacaaagttctgcccaaaggtcaggagggggcattagatgctgccacttttgggaggagtgttagggccgtattgtaagagcatgtgggttggaaggtattgtgtgtttggaaaattcactttgccacaggttgtatctgttacttgatatatgcccacattgtctcgtatctggcctatgggagccctttcaagctggttacttctgtgttctgttgacatgcctcattgagcaactgctttatattccggcacaggatgttctaggctcatcttgtctttaccatgctccagccatttttcctagggttctttttaaaggaaagcggtatttaggaattcaggtttgagccctagttgtgcccactgctactggggtgtataactgcatccaggcactctcagtgggcagagctatggaatgtatgtgtgtatgtggacacacactctcaaactatctctattcttctatctgtgtgttgaaaacaatgagttcacttcagtaacccctagtctggtcaagtactacagggtttattttaattttgtgcctttttagatattgttttaaacagcttgagatataatttatgtaccatacaattcaccagtttgaagtgtacagtgaatggctgtgggctcattcacattgcgtatacatcaccacagttgagttcagaacgaagaagccctgcttccatcacttcccagttctcccagccctggcacccactgttgtgctttttttttctggggacggagttttgctcttactggtcagggtggagtgcagtggcgcgacctcggctcactgcaacctctgtctcccagggtcaagcaattctcttgcctcagcctcccgagtagccgagattacaggtgcccagctaattttttgtatttttagtagagatggggcttcaccatgttggccaggctgg

SEQ ID NO: 90376 - DNA, 1050 bp, Homo sapiens
tgtggttttagtggatgacttagaacaggggtcagcaaactatgagttgtgagccaaatcctatatttgtatgaattagcccgtgagccatgagctaggagtggttgttaggcttttaaatgtttaagaaaaaaatgacaatactattttgtgacatgtggaaagtatatgaaattcaaattggtgtttgtaaataaagttttattggaacataaattacaaattattttggggacttttgtacaacaatggcagtgctgagtagttgccacagagactgtactgtatggcccacagtcctaacataatcactctctggcccttcacagaaaaagtttgccaacccctgggttagaaaacattaagtcaggttaaatgcctagcacattagaagaaaagggatcaagtcctcagggactgtggaaggttagcatctgacagtttattcaattatgcttaaggctttcttttcttttaacagagatatcgaacaaagccatactgttgtggcctctgtaaatactctacaaaggtgcttacttcattcaagaatcatttacatcgttaccatgaagatgaaattgaccaagagctggtgatcccttgcccaaactgtgtatttgcatctcagcccaaagttgtgggaaggcacttcagaatgttccatgcacctgtccggaaagtccagaactacacagtgaatattttaggtgaaactaaatcatctaggagcgatgtgataagtttcacatgtctaaaatgtaacttttcaaacactttgtactacagcatgaagaagcatgtgctggtagcccattttcactacttaattaactcctactttggcctaagaactgaggaaatgggtgagcaaccgaaaactaacgatactgtttctatagagaagatcccaccacctgacaaatattactgtaaaaagtgcaacgccaatgccagcagccaggatgcgttaatgtatcacattttgacatcagacatacacagagatttggagaataagcttagatctgtgatttcagaacatattaa

SEQ ID NO: 90377 - DNA, 1053 bp, Homo sapiens
aaagggaaggtctatgatactcaggaataagattattgcccctgagtgtgaaaactaacttaaatttcagcatagggtttcaggggacatggcgaagtttacagactgagatctcagtctccatggttggtacagtaagtctttcaccacattttctgaaggtcatgtttagtggagaaacgggcttttctctagctggtttaggctggaagctgtgtccgggtcgatgggatggcatattgttaaagaatctccattgtcgtcactgtcctgtggatgttaaacctcgtttttttccccacacgatattaaaacttaaagcaccagaaccagtcatggagaccagccagtttagatggtaagtcatatttctggtggtacacagcagaggaaccccttcactctatctttaggtagaaatatttggaggatgtgacagcctctgagaaacataatgttactatgtggattttaaaaaatataatacttgcatgtaattgctataatgttcatatttgaggcagttgtgaaactggtttatgattgttggtgtactctgttgtaaattcaaagagagcttgttgaacattttttttttttacctattgttttcagagtgtctattttgaattaaaatttgttacaccgctgcaaatagaactgtttaattcttttaaaagttaaaacattattgtgaatcatagggataacctctatatgggaatagataccacatttattttctaaaaaaaccttacctgtcatttgtgtgaaaataagaacataacccaaaaggtctaattactggggtcacaaaataggtgtaactacagattcctgatgattctatactggtagcccccaaagtgccaaagaaggtatgtaactggggtgtcagtgctgtgaagtttccttcactgtggctgtgttcagggtgagtgtggaggaggtgctgatgaggaggcagctgccgtctggcgtggttgaatcctcaccttccttttgttgtgtacgttagggtttcccagcctcagcactgctgacattttgggt

SEQ ID NO: 90378 - DNA, 1099 bp, Homo sapiens
gaagtccccagtccagcctgctgcctcccagaaggctgaggcactcgccagccctccaagccctaaaccctccactgccattgattctctctgctgcagctgcctgctagcaccttttaatctctgagttctttggtttggtgcctgtggagctgtaaggagagtgctagagagttaattttaggggctgcacttgagcttgcctgatttcagctcagcctgcaggtctggaatgctcctgtgcaccctgggtgcttcggcgtcacgcagatggaacagcagtgccaggtgtatgacggccgagggctcaggcggggctcggttgtgtgtcccctctaactgtcccctctcccgcagaggaggccgagcgtggcagcctcggcgcgggctcgctgtgcaggcggaggcgggcgctgggcgcgctgcgtgatgaaggaccccggcggcgtgcacacctggacatcggcctcccgcgcgacttccgccccgtatcatccatcatcgatgtggacctggtccccgagacgcaccggcgagtgcggctgcaccggcacggctgcgagaagccgctgggcttctacatccgcgatggcgccagcgtgcgcgtgaccccgcacgggctggagaaggtgcccggcatcttcatctcgcgcatggtacccgggggcctggcggagagcaccgggctgctggctgtgaatgacgaggtcctggaggtgaacggcattgaggtggccgggaagacgctggaccaggtcacggacatgatgatcgccaacagccacaacctcatcgtcaccgtcaagcccgccaaccagcgcaacaacgtggtgcgcggcggccgcgcgttgggcagctcgggaccgccctcggacggcaccgcgggcttcgtgggtccccccgccccgcgcgtcctgcagaacttccaccccgacgaggcggagagcgatgaggacaacgacgtcgtcatcgagggcacactggagcctgcacgtcccccccagaccccgggcgcgcccgcaggcagcctctcccgggtcaatggcgcgggcctggcgcagcggctgcagcgggacctggccctggacggcggcctcca

SEQ ID NO: 90379 - DNA, 1056 bp, Homo sapiens
gtcgggtctcatctgggagatgaaagaacagcctcaacgacggacgggggactcccaggggacgtgcttgaagctgtttttgtccagagggtctgtgcgccaggcagggaggactgtggggccagggtgacctgcctggcctggtgggctcctgacgtggtgtcagttagcgggtaagagaagacatctggagttagctgtcctcgtggtagactcagaagaaaaaggtgttttgcccattggtatttcatgctggccccttgaggagccccaggagcaactgcctagcatcctctgctagaaaggcttactgttgtgtttgtgttggactcagcttatcatccagagatacggtcccacagctgcggtggcgcagtggcccttggttgagttaggaaggaaccattggccagtccgatgaggaccacgttgacgtgccccaggcctctttgttggccttctgtgatctcctttaaaaagaaagaagaaaacggttggtttgatgtgttggcaaaatttggccttgaatgctggccatgggaattgctgaaggaggtctgctctaaatatgggcttttctgccaacggttatttctggttgtttcaattacagttgtgctctctggtaactgctgtagtgttgtataaatacagggtgaatcacaaccaggccatgaagccagatctggggtggaagtgacacgtgggcagcccctagaactgggttctctgccccagagagtgtcaggcaaccccgggctgggcaacgcctaccttgctgcctctgctgggatgagcactactcttcccatgtctgcattcaccccccaggtcactcttgtgttcagatgccccagcaagtccacacctccctcacgaacgtggggaaacggtagggattgcacccgcctgacttccccgcaagcccatctcgtgggcttgtctctcccacatgcctgtcacttgctgtaccccggccatcccaggccagggtgactggccgagagctgcccatcttctgagatgcaggcccctgagaagccgtgtgaactctgc

SEQ ID NO: 90380 - DNA, 1057 bp, Homo sapiens
tagaactaggaacatccagcaaaagactgttttcaaaatatacaattaagtgaaaaaagcatgaagtagaccggtgttggtagtgtgctaccattgtttagaaaagagggaagatagagacaattcacatttgtttgctttcgtatgcataagatatctctagaagggcacattaaaagctaagtctcaagcctgtaatcccagccctttgggaggccaaggcaggcggatcacctgaggtcgggagttcgagaccagcctgaccaacatggaggaacccccgtctctactaaaaatgcaaaattagctgggcgtggtggtacatgcctgtaatcccagctactcaggaggctgaggcaggagaatcgcctgaacccaggaggcggaggttgcggtgagccaagatcacactattgcactccagcctgcgcaacaaagagagaaactccgtctaaaaaaaaaaaaaaaaaaaaaaaaaaaaaaaaaaaactgaagtcattggttacctgtggggagggggctgggtagctggagatttcactaaataccttttgaatattgagctatgtggttatatagccctattcaaaccataaagaaaaatataacagtgtatgatcctaatttttaaaaaccatacatgttaaagaagcctggaagaatgtcttcctacacattacagtggttttctttgtggtggggtgatgtgcagagttagacatccgtgtgtggggccctcgtgagccggcccagagatgactaggtgtgctctgatctccttgtcctctggcagcaccttgggtgtcacactagacctggactttcctctttgtatgtgttgtacatgtgggagggggcatctacattgaaacttgctggtttccccaggatggctactttcccacgcttctccaactacttcaggcaacactgtcttgatttgggtgcaaaagagaaaaagaatgcttttaaaaaacagcaagagtattttgaggaaatgacaaaggacaatagaaatgcagtgtcagaaacatttgcccttcaagtttaattttgc

SEQ ID NO: 90381 - DNA, 1051 bp, Homo sapiens
agaatggcaggccctctgcagggactgtctgtgctcagaggggccacagggtacagtgggtttagccgtcaccctgcacagtctggcatgatgctcgtctgggcagttctgcgagtgccaacggctgcaccatcatcactctggatcttgggtggacagcacctaggcaggcgccaggctccacctcatctgactcataggtgtgtggcccgattttaaaccgtcccaacgtgtcagcccaagaagtcattctatagcaaactactgccgagtcccacgctccaacaggttcctcattaggatgaccgcctgtatttctttaagacctgttgcactctcttttcctacatggagttctttctgtgtttcttagtttcctacagggcacagatgtgcacaggtgctccccggcttgaaggtctgaggcagctcatgtttgccatgcacacgcgtgagatcctttacagctggaatgcgtctgggcttggatggtaggccagcatcgccatcccctcccaacagaccctgctgtaggccaggggctctgacagtctaaggcgagtctcagcccctgccagtgaatggtttagagctgggcatgtgaccccaccctgacagtgagacttgagggtcttcttcctctgaaatggtgacactgtgaccctatgacccacctggatgcgtgggggaatgtgggagacacctgaaggcccccagcacgtcctggagccaactccctgtgtcaacacgtccctggagcatctcagacacacacagtcctgtttgcctggccgcccacactgccctcctcattcctggggctgtccaggctcctttggttgtgccatgggatgaaatgctctctgtcctcacgcttcacccagttatttccactccttattccctgagtttaaattagggcctgtgttttacagtcttcatttgcatctctcagagtttgcaattacatatttgcatgtgtggattactgtctaacttctggctcgagcaaaccatcagctacacgaagacaggtcagttgtgcaacctt

SEQ ID NO: 90382 - DNA, 1123 bp, Homo sapiens
atctgccctggccaggccctgagcaggctccagggactctgccctgaatacggtaggcccctcctggtgccggtgggtggatggggggaaatcaattccagtgtcccacacgtgactgccaaattccacatgaggtttgcataaggaagagggaaaaagagcagacctttccttctgtgagagggatgctggcatggacagtcagcaggggagatgagagtggaggttactcagagctactttggggccccgcacataaattagagatactttggggcctggcacgttggctcacacctgtaatctcagcactttgggaggctgatgctggaggatcgctccagcccaggagtttgtgaccagcctggtcaacatgagacccctgtctctacttttaaaaatttaaaaaaaaaagatattttgggcagagagaagtggctgtgcaaaggtgggtgtttgctgagttagttcaaggagcagaaaggaggctgccaggatgtgaggggcagagcgcctgaggagtttgtgtttgtctgaggggatgcgaaagggagtgttatttgggctgtgaaaaaagctcttccttgctgtctggtgagagtagaggtgggaggcctccaggccaaggcaggtgtgtggggccccaaggcccagctggtgagagaacctcacagctcccaggcttttcttccccaccagcctccctgcccttcgctatcctgacgctggtgaacgccccgtacaagcgaggattttactgcggggatgactccatccggtacccctaccgtccagataccatcacccacgggctcatggctggggtcaccatcacggccaccgtcatccttgtaaggcaggaggggctcagagggactgggtagggggatggggtggggccagctttaccctgggggcctgatgggggggtggcacagccctgccctggaggtctgtgtggggccgggggacacagccttgccctgagtggtacctgtgggtaatagggcccccttcagagtccccagctctccagcagccttggggaggcccgtgcggaggagtgagggcccctgggccgaccgagacccccactggttcctgcggctgctcttgcaggtct

SEQ ID NO: 90383 - DNA, 1020 bp, Homo sapiens
actcggagcccctgtcacagtgagtgccaccccatgcccggagcctccgcaacactccaaccaggtccccccagccctcaggctgagcagaggagggtgggaggcatttgccccaaggacccgaggacagtgtggctccacgagcaggctctcagtgtgtctttaggtttattctttacttgtatgtattttttgactggagaatacattcatgtggtccacattctccacaaatgggagcaggtgccaggctgtcccacccctgctccagccaccagctcccctcagggcaccccgggcccggctgccataggctgtgggggaggcaaggctgggagtctcgagtccagcgctcagcactgggctgtgcaggcacgtggggccgcactgacactctctgcgtctctcttggtctctcccctgcagctgtaacgtgatgacctgctgactcctggccgcgggcggcgtatgcggcccagactggacttagcgctgccgctgggcccgcctctgtcagtcttcctgaccccttccccaccccccgggccttggggtagcacctccttctgcttcagaacacgtcaggactggggtgaggtggctgggccgtgagcccttgcccctgtccacacagaatggacccacggccccacccagcgccgtcagcgcccggcactgccacccgggtccgggccgctgcctgcacgtgggatccgtcgggcagccggggacagaagagaccccgccgttgggacgcagggcagagccggccacctagtcccttccagccagcagaggcgagggaaggcgtcactgccccggcggggagacgggcaggacgccctgccccgcaccagcagcctccgccggggcgccctcagctccctgcttggctctgtctctccacacccggcagggccgcgggctgccccagccctgggggtcgtgggcagctgctactcagtgccaaccccgtggggcacagagccatatacctcgctgtccggcccccaccccagc

SEQ ID NO: 90384 - DNA, 1050 bp, Homo sapiens
gaggtgtaggtggccctgacatcgcccaggagggtggtgtggacggcccctgatgtcactccctggatagaggtgtaggtggccctgacatcgcccaggagggtggtgtggacggcccctgatgccagtccctggatagaggtgtaggtggctctgacatcgcccaggagggtggtgtggacggcccctgatgtcactccctggatagaggtgtaggtggccctgacatcgcccaggagggtggtgtggacggcccctgatgtcactccctggatagaggtgtaggtggccctgacatcgcccaggagggtggtgtggacggcccctgatgtcactccctggatagaggtgtaggtggctctgacatcgcccaggagggtggtgtggacggcccctgatgccactcgctggatggtatagacagttcttgctgtcggctcctgcgctgagcccatggaagagccaacatgtcctctccccaggcgctgtacgagttggtgaaatgcaacttcaatgtggaggaggccctgcgaaggctgcggttcaacgtgaaggtgatccgaggtgagcagcggtctgggccttccttccgctgcggccccgccctgggcactgctgaccgttctccccggcctgggccttccttccgctgcggccccgccctgggcgccgctgaccgttctccccggcctgggccttccttccgctgcggccccgccctgggcgccgctgactgttctccccggcctgggccttccttccgctgcggccccgccctgggcaccactgaccgttctccccggccgtgtttgcagatgggctctgtgcttggagtgaagaggagtgcaggaactttgagcacggcttccgtgtgcatggaaagaactttcacctgatccaggccaacaaggtgcggactccactgccaggctccaccgggggcttctcgatctggggaggggctcagggtccgcaggcacacagcacacggccgactggaggcctggagccccgtgtcctgtgtccgcctcctcaccgtgtgcccattgc

SEQ ID NO: 90385 - DNA, 1046 bp, Homo sapiens
cttggatgaaggactgggcctgaggtctggctggggagtgctgccatgtggggagttgctatgggtgtgacagagtggccctggttgtggccagtgaggctcaggcaagaggacagggacaggaacccccagagccgtccctcctgatggggccttgttcccttccccaactcagagcaacgacatgccctttgatgagctgcttgcgctctatggctacgaggcgtcagaccccatttcagaccgggagagtgagggtggtgacgtggccccgaacctcccagacatgaccctggacaaagtaagtgagggcccttcctggaactggctcacagctgaaggtgggggggcctggcgctgcctctctgcagaggggagtgttcagtgagaggaggcacaaaggcccccagaataagtagaatgtacctgtgaccactaccctggggttggaatggccatgggcatggggctggaccctagccttaaccccaggccacatgtcattctggctttggtgggtggaggggcacatcggggcctccccaggactggtctctctgccattccgtacccagaggtcacaggtcaaggcttgggtgttgggagcaggggcgggctgcattgtagaaggttaaaaccaaatgcacagtcagagaaagagccatgcactccgggcgtgtgcccagtggcagctctaactgtctccagctctggtggctgggtgtgggctcccacgtgtctccttcccatccccgctccccccacgctgtgcaccctttgcagaatgggaatagcagccccatgtgagcctcagggcactcccagtgtctttactgttgttatcattagtggtattgcgagattgttaaactgtaaaatgttctttacttttttttttttttttaaaggaacaaatagcgaaggatttgctttcaggggaagaagaggaagagacgcaatcatctgctgacgacctcaccccgtccgtgacctcccacgaggcctccgacctcttccctaaccggagtggatgtaggtgactctgt

SEQ ID NO: 90386 - DNA, 1033 bp, Homo sapiens
ccgcctccccaagacccgcttccgcctccccggaacccgcttccccctcccccggaacccacttccgcctccccaagaccggcttccgcctccccggaacccgcgtccgcctccctggaacccacttccccgtcccccggaacccgcttccgcctccccaggacccgcttccacctccccggaacccgaatccgcctccccaggacccgcttccgcctccccggaacctgcttccccgtcccccggaacatgcgtctgcctccccggaacccacttccgcctccccaagacccgcttctgcctccccaggacccgcttccgcctccccggaacccgattccgcctccccgggacccgcttccgcctccccggaacccgcttctgtctccccggaacccgcttccgcctccccaagacccgcttccgcctccccgggacccacttccgcctccccaagacccgcttccgcctccccggaacccacttccccctccgccggaacccgcgtctgcctccccggaacccacttccccgtcccccggaacatgcgtctgcctccccggaacccgcttccgtctccccggaacccacttccgcctccccaagacccgcttctgcctccccgggacccacttccgcctccccaagacccgcttccgcctccccaagacccgcttccgcctccccggaacctacttccgcctccccaagaccctcttctgcctccccgggaccggcttccgcctccccaggacccgcttccgcctccccgggacccacttccgcctcccccgggtctgtgcggatgccaggcctggttgggtctgttttccctggtggcatcgggccgccctcgccgtctcccggcggtttgtcctacaagtttaacgccgacggccggcgtgttccacggaggacgcgtgcgcttccttcacaccacatccattgggaccagtcaggtgtggccattggccgtggatgtgggatttagaatgttcagaattcagacgccagggttgttggggctccggat

SEQ ID NO: 90387 - DNA, 1799 bp, Homo sapiens
ctgcccctgcaggcgcgcctcaagttccccatcgactacccatactctccaccagcctttcggttcctgaccaagatgtggcaccctaacatctacgaggtgagcgcggcccccacgggcctcaagtcctcatcctccgggacccagggtgctgggagcctcacgtcctcatccttccgggacccggggcgctgggagcctcacgtcctcgtcctccgggacccggggcgctgggagcctcacgtcctcgtccttccgggacccgaggcgctgggagcctcatgtcctcgtccttccgggacccggggcgctgggagcctcacgtcctcgtcctccacgtcctcatcctccgggacctggggcactgggagcccgtgctgacctctgacctgttctgacctgtcttcttcttgtgcagacgggggacgtgtgtatctccatcctccacccgccggtggacgacccccagagcggggagctgccctcagagaggtggaaccccacgcagaacgtcaggtaagccggcccaaccccctgtgtccacccagaacatcaggtaggccgggctccgtcccgtatccacccagaccatcaggtaggccgggctcccccacaggctgtggcgccaaggcctgattcgggacctgccagctggcggtcctgggcctcgctgtacctgcacggtaggtgctttcacggggcctgcggcaccgtgtgtcggtgcagactcccaccaggaccccaggccggccccaccgtctggaaccacctagaggtgtcccgccatcctcagtcctggggccttctccttacccagccgtctctgggttggtcacctcgtgccacgtgtgccgcctgggcctcgtccccaggtacaagcactgggccgtgttgcccgtgtgtcctggagtgtagtctaggcaggacgtgcgggtgtgagggcagccccgggtctgacggaggggtctgcaccttgctgccctccctggtcttggcgtgggagggaggagactgatgcaggtccagcccctgctgttctgggggcctgagacagaagcagaggccatgaggccaggtgaaggtcacctgctgggtgggtccaggcgtccccgtgaccctcagggccagagaagagccggaaggctggggtgccccgggccgccccactccgacccactctccccacaggaccattctcctgagtgtgatctccctcctgaacgagcccaacaccttctcgcccgcaaacgtggacgcctccgtgatgtacaggaagtggaaagagagcaaggggaaggatcgggagtacacagacatcatccggtgagggcgggcgggggcgtcacgggaggagagactcagatccggcctgcaccccggcccctggtcccacggccgcccagccccaccttcctggtgagggtggcggagcttcctggtgcccatttacagggtgccagtcacagatggaggccgggccgagtggcggagggtccagccaggttcaagcccagcttcttgccccttttcctctttttttttgtttgagacagagtctctctctgtcacccaggctggagtgcagtggcgcgatctcggctcactgcaagctccgcctcccgggttcacgccattctcctgcctcagcctcccaagtagctgggactacaggcgcccgtcaccacgcccggctaattttttgtatttttagtagagacggggtttcagcgtgttagccaggatggtctcgatctcctgacctcgtgatccatctgcctcggcctcccaaagtgcaggga

SEQ ID NO: 90388 - DNA, 1031 bp, Homo sapiens
gaggtcgggagtttgagaccagcctggtcaacatggtgaaacctcgtctctactaagaatacgaaaattagccgggcgtggtggtgggcacctgtagtcccactactcgggaggctgaggccggagtatggcgtgaacccgggaggcggagcttgcagtgagccgagatcgcaccaccgcactccagcctgggcgacagagcgagactccatctctgaaaaaaaaaaaaaaaaaaaagtgttactttgtcaggtgtgatgatggtagtgtggcttcatctcgagtcctctttgagaaacactttctaaaatgctcaaggatggagggtggagggtgtgcagcggtgggcggggctgtgaccgtcacctcacctcccccacaggaagcgcgtgtggggaggctcggggccggggccagcacccacactgggtctccacagcggcatggaggcctgcgtgtcttcactgctggtgctggccctgggggccctgtcagtaggtgagtgggagccgggatgcaggggggacactgaggcccagcgctctcggtgggtccctggatgggaggggtgggcgcgggcgccgacatcctgggtgtaagagcggagattcatccttgtttggagggggactgaggcctggggcatcccgagctcctcacgcttcaccccgagtggacatcccgggaccgtgggagagtgtggtgtccaccggctcacctcgcccatcctcccggcagcagccagaaggcaggggtcacgctcacacccgaggtgcagagtaggagactgagacttggcgaaggagatgctgacctaggactgcccagctgggagggcagagctgggactcgatccccgctggctgcctgccaccaccaagggcttggctgggactaggtgcccagcagtgagggagaagggaggtgggtggcggctcccctgcattccagctggactgagtgacaggggctcttgatgagttggggacccaagaagatggacagaggtaggaatccagccgtcagtcatc

SEQ ID NO: 90389 - DNA, 1105 bp, Homo sapiens
atatatatgtacatttttaaaggcagagatgtgcgtctcgccatgttgccgcgtctggtctcgagctcccgggctcaagcgatcttcccgcctcgacctcccaaggctctgggagtacagacgtgagccacagcggccggcccgtgtttaactcagataaaatctgggtaacacactttcaacgcttcaaccccctcgggcgcaccgctctgcgctcattgcaactttgaaagcaggaaggaagaaatgcgcaggctccagccgcgtccccgcaggccccactcccgtttcctagcaacgccgggtcacgtgcgccgccgcccggattccgtagcgtgagcctgccggagccggcgcgtacatgcgagcgtgtgcgcgcgtgcgcaggcggggcgaccggcgtccccggcgctcgccccgcccccgagatgacgccgtgcgtgcgcgcgcccggtccgcgcctccgccgctttttatagcggccgcgggcggcggcggcagcggttggaggttgtaggaccggcgaggaataggaatcatggcggctgcgctgttcgtgctgctgggattcgcgctgctgggcacccacggagcctccggggctggtgaggagcgggtagggggcgggggtgcggtcctgcaggggccgggaatggaggccgcggtgccgacccgaagccgacgggagcctggggcctcggcgcggggcggcctggggtgcgaaaggccggccccgggggcttcccgcgccagcatggagcttgggggtgaagtcccagggtttgaggggggactagaggttcctcccggcgcggcctgccgggctcccccgggcgctccggcctcgagcccggcctctgtgtgtgggcgtgaagctccctgcttggaggcgggagccagggggtcctggccaggccggtcttggtcaggggaggtgggcgtcttgcttttcggtcacctggggttgggggtgacctgcttcctgggtgagggcgtctgcgaaggcggttggaggtggcccgcccgccggtcccatcggccaggagaagggagacccaaagcctgggtgagcgtcccctttggcctggagccaggggtcaggggc

SEQ ID NO: 90390 - DNA, 4080 bp, Homo sapiens
gattacaggcgtgagcctccgcgcccggccaccaccgcgcccagctggctacgtttttagaaaagaatttccagtttgtgctggggctgctacaagagctcgatgccctggtccctgctcagggacgtgggtgggtgccttgtctgtccccacaccctggtcccagcctcgtgtgtctctgggcaggaacatcgccaggcggggcctctgggttcccagcgccttagcccagggcccgccagctgccagcgaagggtgccttcccgaagggggtgccttcccgaaggggcctcctcagcaggcgctgggctcttcccttcccggaggcgtggccagaagttccccttgggcctccggtcctcggggcgtaagggccacggtgtatttttgggatgaaaaccagtccttcccggggaggagccgcaggttcctgggggtcaggcaggcagcgcgggccgtgctcctccactctgctgaccgcgtctcgccgggccttgcagccggcacagtcttcactaccgtagaagaccttggctccaagatactcctcacctgctccttgaatgacagcgccacagaggtcacagggcaccgctggctgaaggggggcgtggtgctgaaggaggacgcgctgcccggccagaaaacggagttcaagtgagtgcctgaccacgccatgccgccacctgccccttctcacggctctcttgccgccagcggcctgtggtccgtgagaacaaaagaccggtcggcaggcttgatccaggcggaagttagggaccagctccgcgcagacccccagagggaaaccccagggaggggtctgaggggcgtccttgtgaggcagggggctccagcagccctggcaggagtccccattgcttgctcctcactaggtcccgggcacgaaagggcgccacactgccaggtcccgggcacgtgtgcgggcctcccaggctctgtgctcctggcacaagagggcaccacactgaggcatgccctgctcggaccccagacgctgtcatggccggagctttgtcataactggggctgggacggccctgggagcacagagccttttgttttcaggctgactgggaagacggtcacagggtgtggggtgcagagcagggaccagaggtgtggggttcatcagtcggggagaagggggtctgttggttctctcacctgtggggtcttgccagcctggctctgtccttggggccgcacggggaccccaggagttcttttgaggttcagacttgactgggacagttttgctttttcactgtgccgtggttgggcccctggagaaccctgggtccttggaggcgtcctgcagagctggtacgcggctcacctgcctgctgtggttgcagggtggactccgacgaccagtggggagagtactcctgcgtcttcctccccgagcccatgggcacggccaacatccagctccacggtgagtcctgcagccaggggtaccgggcaccaccgactgtcgggagaagttgttggcctgaggcacccggcacatcccagagccctggccccctgctccctggaggggaacagccctcctgcgggaggccggggatgggggcgggcctgcggttccaggctcctctctctcaccctcctgtcagggcctcccagagtgaaggctgtgaagtcgtcagaacacatcaacgagggggagacggccatgctggtctgcaagtcagagtccgtgccacctgtcactgactgggcctggtacaagatcactgactctgaggacaaggtgagaagccaaggaggctgggggtcctggacccagccctcaggactgggtgagaggcctagactgggggtcccggacccagccctcaggactgggtgaggggcctagactgggggtcccggacccagccctcaggactgggtgaggggcctagactgggggtcccggacccagccctccggactgggtgaggggcctagactgggggtcccggacccagccctccggactgggtgaggggcctagactgggggtcccggacccagccctctggactgcagccctccagactgggtgaggggcctagactgggggtcccggacccagccctcaggactgggtgaggggcctagactgggggtcccggacccagccctccggactgggtgaggggcctagactgggggtcccggactcagccctccggactgggtgaggggcctagactgggggtcccggactcagccctcaggactgggtgaggggcctagactgggggtcctggactcagcccttgcctttggtcccctaggccctcatgaacggctccgagagcaggttcttcgtgagttcctcgcagggccggtcagagctacacattgagaacctgaacatggaggccgaccccggccagtaccggtgcaacggcaccagctccaagggctccgaccaggccatcatcacgctccgcgtgcgcagccacctggccgccctctggcccttcctgggcatcgtggctgaggtgctggtgctggtcaccatcatcttcatctacgagaagcgccggaagcccgaggacgtcctggatggtgagccgtctgccctcctgcccacatgccctgctctcggggtggcccagggccactcctggtccgtccctgccagccccaccgctgacccagagcttggaactgaggagccccaggcagggagttgatgggaccccgaaagaaagtgtgggatggagggtctagccccgggcagctgcggctcagtgggcagcgggaccccgggaggaggaggcggcacctccgccccacagcctcacccggcccttccctcccgctcacttggctgcaagccagtgtcctccgtggtgagccggcccttgctgctctgcatgatcaggctcgggaacctgaggtcagccatgctgtgctccggcagcccctgcctgcctcctcgcggagcccttctgccccttgggctgcgtgtgccggggcgaggcctgtgtggggcctgtgatggcagctcctggaaaacgctgtggggcaggggtgaggcccacgaggccatggggacagctcaccatggggagcacacctgcaggtggggagggctgcctttccccacagcactcagaagatgcacgtggccggggctgatgagctgccccgagccacccctgggggtcactgagggcagggctggcagcacagatgcccctgctcggggcctgagtggggccagtgctgacaggctgtcctctcgtcctctttttcatggcggcggtccttcttcagatgacgacgccggctctgcacccctgtaagttccagctgtgggggtcgggggtcccaaggagcggcctgctgccccaggcctttaaaacacaaaggcagagcccctgggcttcagtattcgggggtcctgggggccggggtgggcaggggtgacttggagagagtgacttgcgggggacaccctctcacccggcccctcgtgccccaggaagagcagcgggcagcaccagaatgacaaaggcaagaacgtccgccagaggaactcttcctgaggcaggtgcggtgggcgggagctcctcctgagccaggtgtggtgggtgggtgggcgggaactcctgagccaggtgtggtgggcgggatctgctagccaggtgtgggctcctgggtcccgcctgtgggtcgctgggaggtgggtccagtctgagcgcccctccctgtccacaggtggcccgaggacgctccctgctccacgtctgcgccgccgccggagtccactcccagtgcttgcaagattccaagttctcacctcttaaagaaaacccaccccgtagattcccatcatacacttccttcttttttaaaaaagttgggttttctccattcaggattctgttccttaggtttttttccttctgaagtgtttcacgagagcccgggagctgctgccctgcggccccgtctgtggctttcagcctctgggtctgagtcatggccgggtgggcggcacagccttctccactggccggagtcagtgccaggtccttgccctttgtg

SEQ ID NO: 90391 - DNA, 1070 bp, Homo sapiens
ttttttgagtcagggtcttgttctgcgctcaggctggagggcagtggtgtggggatcacggctcactgcagcctcgacttcctgcaccaccacgcctggctgttttttttttttccggtagagacgggggtcttaccgtgttgcccaggctggtctagaactcctgggctcaagcgatcctcccgcctcggcctccgcaaatgctgagatcacacgcgtgagcccccgcacccggcctcctttccaccgctcttgtctacagccgcccctcctggtccgattgtattggcagatgtcgccaatacggtgtcaaacggcgaaggggcactgagcgttttttctttctcccgtccttggcggcagcagctcggttccggctacggggctgagcccgtctctcagacgaggaaactggggtccgagaggtgagccggtcccagaggcagggcgagggggaagcgggagtggggtccgcagcggacccagccctgcctcccccctgcaggagatcgtcaacttcaactgccggaagctggtggcctccatgccgctgttcgccaacgccgaccccaacttcgtcacggccatgctgaccaagctcaagttcgaggtcttccagccgggtgactacatcatccgcgaaggcaccatcgggaagaagatgtacttcatccagcacggcgtggtcagcgtgctcactaagggcaacaaggagatgaagctgtccgatggctcctacttcgggggtgagcttgaggggggcgcgcctggagggggagggggcacgcgacccccgcggtgtgcagagccagggggccggggccggggccggggccggggatggggatggggatggggatggggccggggatggggatggggatggggatggggccggggatggggatggggatggggccggggatggggatggggccggggatggggccggggatggggccggggatggggccggggccggcaccagggagagcctgggtgggaagcgcccacgctggccaaggtgcagaggccgggccgtgtgcctgggcggggagggccgcggcgcc

SEQ ID NO: 90392 - DNA, 1050 bp, Homo sapiens
ccccgaatgtaggtggtcctggcagctcccctcctgtggcccgacagggagagccgagcatgggcgctgccccttcctgctgggcatttcttggcaccgcgatgtgtggttagatctggagcacgtggaggtcgttccagcagaatctaccggccacgggagctgggaatgctcaggatgcggggtggtggccctggcaggaggggacctcgtagccgccctcggagctgaggctcccacagcagcgtggggggcggcaggggtggggcgaggaggcttctgggaacatttcctccccctgtactgatacctaacccaggatgtttggggaggggcggggcgaggggtggggcgaggcctgcaggagggtgggcttccctggacctcaagtggagggggctgagcgcagggccaggatgctggtcactgggtggccctgtgagctcccctcccttcaggagtcctccgctctgccacaggaagggcctgaccttcgtctctgtgcacgactgttactggactcacgcagctgatgtctccgtcatgaaccaggtgcccccgtagtctgagcctcagtccacccatgggtggggcccccacactggggcgttgggtaggggtggtgcccagagcctgcctgatcacccctggggatcctctgactcctgcccaggtgtgccgggagcagtttgtccgcttgcacagcgagcccatcctgcaggacctgtccagattcctggtcaagcggttctgctctgagtaaggcgctccctgaccccaactacctggattccccccccaccccaaaacctggcctcagcctcaccccaccctgcttccaaccccaggccccagaagatcttggaggccagccagctgaaggagacactgcaggcggtgcccaagccaggtaggcgggtgggcagcctcgcaagggtggctcgaactgcgggccagggcggggctttcccgccacccacgccgtccgctctgcttcctccgcaggggccttcgacctggagcaggtgaagcgttccacctacttcttca

SEQ ID NO: 90393 - DNA, 1030 bp, Homo sapiens
ccttatgtggaaatagggtttctgcagatgtaattagttaggatgagatcattagggcgggcaccaccgcagtgacaggcgacttcgggagacaagggaaatttggacacagatgcagaggagaccgccgtggggcagcagaggcagaattgggagggaagcggccgcaagtccaggagggtcagaggtggctgtcggcaccaggagctggaagaggccgggagggtactcgcctggcaccttgcacaccttcacttcagacttccggcctccagagacgagagtgtatttgtgttgttttaagccgcacagcctgcttacctggtcccagcaggccccggaagcccattcatcctgcggggacttaggccagccaggcgtgctggggcctcgtgtggtgatggggatgggagacagacgtgggccagagcgctggcccccctccacggccttgcaaaatttattaaaaggaagatgtctccatagggagagggaacgtgagccgggctgtcagtgatccagcagccatctgctcaccagcccgaccacagggtcagcggcctgcagagtgggggtggggcgggggcacagagggatggcaggccccgctgcacgctcccccgggagtggagaccccagccctgcaggctgctgcgcccaggccttgttctggggaacactctgtctccagtgtcctctagaactcggcgttttatccatggcaggtggaaggtctgctctttgtaaaacaataataaagtcaggccaggcgcggtggctcacgcctgtgatcccagcacgttgggtgactgaggcgggtggatgccctgaggtcaggagttcgagaccagcctggccaacagggcaaaagcctgtctctaccaaagatataaaaattagctgggtgtggtagcatacacatgtaatcccagctactcgggaggctgaggcaggagaattattatttgaacccaagaggcggaggttgcagtgagctgagatcacgccactgcactccagcctgggtgac

SEQ ID NO: 90394 - DNA, 1010 bp, Homo sapiens
gcaaagcacgcttcccgccgcctgactcgccacgtacccactctcaagatggcgtctcccgcaaagccacgcgccagctgactggctcagacgccgtcacgtgatcccattttctccccctcccccgactacacaagccgtttccgccttcggccttgaggaataaccgcctcccccaataggcgcctgcgatttctctgggtcccgcccccgggcggccttctggccagtgggaggtgctggcgggggcccgcggggctctccccgccccctggctgcagcgggagccaatgggcagcgcgcgcgggggacgtgtgcgggcgtctccgccattttgtgagtctataactcggagccgttgggtcggttcctgctattccggcgcctccactccgtcccccgcgggtctgctctgtgtgccatggacgggtgagtcgcacgtcgccccgcgccccaccgccctccccgcgccgcagccctgcccccgccgccgcgccggcctccccggggccgatctcgccccctctcgggcgggagggggcggcgggctctccccttcctctccgcgtggcgggcgcgggtgcggggcgggtcaggggcttcccgggggtctggccgcgtccccatcccccgtccggcccgcttccggcccccgcgcgccccgtccctagcgcacgcggcctcccgcgcccctccccctccgcgcgcgtccccgcacttcgcctttgccccgcctcggcggcgcgcggcccttcccgcttcccgtccggccctcgcgcgcccggatggcccttcccgcctcccgtccgctcccctcgtgcgcctgcgtagcccgtcgcgcgtccccgttggccccagcgcgcgtgcgcggccgccatcgggggcgcgcgcctttcccgccgcccggactctgcccccggcgcagccccggaagcgcaggcggggctggggcggccgccgggagggaaagctggcgccggggcctcgccgcgggcccgagtctctgcgct

SEQ ID NO: 90395 - DNA, 1010 bp, Homo sapiens
tgcgcgaggccctccctgggaataggaagcgggagaggctggagatgtttcgcattctttccgttttcctgagaagtttttcttgggttcagtcacttttaaaagtctgttaaacgtggtccgtgcagtctgtggtgtcagaagaggcgcagccctagagtgggtctggaccccttagcatgcgtgcgggcaggtgggtcctgcagacggcgagacgagggctccccgctctcggacccagcaccgcgggctcgggggccgcgcactcgcctcccggagtgaggcaggaggcccggaggctgcccttccgacggacgctccgagtcacttagggcctcgccgggagttgcagtggccgggagaagccgtggggagctcactgttgggtcaggacctggccggggctgaagggagggcctcggacagtccggctttctatccaccttccccccggggtgtcccgaggagggagagtcgggtcgggcggggctcgggttgatcagtaactgaggctgtgttctggtcggtctgttaatttttattgacggtttccacggccgcctcctgctctcctcggtggatcgggctccactctgctgagaggcaccctcttgggggcccacccctacccgggtggaagctctggcccaggcctgtgagtttgccagtttcagcctctccgaggcgtttccaacttactggaaagcacacagcagcccttgaaccctctcagcggcatctagcattcctcggggcttccgatgggggtgtctttgtcttggaacgtgtggggcctggtccagaggtggggcctggggtcctgctgggagggaggggcgccaaaggacaatggtggccccttttcaagttgcagtcaagtggacggctcacttccctgcccttctgagctttctctagcggggcctcgtgcagccagagggagccctgcggaggtggcagctgcagggacctacgggctctcctggcccggggacagctgggtgctcctg

SEQ ID NO: 90396 - DNA, 5782 bp, Homo sapiens
tttggttctcttgcgaggccaccagaagtgaggacggctgcctgggccctgccgtgtgctgctgggggggctggctccatggagggggtcctctgccctgctggctggtggctgaggccccaggcctgtgcccagggccgctggcagcacagtgaggccacgtccacagcagagttggccgtggagatagtgtacgtggtgccctccgtagctgagagcctcccagccccacactggctgagtacccagggcttccagaatttggaaaaaggagcagtgttttggtcgtggagctgtggggtgccgtgcgcgtccatgggctgggtctgcgctcaggctgccctgccgtggaagtgtgggtgtgggtatgggttgggggtctgggaccccaggcagcccaagtgggagcagggccggccggtggggaagggaggctctggcctggtgggaagtgcagctccgcgttgtcccttctcttgcagcggggatctgacgagcttttctctacttgtgtcactaacggaccgtttatcatgagcagcaactcggcttctgcaggtaaggccgggactcggcccagggcaagacccgtgggtgtctttccctggaacaacgttacgttcttgttctgggactctactttccatctccaactgcaggggcccatggtccacgctacagacccaggtccaagttctcgctgcagagaatttccagggaggcgctggatggatggtccaggctggcacttggacctgtgggcgggttgtcaggagctgtcgggagcaggggtcctgactgtgcaggtcttggcctctcgcgctgctggttcacatgcaccctcctggggctcagggttggtctccgtagcaggcagggctctagggggatagcagggaccttcctctgtgggctcctgcgagttggtgcctgcatctcatggcacccccttttcagcaaacggaaatgacagcaagaagttcaaaggtgacagccgaagtgcaggcgtcccctctagagtgatccacatccggaagctccccatcgacgtcacggagggggaagtcatctccctggggctgccctttgggaaggtcaccaacctcctgatgctgaaggggaaaaaccaggtacctgagccgcgtttctccggggtgctcacaccgtgcaggcggggacgaggagggcccagcgctcactgcctccccaacaggccttcatcgagatgaacacggaggaggctgccaacaccatggtgaactactacacctcggtgacccctgtgctgcgcggccagcccatctacatccagttctccaaccacaaggagctgaagaccgacagctctcccaaccaggcggtgcgtggccccgcggcggaccccagcagcccggggacctcgggggtgggcccagccgcaggggccggggactcacggctgtgcctcccacagcgggcccaggcggccctgcaggcggtgaactcggtccagtcggggaacctggccttggctgcctcggcggcggccgtggacgcagggatggcgatggccgggcagagccccgtgctcaggatcatcgtggagaacctcttctaccctgtgaccctggatgtgctgcaccaggtgaggtggtcccatcaccgccagggcaggtcggctgctattgctgtgggcacaggcacacgggaggggcctggcagggctggtgggcaccgggcaggagctcatgctgtggcccgggacctgcagattttctccaagttcggcacagtgttgaagatcatcaccttcaccaagaacaaccagttccaggccctgctgcagtatgcggaccccgtgagcgcccagcacgccaagctggtgagtggggctcccgggacggcgcccgccctggccctggcccggcgacgtctcacggtccctctcccctcagtcgctggacgggcagaacatctacaacgcctgctgcacgctgcgcatcgacttttccaagctcaccagcctcaacgtcaagtacaacaatgacaagagccgtgactacacacgcccagacctgccttccggggacagccagccctcgctggaccagaccatggccgcggccttcggtaagaggctgcccgacgcggcgccagtgtgcagagtggtctattagggccgctcagtccggagccccggcggcacgggcccggccctgcaccagggtgatgcacctgctgctctctgcacggccagcacagcacggtccagtgtcccccacgtcgggaccacggccccccctggagcagcggatctgcccgcgaaggctctgccggggccgcccgccggccgggttggggcccatcccgcagcacagcgcccgctcgcggtggaggttgtgggtgcgatgattagtgtctcatttatttctaggtgcacctggtataatctcagcctctccgtatgcaggagctggtttccctcccacctttgccattcctcaagctgcaggtattcaaacgcttggtcttggttccccagcgactgcatgcccacaccaccttcccaggcagctccgcatccacggcggcagcctgggcggactgggcactcgagtgccaggtcaggggcccttcccgggagaggggacgccacgtccacagagcaggcttggccagggcagtggtaggacagggctgtggaggcccacgtgtggacggcgccagccagaagccgctaatcgcacagtctttgtggtctggttcccttcaagcacctccgggcgagcgcgaggaccgccagtggttggagggatgtctctagtagttgaatttgagtggcctggtaagcgcgcggcccgaggctgagcagcatgaccggcggcgggacgtgtgtgcgtggccgtcctcccgcttcccttctgggaccggggcccggccgccccagtgctggccgtggacggagcagcgcgtgccgcccggcggccgcctcgtctgcatggaggcatgggcgcgcatgcgcggtggtcccgggacgggccctgcttgccgagggccccgtgtctgtgctggcggagccggagcttttctgtgctgtgggcggggcgcatgcagatgagcccaggcccggcccggcccgtgctgtgaggagaggcgggcgctggtgcaggagccggcgggtggctgtgcgggggtcggacgaccccacaggcacccagggtagggccagagccagggccgcctcccgcgcggctcggctcctcggtgcatgaggacggggagcgtcggcctctcccactctgcggtggagtcgggggcgccgccgctcatctcacctcctgcttttccaggcctttccgttccgaacgtccacggcgccctggcccccctggccatcccctcggcggcggcggcagctgcggcggcaggtcggatcgccatcccgggcctggcgggggcaggaaattctgtattgctggtcagcaacctcaacccagaggtacgtgggcttttcctccgcgccgccgttcctcccggaagagcgagcaggggatgttgtgctcgggctcgggtcccggagcagcgccgcccctcgctgtgtctgcgcctctgccctggcagcccctctgctgcagcgctgagaccctccttttccaagatggcttgagttttcctcttttcctgaattcacatcttggttcgcgttttctcttgcatgatacgcagaatgaattattttttggttacccaaaggcaatctaaaaattacttggagctgagcagggcgcgcagttcagagccccagcaggccgccctgctggtcagcgggacacacagggttagcgcggcggggtgtgggcagcccctgtggctcgagagcctgtcacttaactggtggatccgttatttcccagaatggttaaattcccctcggggagagcttgggtgaaacaagaggcccaaaatatgtaactcttgatggatgggatcctcctggaatcagcatttcaggctgttctgtttcccggcaactcctgtgacttcctcaaggcggtgcccagcctggccctccctcgcgggggcccaggacgcactccctgcctgtgcctcttaccacgagccgggtgctgtccctccagctcctcctgagcgaggccgtgcactaacagactcgatctcccttcacgcctgtaatcgtccttagagactgacttgtgccacagctgcgggagacagcgctgctgcagggcttggctgaggtggccgcgagcggagctgcacgcgcgctcctggggggcgtggttgggatcggcttctgggagcccctccagcagcgctgtctctgccggcatgtgagtgaaggtgcttctcttaccgtgtgcccgtcgaggtaaacctgtaactggaatgtgtgtggagtgtgactgatagaacactacctgattcttatgtatttactgacctgtgtttttttgctactttttttcttttctccccttcccctttccctattttttttcttgccctgatccggaatttctttgccaactgactgcacggtacttctgcttcctgttgttgcttgaaacaaaacaaaaacataaacaaataaaaaacaaaaattccccctcaaaccctgctctccggaaaccaacctgcccttgaatattaacatcctgacaacttcatcatccatcaaccactgcacgcctgcggggactgtcttcctcgtgtggacgattggcaactcgccccccttgacctctccctctcccctgtccctccgctgccttgctctgctgtctctaaagagagtcacaccccaaagcctctttattcttttcggtatgttatcgttcacacttttattaccttgttttcattaattgagatgattttgatgccctgagacgtattatgagtttgcggtttggcactctgatgctccgtggcatccgcctcgttttatggtttgctttcggtttgcgaattttatttggtcccgtagatacgtacgcatggtttatcgccctgcatgcttttcagagttagacctgtcggtggcatatgccaccgtggccacccgctggcagcttacctgtcctggatgctatgactttgctgaacggagctgctcctgttagcgcgccctgtggctgcgagacgcagctccgcagtggccgataaagcaaacccggccgggctgagccgggccttgtgggggtgcgcggggccggggctgacggggagatgggcggggcaggcagcaggagactcaggccccatccctgggcttttgaaggcgtctacggtgacgtgcagcgcgtgaagatcctgttcaataagaaggagaacgccctagtgcagatggcggacggcaaccaggcccagctgggtaagaggccggggcggccccggggtggagggggcaggggcgggggctgcgttccctctcgggcgcctggtcacgcgggtgctgctcccccagccatgagccacctgaacgggcacaagctgcacgggaagcccatccgcatcacgctctcgaagcaccagaacgtgcagctgccccgcgagggccaggaggaccagggcctgaccaaggactacggcaactcacccctgcaccgcttcaagaagccgggctccaagaacttccagaacatattcccgccctcggccacgctgcacctctccaacatcccgtgagtgctgggccggggggctcatggggccgggggcgggcaagggctctgcttggctgtcctaccgcgtcggtgtgtggacttctggcgtttccaga

SEQ ID NO: 90397 - DNA, 2589 bp, Homo sapiens
cacttgaacctgcaggcggaggttgtggtgagctgagatcacgccactgtgctcccgcctgggcgacagagcaagattccatctggaaaaaaaaaagtggaggagcgtggtactctgtttctgcaaacttgtagatgcctggtttcgttagaagctgcttcagaccattgtggacatgatttgataccccatttctgggctcctaaaaggccctacgccttccccggctactctgaaaactagtctggggaaagcctcgcggacctgactgggcgcccccacccccacgcggccccaggctcacgcctttctcctcccacaggccctcagtctccgaggaggatctcaaggtcctgttttccagcaatgggggcgtcgtcaaaggattcaagttcttccagtgagtatgaggcgggctgtccctggctctccccaggctgccctgcggccggccctgaccccctgtcttgcaggaaggaccgcaagatggcactgatccagatgggctccgtggaggaggcggtccaggccctcattgacctgcacaaccacgacctcggggagaaccaccacctgcgggtctccttctccaagtccaccatctaggggcacaggcccccacggccgggccccctggcgacaacttccatcattccagagaaaagccactttaaaaacagctgaagtgaccttagcagaccagagattttatttttttaaagagaaatcagtttacctgtttttaaaaaaattaaatctagttcaccttgctcaccctgcggtgacagggacagctcaggctcttggtgactgtggcagcgggagttcccggccctccacacccggggccagaccctcggggccatgccttggtggggcctgtgtcgggcgtggggcctgcaggtgggcgccccgaccacgacttggcttccttgtgccttaaaaaacctgccttcctgcagccacacacccacccggggtgtcctggggacccaaggggtgggggggtcacaccagagagaggcagggggcctggccggctcctgcaggatcatgcagctggggcgcggcggccgcggctgcgacaccccaaccccagccctctaatcaagtcacgtgattctcccttcaccccgcccccagggccttcccttctgcccccaggcgggctccccgctgctccagctgcggagctggtcgacataatctctgtattatatactttgcagttgcagacgtctgtgcctagcaatatttccagttgaccaaatattctaatcttttttcatttatatgcaaaagaaatagttttaagtaactttttatagcaagatgatacaatggtatgagtgtaatctaaacttccttgtggtattaccttgtatgctgttacttttattttattccttgtaattaagtcacaggcaggacccagtttccagagagcaggcggggccgcccagtgggtcaggcacagggagccccggtcctatcttagagcccctgagcttcagggaaggggcgggcgtgtcgccgcctctggcatcgcctccggttgccttacaccacgccttcacctgcagtcgcctagaaaacttgctctcaaacttcagggttttttcttccttcaaattttggaccaaagtctcatttctgtgttttgcctgcctctgatgctgggacccggaaggcgggcgctcctcctgtcttctctgtgctctttctaccgcccccgcgtcctgtcccgggggctctcctaggatcccctttccgtaaaagcgtgtaacaagggtgtaaatatttataattttttatacctgttgtgagacccgaggggcggcggcgcggttttttatggtgacacaaatgtatattttgctaacagcaattccaggctcagtattgtgaccgcggagccacaggggaccccacgcacattccgttgccttacccgatggcttgtgacgcggagagaaccgattaaaaccgtttgagaaactcctcccttgtctagccctgtgttcgctgtggacgctgtagaggcaggttggccagtctgtacctggacttcgaataaatcttctgtatcctcgctccgttccgccttcgttgctggcttcctctttctgtgccgcgggcggccccgactcccgcccgggtgtccgccgaagcgccaggtggggccacgggcggggtgggcccggccctgagagtgggggtccctgcgtggggcgtgcgggccagagcgaatgaccaagagccggacctcggtttctgccgctttattgagcatccgcgcggccgcccgcgccctcggcccgccccccgcccgcccccggccccgccgcgctagtcggggaagcggcgcgcctgcatcttgcggaagtagccctcggcctccgcctccgcctcgcgctccgccagccccaggccgcccgcgtggcgccgcagcgtggactcccggctgcccgggcccagcgccccatcggccgcgcccagcgggggcagcccctcgcccgtggccaggttgacggtggccacggccccgaaccgcggctcctcctggtccacgtcgctgaccgacgagcc

SEQ ID NO: 90398 - DNA, 1047 bp, Homo sapiens
tcccagaagtctctgccctgttgggaggagctgcgtcttcacgcaggggctgtcaggcagcggatctgtgggtgcgaccatcccgcatggctttattggaattgtagatgaggagggatgggaatcccggctgagctggctaaggccgagcgagtgttagggtttgcatggctgcaggtctgaggtggcgccgtctccccactgtctgccccatcgggggtgagatggtgccggcccacaggtttccatgaaatcccagggcccaccttgggtcacgtgcccatcctggaaccaatgagtggccgaggcacgaagcgctcggattggccgggcctggtcttctgggcatgggagcagggcggcatgagacctgggaagggccctgggcaggttgcacaccaggccatgctggactcctgcggctgtctcagcctgtctttactccattgccttcctgttttcctgcccctgatttttcagttggcgacaaacagcccacaattctcaaatggcggatcctatcggccaccaacgatctggaccgtgtgtcggccgtggcgctgcccaagctgcccatctcgctcaccaacaccgacctcaaggtggccagcgacacacagttctaccctggcctcggtacggtggagccagcggcagccacgcggggcctcagttcacaccaggggagttgggccctgagcacaggccacggggtcgtgggagctcacaccagaggacgtgggctctgagcacaggccatggggctgtaggagctcagccttctgggttctgatgggttcccaattaggaggcagatctcatctttcgggatctgtgaggctggcagacagatccagtgttctttaatatgtaaagagtcattgcaaatcaacaagggagcctggggaacttggtggaactccttcctgggtaggcggcatgtgtcctctctgtgctgcagcagccataatgtggtcctgagctcaaaccgtggcatccgtgcccatgagtgagtctgcacactcttcagtgcctaccctatttgct

SEQ ID NO: 90399 - DNA, 1045 bp, Homo sapiens
cgaatcgggctggagcgttggttgacggaggcttgttggagacacgtgccccagttttctagacggtgtgtgtcactggtttttgaaaggtgcgtggtggctgtgcccgtcttctctccattgtttgagtaataggcactcataatacgtggtcattagagaaaactagaaaaccacagaaaattggaatcaaatcggggtgcaaaaaagccacctattatctgctgtggagaggctcccactgttcacatttcggagtcattttcttctaatctggttttaaagacacagttgtggcgcctcacaggcctgctctgttcctgcggggggacagcctgttccctgagctgtcgactcggctgacagcagttctgtgaccttcctggggtgggacacacaccggcttacctggagcctgcctggagtcatcgtcatcgtctgcaggctgtggtgccaggccgtgctgaccatgccccgtccccacagacctgacccgcatgatccacatcctggacacggagcacccctgggacctgcactcgatcccctcagagcaccacgaggccatcacctgcctggagtgggaccagtcaggtgaggcgctggtcccacgtggccaggggtggcgacccggatcccggagcaggggggccctgtgtttctccggtcagtctggagtccggcgctgggtctagagcccctggtctgcagctttgcacctgctgctctttccatagtggcccgaatcattcttgttcagggtgtctcagggcatctctggagtgcgccttgtgccacctgctgtgccctacctgggccgagacctctccactgggctggcttcccccaggcgctgtgccgtcctgcaacgcagtgctctgcccatccctggaaggttcgcaatgatggcttcttgccctcaggctcccggctcctgtcagcagatgccgacgggcagatcaagtgctggagcatggcggaccacctggctaatagctgggagagctcagtgggcagcctagtggagggggaccccattgtggcc

SEQ ID NO: 90400 - DNA, 1831 bp, Homo sapiens
tctgcagtgagggggagatggggaaggggaggccggtgggagctggaccactcaggacctgggtgcctcagagccacctctgcagggcagggagcctgaggggaggccggacactccgccaggcaggcgtgtgagtggccatgcggcctcaggcccagtgcgtttcagggtccccatccgcacagtggaatgagtgccagcggggagtgagatgggcccgaggagagtgctcctgtagggagccttaggtattcttgtgagccaggctcccggacctgcgggcttagggccagccaggccgcagtgaccagcacacaccagctggcggtgacctccctgggaagaagcgagggtggtgcaggtccgaggcacctctacctgccgcggctcccaaattcctcccgttcttgccccgctggtcccgtctgcaggtgctgacctggaggggaagcggcagatgaaggtcagtaatcggcacctggatttcctgccgccggggctgctcctgtccgcctacctggagcagcacagctgatggcggccccgcggagaccccgctgccacctcgcccagccatcaagccctccgataccttcggctaaaatatctttcatatttttagaatttgtcctcggaaacctttttcgcttggggtggtctctctcactctgccccctcctcacgcagctcttggcagtcaacagacgctggcggctggggctgcccatgccatcccagctccaagcttcccactccgggacttgtgtttgggtggggagacctgacctgggcatgttcctgtttcttcatcgttgagcttttctggcccggtctgaagctcaagtgaggagggggaggctgggtttttatcacttttaatgaatttggtgtgatttgttgtagatttttaaatttcccttttggagagaaaaaccaaaaaaactcgccccactggtaaaacatgggtcttggtcccagcccctgctcagcccctcccagtttttagcttgaatgagggtggggtctctgggaccctgcccctcatgccagaagcatcttgtgttgtatatgtgtgcgcgcgtgtgccctgagacccaggacagaagccacggtcctaagagccggttttatcctcgtcattctgcgtgtcctcccccacgccacctgtgtcggggctcagggtctcctgctttatatgagcccccttcctttcctcccctcctttatgctgggggtccaggacttccagccagaagcctctgcccttgcactaccttgtctgtcaccccatcccgtgtcccctcgtcccccagcctgactcctgcctgatagctcctgtgtccccatgctggtcctcctggcccaggctgcaggagccaggctggggggcctccgcacccccttgctgcgtgtgggtaattgtgttttgggggaaagtggggaatttaataaatttctggtgctctggcctcgggctatgtgtgtttttcttcggggcagggccgggggcttagtaggtcctggccaccaagggctgcaggtgcccccctggctcctctgcccttggttgcctggattcaaaccctggctctgccacatgcctgccgtgtgaccttgggtgaggagcttgtaggagtgccttggggcccctgtagaccttgagtgagtggcttgtacgagtgccttggggcccctgtaatggagggtctcacacagggggcttgaaacgacagaaggccagtgcagtagctcatgcctgtgatcccagcaccttgggaggccaaggcaggaggatcgcttgagcccaggagtttgaaaccaaccagggcaa

SEQ ID NO: 90401 - DNA, 1047 bp, Homo sapiens
tccgtgtctcctcgcctccctgggctggattcctggctcagtccgcagcccggatcgggacgcagggttgtggttgagttttcgacccctcgcctaggtgtccctccttcccggagctagatttctgggtgtagggatcgtggccggccccgcctcccgcctcagtctccccgttcgtccccccaggggctggatcccggccccgcctgcctcggtttccccgttcgttccctgatggctggatcccggccccgcctgcctcggtttccccgttcgttccctgttggctggatccccgccccgcgcgcctcggtttccccgttcgtccccccaggggctggatcccctccccgcgcgcctgggtttccgcgttcgttcccggcagccgggaggtgggcgcccccgccccgccgcgcagccccaggccccgcccctgcccgcctccgggcgcccgtcacttcctgcccggcccggtgaaggccctgccgggcggcggcggcggcgacagcgtgcgagccatggtcgcgctggagaaccccgagtgcggcccggaggcggcggagggcaccccgggcgggcggcggctgctgtgagcgcgggcgggcggggcgcggcgggcgccgggggcgggctgggctccctcccctgagatcctctccccgcctcccctcccctcctttcccttccctcccctcgttcccttcgttcccctcgctcccgttgctcatcttccggggcttcagcctgtcctgccttcccttctcgcccgctgtggacccccaggctgggtggggggtcttcattgttactcagcggggacaccctcctggcgctccgggggctcgctgggggaggggacccggatccacgtccccatttacctgttccgccccctactccccggtccgccccctaatccccggtccgcgccccactccccggtccgcccccccactgcactggtccgcgcctccattcccgggtccaccccctcactctccgggtccgccccccaactcctcggtccgtgcccccactctccggtcc

SEQ ID NO: 90402 - DNA, 1055 bp, Homo sapiens
gcacctctcgcagacccagggaggggaccccttgtcctgcccccggggacacctggccagggggctggagggggtggcctgcgggttcctggaaccgagccatccctccctccgtccctccccagtcgtctcaaaatccaatccattttactggctggcacttggcattttattcatttcatggaggatttttttcctacctctccaacgctggctccaaaaggagatgacgtttggggtgtgtgtgtgtgtgtgtgtgtgtgtgtgtgtgtgtgtgagaaaatcgccggagtgtagatccattaattagagctgaatgttcccaacacagcggctgttctgctgccccgcgggatctggggagacaccgtcgggaggacaggatgaggaatgcctgggcagggaggaggtcctctgctagatggatagacggatgcagccgcccccatctatcaggcgcctgtgggatgccagggccccagaaggcaccccccgaggcccagaggacataggcaggcttggggactggtagacagcggggagctatggaaggctctagagcactggaggaggggcatgtgagcaagcatccttgtctgggccgttgctcaagccacaagcaattatagagtgcctactgtgtgccagcaaccaaaccagacccaccccaaccctcccagagctgagttgaagagatggtcactaaataagaaggaaatgaacaaaaagatggtaggccgttatggaaatgtgtggaggttgggggtgggtagcagcaggactgaaatggggcagggagtggtgctttctgcattttctcagtggcaagcagggaacgtttttcagggcagggcatttgggactgggttttgaagggtgaagaggagttctgtggcccaagttgcctgcccactgctggagggcagatctactctataggtttccatcagacatgcctgtctcagtttccccagggtgcactggatgttagaacacacccctgggctggcctggttagaaactgacagctccctggatgtgcgagacaagcaaga

SEQ ID NO: 90403 - DNA, 1024 bp, Homo sapiens
gcagcgccaggcggaagaaggcgtgctcgcccagcgagctgagcagagcgctgcccaggcccaggcacagcaacacgaagaggcccgcgaagtggtagatgctcatctgcagggtctgggggcaacacagcaggagccccgcacggtcacgtaatggcaggcccctggggagccttgaactaggggagaacaggttgggccagagagaggggcttggggcagtggagccaggttgggaggcagggactccatggctggggggagtgaggtttcatggaggaaggggcactgcagccggggttttgtagggtgaatagaagtgcgcagaagcagacaaacgcacgtctggggaatgagcactggggttggtcacttcagacaaggctcagggccccccacgcccacccccacccccaccctctgtcccaggccctgccccacctctgtaaccgcaaagacccgcttgccgcaaggcaccatcttgtaccacttgtcgtggagcaggtcgatgaagccggaggacttgtagcggctgatgaactcggacaggttggaggtgagcggcgagttctggggcagtccgatcccatagcctgggggcgcggggccaggcggtggggccaggtgggacagccccaggggaactctgcccgcacacgtgggatttcgccccttcccacctcgaaccctccgtggctccccactgcccccaggaggtccccagagaccccggcgccccgcctcgcccaggtgcctctcaccctcaatggcgaagggctttcccacggtcagcagtttgcagtcggcgtcgatggagacctcgtagtccaggagcgacttgtccatgatgaaggcgttgagcttgggggggtcgctcctgctggggccgggggcgggggtcagccatcgccccgcccaccccacgccccgcccccgcctcaccccgcgcccgggctcacgtgagcatggcgacgccgcggggcgtggtgggcgcgctgtggcgccgcatgtgtgcgtgcatgtc

SEQ ID NO: 90404 - DNA, 1032 bp, Homo sapiens
aggggtagggggctgccagagggaggggcgctggaggcgggggtggtggctgcgccacgcgggaaccccaggggctgggcctggcagggtgggacctgcagccccgacgccctcaccccgccccgcaggttcttctatctctaccacttcgccttctatgcctatcactaccgcttcaatgggcagtatagcagcctggccctggtcacctcctggctcttcatccaggtgaggcctgggcggcaagcagggggcaggccagccgtgcctttccaggcaggagaggctgcagccggggaggatgccctgtggggtcggcccaagcgggcagaggtagcgtggatggtcccgggtgggctgccctctgggagcagcggctgggtggggcaggggcgggcccgtcctgactcccactctccctcccgcagcattccatgatctacttcttccaccactacgagctgcctgccatcctgcagcaggtccgcatccaggagatgctgcttcaggcgccgccactgggccccgggacccccacggcgctgcccgatgacatgaacaacaactcgggcgccccggctacagcccctgactctgccggccagccccccgccctgggccccgtctcgcctggggccagcgggagtcccgggcctgtggcagcggcgcccagctccctggtggccgcggcagcctcagtggcagcagctgccggtggtgacctgggttggatggcagagaccgctgccatcatcacagacgcctccttcctgtccggcctgagcgcctccctcctggagcggcgtccagccagcccgctgggccctgctgggggcctcccccacgccccccaggacagtgtccccccgagtgactccgcagcttctgacacaactcccctgggggctgcggtaggcgggcctagcccggcctccatggccccaacggaggcgccctcggaggtggggtcctgagccgcacagctgagccgcctctgacccctgctggctgggcctgaccttcccgagcccg

SEQ ID NO: 90405 - DNA, 1034 bp, Homo sapiens
catgctgctgcttgcagggcgggagccgttggctggcagagggccctggtgtgctccacttggtgggtctgagtccagcctcgtctcctcccaggtttggggggtcctgtgtgcatctgagagggccccggcctgctggcttcgtccggctcacccctgaggaggtgcggggcagtcacaggccttgccgaagccccagggcctgtcagagccgggctgcaggtggcagagcccctccggggttggagtggggcgtcccccggatcctcagtcacttggactatgtgaggggctggcccggtgcagtcagcgtgggagggacccagggtcctcagagcccaattcggcttctggggtttccttcctttccccgtcctgggcgtcccagcgcgccccatcacgccccatcacgtaggcccttgggtgtcggctgcagctggccctggggcgccccactgactgccggccgccccctaggccctgtttgtgctcttcgtcctggcctacatccacatcgtcttctcccgctcgcccatcaactgcctggagcatgtgcgtgacaagtggccgcgtgagggcatcctgcgtgtggaagtgcggcacaactcgagccgcgcgcccgtcttcctacagttctgtgacagcggcggccgcgggagcttcccgggcctggccgtggaaccaggcagcaacctggacatggaagatgaggaggaggaagagctgaccatggagatgtttgggaacagctccatcaaggtgagccaggcctgggctcagctgcagcagaggccagcgccccgtagatgctggtcgctgaaggggcggttcctgacatcgacaggatgttggggttcttgactttcagggacctggcatgcagacaaggccgcccctgcctgccgtggccttttggtggcctgggggctctgaagcaagaccctcggcctgtcgccctgctagaggcctgggcagggcagggggatctcggggaggacttgggctgggcagactcgggcctttgagagtagctg

SEQ ID NO: 90406 - DNA, 1415 bp, Homo sapiens
tatgcaaaagaggtggcccagatgcaggcccgccccctggagcggccgaggtagggggtgaggcctccgcgggcgccgctggcatcccagcgttctctgcgggcgcaggggggccgctcttgcccggcgtggcgactcgctagcgtcagcagcgccgcagccggacgagaaagcggaagatggcggcggcggccgggaggccgtgaggagagcggcggctgcgagggcggccgatggcggccgggaggcgccctcggacacttgcgggtcgttagggcgcgacgctgggaggcatgtcggagcacgtggagcccgcagctccggggcccgggcccaacggcggcggcggcggcccggcccccgcgcgcgggcctcgcacccccaatctcaaccccaaccccctcatcaacgtgcgcgaccggctcttccacgcgctgttcttcaagatggctgtcacctattcgcggctcttcccgcccgccttccgccgtctcttcgagttcttcgtgctgctcaaggtgaccgcggccccgacccccgacccttgaccccagcggctgtcccgacccccaagtctgctacctccgaccgcgacccctggccccgctggggacagcgagcgccaccctgcaccctgaggcctatacccggccctaccgattagggctctccctcgcgacctctgaccctgggattggccagggacaccgtctcgtgaccccatcccgcccggggacgtccacccgggaaggccggatcccgctgcactagaagccgctgttctctactctggaaacctcactgtcagctccctccagggcccatcctgtccccggcgaccgcctttcccaggtccccacctacccaggcttggagtccggtcctggcctgcgaggtagcacctcccgccctttgacccctgactgtgccgcctgagaccctcagttccgaggcctctctcccctcccaatgtgctggcccagaacccagcctgacgcaggtctccctcggaccaacccctgtcctggaagtcgactccccactcccctctctccctccttgtagcctttcagctgcgttccccgctcctgagcctcaggggaatgtgacttagctgaggtcacctcgctagggttagcggcaaagtcaccggcagcagcgtaccaccccatccccggcctcttcctccgctgggtccccactcccttcctgcttcaggagctcaggttgtgggtctgtcgcccgtgcctcccctatgaggcaccggcctccgcgtcttgggctctgtccccctcccgccctcctcagatggcagaggtctcagccgtgcaggacaggcatcggcctgactccctctgagaaggagtcttgcttgggtgacaagaggggctcagtagcagctgcagcccctcaga

SEQ ID NO: 90407 - DNA, 1052 bp, Homo sapiens
gcctgggcgacagagtgagactctgtctcaaaaaaaataaaaaagaaaaaagagctgatggttgcacaacattgcagacgtacgaaatgctgtgaaatggtgcggtttcaggtggttgaagtggtaaacgtcaggtgtgatatagcggggaggtgagaaggcagggcggggaggcagatccggccaggtttgtcctgcaccgggagtggattagagctgatgtttatcagtgagttctaagccggttgtcggcctgcttggagggcggtttatctgtgcccgcctgcagtggctggggcgcccccaatgatgggaaaagggagcatctgcgtgggtgtggtgaggggggacctccaggccgctctatctgctgttgccctggagtccccggccccaccctctgcagagcttctgtggggttcctgctgggggtgcccccagcccagctcagtctcgtgccctttgctccaccagctcctgtccaaatatgacccccagaaggaggcagagctccgcacctggatcgagggactcaccggcctctccatcggccccgacttccagaagggcctgaaggatggaactatcttatgcacgtgagtacacgcagggacacaggctgtctcacacttaacaaatcttggtttttctcactttttttcttaattaagaaatttttggggggccgggcatggcctggctcatgcctgtaatcccagcacttttggaggccgagggtggtggcggggggcggtggatctcgaggtcaggagttcgagaccagcctggccaacatggtgaaaccccgtctgtactaataatacaaaaaaattagccaggcacctgtaatcccagctactcaggaggctgaggaaggagaattgcttgaacccgggaggcggaggttgcagtgagccgagatcacaccattgcactccagccggggtgacacagcgagactccatctcaaaaaaaaaaaaaaaaaaaaaaaaaagttagctgggcgtggtggctaaataaataattttttttttttgaggtggagtctcact

SEQ ID NO: 90408 - DNA, 1045 bp, Homo sapiens
ggagggcaggtcccatcctagtgttcccaccctggtgttcccagggggaggcgggcccggccctagtaagagcctgggatttgtagagatctcaggagggagccggccgtgggcctacgaggggaaaacatggcccagccccgaggtccagggggaggagcggagtggtctaggaggcaggcggaccccagcgcctaggactcacccccgcatcccacagtgcctgtccttggacaagctggaggcggcaccctcagaggcagccctggtgtcgcgggccctgcaactgctcgcggaacatcgattctgggccggcgtcgtcttcttgggacctgaggactcttcagaccccacagagcacccaaccccagacctgggccccggccacgtgcgcatcaaaatccgcatggacattgacgtggtcacgaggaccaataagatcagggacaggtcaggcgagggagggggcggggggatgagggactgggcggggccaagagcgtggtgggtggggccaggcagcattcagcctattggagaccatgatagacaggatctgggctgtatcaacagtggtatggtagccagagcccggggctccttagaccaataggggcccgtgatgggcggggcctaggtgcatgaggggcgtggccatgggcctgagataagatgagagcaggtataggttgagggcaatggtgggcggagccaggtgtattattaggtccctggaataagggtggagctaaaattgcaccgggtgctgagcgcagtagatcttgcctgttatctcagaactttgggaggccaaagtgggagaatctcttgaggacaggtattcgagactagcctgggcaacatagtgagaccgcctcccccccgcccccctcccccaccaacctcacgaaaatatctttaaaaattagccaggtgaggccgggcacagtggctcacgcctgtaatcccagcactttgggaggctgaggcgggcggatcacgaggtcaggagatcaagaccatcctgactaactcggtgaaaccc

SEQ ID NO: 90409 - DNA, 1090 bp, Homo sapiens
gaatggagatttttattcctctcagggcttctcagtctgagtggttactccagtgactcctattgtcccttcagctggtcgatcacaccgctcatgtacccagcctccttcttcttctccgtgcccagcacagcctatgtggtgctcacctgcataaacctctttattggcatcaatggaagcatggccacctttgtgcttgagctcttctctgatcaggtggggcaccacgaggctggggcttgggctgggttgggtcgttggactcagcccctgaccaacatccgtctcccacccttgagcagaagctgcaggaggtgagccggatcttgaaacaggtcttccttatcttcccccacttctgcttgggccgggggctcattgacatggtgcggaaccaggccatggctgatgcctttgagcgcttgggtgagaacttcctgtcaggtggggccatggctacagatagctagcacccttggagacctagagttaattatacagagtggagaaaaacagccccccagggagacagccagggttcttaggtggccctaaggttgggccaagttggaggtacaagaaagcagccataaaaagctaattcttagattacatcacaagaggcctcttctgttttctatgccaattagactccagctgagtggcctatccaatttgtgttcctttcccttaagaatccagagtgacatggatggagaaagggccagaaaccaagactctcatggacccagtccctcctttctatatccacaggagacaggcagttccagtcacccctgcgctgggaggtggtcggcaagaacctcttggccatggtgatacaggggcccctcttccttctcttcacactactgctgcagcaccgaagccaactcctgccacagttagtgaggtctatggagagggtggcaggggccaaggacctactttaagcccacagatattctgtccccaggcccagggtgaggtctctgccactcctgggagaggaggacgaggatgtagcccgtgaacgggagcgggtggtccaaggagccacccagggggatgtgttggtgctgaggaa

SEQ ID NO: 90410 - DNA, 1166 bp, Homo sapiens
gagctgcgggcgtggcccgggtaggaggggcagggctcacgctgggctgggaaaggggactgacgccgctctgggtggaacccgagctcggtggggtgtggccagtgctctgtgggggtggggctgaggctgggggcgtggcaggcacacgtgggggctgggccaggcccaccaacacctgctgacccttgactctgcgcagcttcccgagccgctcatctccttccgcctctaccacgagctcgtagggctggccaaggacagcctgaaggcagaggccgaggccaaggcggcgtcccggggccggcaggacggctcggagagcgaggcagtggcggtggccctggcaggtcggctgcgggagctcctgcgggacctgccgcctgagaaccgggcctcgctgcagtacctgctgcgtcacctacgcaggtgagtcccggcatatggagtggagggcgcggggtcccgggagccgctcagcacctggcccctgcccaccccgcaggatcgtggaggtggagcaggacaacaagatgacccccgggaacctgggcatcgtgttcgggcccacgctgcttcggccacggcccaccgaggccaccgtgtccctctcctccctggtggattatccccatcaggcccgcgtcatcgagactctcatcgtccactacggcctggtcttcgaggaggagccggaggagacccccgggggccaggtgagggtgtgggcctgaccggggctggccactcggggcttggggagcagggggcgctgctggggacagtcgttgtcggatgaagcccaaggaaccacagggagataatttggtttggacagggctgttcgggaggccactgtctttttgtgtcttttatgcaaaaaactcagcgaggtctgcattgaatctggcagaggtgcaaaggctctgcggccgcccctccactctcccttggggctggccttgggcctcacccttcacccccagcttccttccccgtttcccatcccggtgctgcctgcagccacaagctccacgctggcccggtgtccacagcctgcccgagctgccactgcactccgccgcgaggtcaattccccgcttcagattttcttttctgggagttgtagtttcgctcctgctgcccaggctgaagtgcaatggggc

SEQ ID NO: 90411 - DNA, 1174 bp, Homo sapiens
ggtgaaaccccgtctctactaaaaatacaaaaaaattagccaggcgtggtggcgagcgcctgtagtcccagctactcggggagccgagattgtgccactgcactccagcctgggagacagagcaagactccatctcaaaaaaaaaaaaaaaaaaaaaaatgcagatcccgggcccaccccagcctgtagaatcgggactgctgggagtgtggagggaccctagtgctgggacaggaggagtcccagcaggaggtggctgtgcccagcccgtctgcctcagaagccccaggagctgtgactccgtcccccgcctgtggagccagggtggggtgggtgggctccctgagtgccggggatcggggtggggttcagggctcttgtccgtctgaaggcgcaggggctgtggtggcacctgggagccacgtggggtctcaccagcccttggtgatgcctggtggcttcctctctcggcagctagtccctgagcacgtcgtcatgaccaaggaggaggtgacagagctgctggcccgatagtatcctttccagccccaccggccccgcccctccctgtccctcgagacttccgcgttccccccccacacacacccctgcccccccaacggccctgtctggcattttcctgacggtgcttcgcagtaagctccgagagaaccagctgcccaggatccaggcgggggaccctgtggcgcgctactttgggataaagcgtgggcaggtgagccctgtggggagaaggggccctggggctgctctgagctgaccactcggagaagggggcttctgtccctccccgacagcccctcccccttgatccagggcctggaggggacctcgagaccacacccccaatatccccctcttaaagccagggccactgggcccagagaagagcgtgacccaggttcccagggagcgggtcccacagcccagggtcagccatctcggacccctgccggccatccccagcccgtgtgctgcccgcctgctgtctggtgactgcagtgagacccctcaagcattcgcagcccctgctctctgtctctgcaggtggtgaagatcatccggcccagtgagacggctggcaggtacatcacctaccggctggtgcagtagctaccgcctgacaggtgagacggccgagggacaggcactg

SEQ ID NO: 90412 - DNA, 1092 bp, Homo sapiens
ctaaagtagggacactttattgccattgcacaggtagggaaactgaggcccaagggaattaaccctgacctggccaggagccaatggaggaaaccctgtacagtttgatgcacaaatatttatagagttcccactaggctcccagaccatccctaggagccgagctgccccttgaccccatccaggcctcagtttccccgctcacacttcgcccccgcctcgtgggattctaaactgttgctccaaggtgggagttgaacggaaactacaactcccgagaggctgtgcggccaaagacacacgagaactacggaggcgagagactcgctcagccaactgccgctctcgtaaggctcgggctgcccttggcgctgccgatccgagacgttgctgcattcaggcattcgccgacgacagaccagcgcggggcggggttaggcggagggggcctgattcggattcggcgcaggcgcagtccgcgcgggttctcgcgcggagaaggggtgcgagcggcggcggcggcggaggctgccatggacgacgaggaggagacgtaccggctctggaaaatccgcaagaccatcatgcaggtgagccgcgcctggtgttgggggcgggggcgcgggcggcgggtgtaggggcccgaggtggggtcgagcacggcgtctcctcgtactctcgtcggagcagcagcgatgaagggccgggccgatacgggaggcccagaggtcgccggggataccaggcgctggacccgacctgagccggcagcggggaagggagggggtttcgagacgtctgggtgcggtgcttaggggtgggtgggcggcttgggctggtgcggcgcgcgtggcggcgagaggaggaggaagccgcgaatggggacggggggcgcccccagactctgcccttctctgtgattcagcgtcgctatttgtccttgcgtcctgaaccccatggagtcttcagcatccgaggctggcagagttggtggttgggaagcagcgggcgagctggggctttcgatggggacgtggagctcggaacccgtgccttggggtctggggcagatggaggccactgggtcgagtc

SEQ ID NO: 90413 - DNA, 3505 bp, Homo sapiens
ccctgatcgtgccactgcacgttagcctgggcaacacagcaagaccccgtgtcttaaaaaaaaaaaggtaaataagagttggggacacttttctgcgagttggagaaaccaaaccccctcgacgagtcttaagtagtattctcaggttgtctggcctgcggccgcgctgctgtcaaccagccggataactgcgctgcctcccgacgcgccgccagccaggccacggcctcctagacacaagcgagcatgcgcagtcgccaacaacaagtccgcacgtccggtcccgcccccccttccccgccttcttcccactccggcctcccattggctgacgtcggcgcgagcgctcaacaccgacgcgtctgaccaatgagcgctctggagggcgtggccgtgggaaaggaggcgcggaaagccgacgcgcgtccattggtcggctggacgaggggaggagccgctggctcccagccccgccgcgatgagcctcggccgcctttgccgcctactgaagccggcgctgctctgtggggctctggccgcgcctggcctggccgggaccatggtgagctagcgccgcggccgttgccggcccggtgaccgttggggcgggcgcgcgatccctgcctccgctcgccggcgtggggaaccctcaggctccagtgaccttggtggggggcgtctgggggctccccctccccacccccggccgggcacggacgcgggtgaccgtactgcgacgcgctccgcggccctccaggccgttgtaggcgcgcgggctggggtcggggaaggggaaggggttgttccacgcgcgcgggtcgtggtcggggaaggggccgtccaggccgttgcaggcgcgcgtgccggggccggggtcgggggtccaggcttgcagggggcggggtccgggacggctggggcggagctggaccgttgagggccacggcggggcgtctccgggccgagcggggctgctgcgcccgagcggttgggggcgcggagggctggaaatcccggatcacgcgcccccgggcgccgccccgcccccgcaccttggcctagcgcggtggcgtcacagtcgcgcagtcctgactacggcctccgggccctttgtccccgctagcggcgctcggggtgggggagccaggaggggcgggagacgggcgggtatgggccgcgcgggcgcaggctcccccgggcgccgcaggcagcggtgccagagccggggcaggcggcggccgcgagcccctcggcggcggaaggccccagcgtgcaggcgcaggagggcgcggcgccggcggaagaagccctgtccccgcagcttgcgaccggagatccacgaatgtcccaagtcccaggacccggtgcgcgcggggcccccacaccggctaatgtggcacattttggggttggaaccctctcccggcctccgggtctccggtaaaaccggaccagaagtacaagggggcgtgtgcgtttaaggaggaggagcgttcaggtcttcagggccgcagggcctcggtgtccccgccaccgacccgctcccgatcccttcctgcctcagggtcccgggctcagcctcccgtccacgctccctgctcagcttcctttgccttgcagtgcgcgtcccgggacgactggcgctgtgcgcgctccatgcacgagttttccgccaaggacatcgacgggcacatggttaacctggacaagtaccggtgggcgctcgcctggggtggggcgcggggtcgggccctgggagggggccgtgttcttctgcgctgacgccgccgatcctcgcaggggcttcgtgtgcatcgtcaccaacgtggcctcccagtgaggcaagaccgaagtaaactacactcagctcgtcgacctgcacgcccgatacgctgagtgtggtttgcggatcctggccttcccgtgtaaccagttcgggaagcaggtgggctgctgcgtccccggggcccgcagaggcgggtgggtgggggtcggggtgggctccagcctggagagggcctgggagtgtgcagggggcccggactgagggggtgccagcccccgactcactcacacaccttggccgccacaggagccagggagtaacgaagagatcaaagagttcgccgcgggctacaacgtcaaattcgatatgttcagcaagatctgcgtgaacggggacgacgcccacccgctgtggaagtggatgaagatccaacccaagggcaagggcatcctgggaaagtgcgtgacctctggggacagtacggctgctggggtgggggtgggggggctgctgggatgctcacacctccctggggcagaatggctcatggctcggggggcggttgcggggaggtgctgggactctcacatcgcgtggcctcctgggggtaagatggctcagggggacatagagggctgtggaggcagccagggatgcccacacctttgtggcctcctggggacaggatggctcgggggcctgtggggggctgttgggactctcacactgcatggcctcctggggtaagatggctctgggggggcttgggggcactgtggctgtggaggcagccggggaagctcacacccttgtggcctcctggagacaggacagcttggggactgtggggggctgctggggacgctcacgtccatgtgcttcttttccagtgccatcaagtggaacttcaccaaggtaagggggctgtggggggtaggggaccagcttcccctggccacagccgtggcccagatgggcagcggacaggaagggcagcctcagccccttgcaggggtggccccacagtttggacaccgtctctccacagttcctcatcgacaagaacggctgcgtggtgaagcgctacggacccatggaggagcccctggtaggtcctctctagggagcccgcttgaggctcgggggcttgggaggtagctgccctaacccagctttcctccccgacaggtgatagagaaggacctgccccactatttctagctccacaagtgtgtggccccgcccgagcccctgcccacgcccttggagccttccaccggcactcatgacggcctgcctgcaaacctgctggtggggcagacccgaaaatccagcgtgcaccccgccggaggaaggtcccatggcctgctgggcttggctcggcgcccccacccctggctaccttgtgggaataaacagacaaattagcctgctggatctttctgcgtaggggcttggggggcccttttgccaggggcccctccatgtcagggccagttgccgtcagctgccaggctgggggtgccatggaggtggcgtgttgttgccccctcttcctccaggctcggggggctgtgctggctgcagtgctggggtgcagtgagatctgggcccgttggacacccagccctggctcttaatccgtgcagccccacctgctgtgcacaggcagggcctggtgtagtgccgagtcttggaggagataattctaagtggctg

SEQ ID NO: 90414 - DNA, 1039 bp, Homo sapiens
tgagcgtccccagcagccccccacagtccccaagctgtcctgtctccaggaggccacaagggtgtgagcttccccggctgcctccacagccacagtgcccccaagcccccccagagccatcttaccccaggaggccatgcagtgtgagagtcccaacagccccccacaggcccccgagccatcctgtccccaggaggccacaaaggtgtgggcatccctggctgcctccacagccctctatgtccccctgagccatcttacccccaggaggccacgcgatgtgagagtcccagcacctccccgcaaccgccccccgagccatgagccattctgccccagggaggtgtgagcatcccagcagcccccccacccccaccccagcagccgtactgtccccagaggtcacgcactttcccaggatgcccttgcccttgggttggatcttcatccacttccacagcgggtgggcgtcgtccccgttcacgcagatcttgctgaacatatcgaatttgacgttgtagcccgcggcgaactctttgatctcttcgttactccctggctcctgtggcggccaaggtgtgtgagtgagtcgggggctggcaccccctcagtccgggccccctgcacactcccaggccctctccaggctggagcccaccccgacccccacccacccgcctctgcgggccccggggacgcagcagcccacctgcttcccgaactggttacacgggaaggccaggatccgcaaaccacactcagcgtatcgggcgtgcaggtcgacgagctgagtgtagtttacttcggtcttgcctcactgggaggccacgttggtgacgatgcacacgaagcccctgcgaggatcggcggcgtcagcgcagaagaacacggccccctcccagggcccgaccccgcgccccaccccaggcgagcgcccaccggtacttgtccaggttaaccatgtgcccgtcgatgtccttggcggaaaactcgtgcatggagcgcgcacagcgccagtcgtcccgggacgcgcactgca

SEQ ID NO: 90415 - DNA, 1110 bp, Homo sapiens
gagcagggccaaggtcccctgaccactgctcagaggagccctaggccctggccgcagtgccttcagcgcccgacccgggcccccacctggtcagccctggcggggcccactcaggacagctgggggccggggcgtggcagggccctctctgtgcctctcctcccaagtaggaaggggctccgggtggctgctctgggactgggcacccacaagggctcagtgggcccaaacccttgaaatccgtgaaaccgggtggtcccaagagctagaaactcaggaaaccccaggtgctcagggccccgcgtctcgggggctccgtggggcagacccctgctaatatatgcaattctccctcccccagcccttccctgacccctaagttattgcccgctcacctctcccaggccccaggccgcggagctggcagggtggcgcctgcggtttctatgtatttatagcaagttctgatgtacatatgtaaaggacttttttaaatatatgtgccttttgcctacttcccacggagtctgctcctcagcctgtgggacagggagggaagggcaggggtgtgtgggcatccccccaggctctcctggttaccaggcctttctgcccactgcctgtgctggccccatgtggatgagaggggacgagggctgggagagacagacctctcaacccagtgtctggggcaggtgccatggaccgtccattccacagacccccagtgggggcagctgggatcagccaccctggcaggctgcagtccctctagctgtgcaggtgggcagccaggccgtgtccagacagcccccgggtcccatgaacggtggctggtactgctctaccagcccctcctggcctgtccatccccagccctcacggagggactctgtgcaaacagtaaccacccagccacccccacaccccccagccaggtgaggccccaagggccggtgtgggtgcccaacccatccccagcaccagggccacgctgttcctcgggcctctgcacttctgcttcctggccaggggaggccccagtagccacctcctaacagttaaggcccggggccaggaagcacagccacttagaattatctcctccaa

SEQ ID NO: 90416 - DNA, 1049 bp, Homo sapiens
cgtgtcccggccccttctttccccctagctcgtggccatcatctcggaggcctccagctcgggtgtctccctccaagccgaccgccgtgtccagaaccagcggcgccgcgtgcacatgaccttggagctgccgtggagcgccgaccgcgccatccagcagttcggtgagtccggccccgcccccagcgctgcctggccccgcccccaacatggtctcggccccgcccccgcctggccgggccctgagagcagctctgcccccaggccgcacccaccggtccaaccaggtctccgcgccagagtatgtcttcctcatctcggagctggccggggagcgccggttcgcctccatcgtggccaagcgcctggagagtctggtgagcaggtgggggtggggctgagaaccagggacaggcccaggaaggctctccaaagctttgtggggtgctagaggccagaccccaggtgaccaactgatggcctccccacccctggcagggggccctgacccacggagaccgccgcgccacggagtcccgtgacctcagcaagtacaactttgagaacaaggtactgcagggaaggcagggttggggggcggggcaggggcaggggtctagggagggccggatctaagagcctgggggagggggtagatgggggctggagaacgtggggctcagtggtctggaggagggccgggtctaggacccccaggggggaagggggcttctaggggctcagggaggtggcatccaggggtctgggggaggacccagtctaggacccccggggaggaggtggctgagagctgggggaggtggggtctaggagtctaggggagggcagggtccaggggcctaggggagggtggggttctggggaggcaggggtccagggaaagccagcctcctccctgggcctcctccccgagtcaccttctccccctagtatggcacccgggccctgcactgtgtcctcaccaccatcctgagccagactgagaacaaagtgcctgtgccccagggataccctggaggggtccccac

SEQ ID NO: 90417 - DNA, 1067 bp, Homo sapiens
ggtcaggattccagtccaggctgagcagccacctctgggtcaggattccagcctgaggctcccccggcctcctggcggtcaccacccaccccaggttgtagccctcagtccagcccacctgagcccagctgctgctatggtgcccactttacagatgggggaaactgaggcccagagaggggaggtcaggggttataccactggtcagaggcagagctggggcttggggctgggcagtccctacccctgtggaggcagtgaggtcacagtgtttggtccgcgacaggaggcttagtctcgccccagctggtctcagggagacaagtgcagaaaagcagtcctgggccacggtgccgggcttccccgccaccctgccgtccctcagggttgccccgggccccttgtccttgccctccaggggccagccttgagttaggtgggccctagaaggcagccaacatgtcctgccctgaccctccacctcctccctaggacccctgtgcctcctgcagagagacccgcatggccccggggtcctggagcgggtggagcggctgaagcaggatctgctggacaaagtgcggcggctgggccgggaactgccagtcaacaccctggacgagctcatcgaccagctgggcggcccccagcgggtggcggaggtgggtgggacgtggcagctggagtgtggtgggcggggcatgggcagtgggtggggcttcacgcaggctgtgtgcagctctggtggcccctgctggtcactctgcgtctccgcggccctgcgaggagggggcgtttggggagccctggggcagcagcgtgctgtccagctcggcccgggaggccacgacctcctgtggacggcctgccccatccctctaagccccagatcccccagcctggcctgcgcaggcctctgcttagatcgttgcctgaacgcaccccttggggtgcccagggccaggacacaagcccctgggcctggttctgcggcctcctactccctgcccccgcccagcttcactttttcacttcgtggcgccggctggctgataataccaggcctt

SEQ ID NO: 90418 - DNA, 1359 bp, Homo sapiens
caccttgggggtcgcgggccggctcggggggcgcccagtgcgggccctcgcgggcgccgggcagcgaccagccctgagcggagctgttggccgcggcgggaggcctcccggacgcccccagccccccgaacgctcgcccgggccggcgggagtcggcgccccccgggaggtccgctcggtcgtccgcggcggagcgtttgctcctgggacaggcggtgggaccggggcgtcgccggagacgcccccagcgaagttgggctctccaggtgtgggggtcccggggggtagcgacgtcgcggacccggcctgtgggatgggcggcccggagaagactgcgctcggccgtgttcatacttgtccgtgggcctgaggtccccggaggatgacctagcactgaaaagccccggccggcctccccagggtccccgaggacgaagttgaccctgaccgggccgtctcccagttctgaggcccgggtcccactggaactcgcgtctgagccgccgtcccggacccccggtgcccgccggtccgcagaccctgcaccgggcttggactcgcagccgggactgacgtgtagaacaatcgtttctgttggaagaagggtttttcccttccttttggggtttttgttgccttttttttttcttttttctttgtaaaattttggagaagggaagtcggaacacaaggaaggaccgctcacccgcggactcagggctggcggcgggactccaggaccctgggtccagcatggaggtggtggacccgcagcagctgggcatgttcacggagggcgagctgatgtcggtgggtatggacacgttcatccaccgcatcgactccaccgaggtcatctaccagccgcgccgcaagcgggccaagctcatcggcaagtacctgatgggggacctgctgggggaaggctcttacggcaaggtgaaggaggtgctggactcggagacgctgtgcaggagggccgtcaagatcctcaagaagaagaagttgcgaaggatccccaacggggaggccaacgtgaagaagtaagtatggcttgctggggtcggggccgggccgggccagtcacggtgctgatggttctgtcttccttccttctctcctccctccctcccttacttcctcttaacaccctgagctggacccgtctggcgcctgtgtcctccgtgccagggagagcgtggttgggggcctgcgttacggactttcactcaggcaaggccagttgtcgcagcggggcgtgcgtttgcatgggctcttggactccagttaaaatgccctggtagcgaaaccctcctgagaagggagcggcccccaatcccctaagactagccccttggc

SEQ ID NO: 90419 - DNA, 1122 bp, Homo sapiens
ccagcccctggaggcccttgagccgtctgctggagcccctccgagccccgaggccacccactgagaccggctctgggagtgggagtgtccggacccctgaggcgctggtgctgattgtgccttgggggtctctgcacagctcgggtcatctgggcgcctggcggggactggggctgccccccgatagcctcctgggctgggatgtgctcagggccccccagacccccttctggcctttgctggctttgcagccagcatccatctggtgggtgctggcttctgagtgccacctgggacacaggcctcagggtggaggggacatctgtcaggcttggagtcaggtcagcctgcctgctcctagaggacatggctgagcttctgtggtcacagccaccccttgcacggcctggtcccagctcctgagtgtgtggcaggtaccctgggcccagaggagctgggtcggaaaactggaccgccctggtgccagcctgacaggcgccactgcttctgggcgtttgcagctggttccggaagaaacatcctccggctgaagcaccagtgcccatcccaccgagcccagacaccaaggaccggtggcgcagcatgactgtggtgccgtacttggaggacctgcacggcgcggacgaggacgaggacctcttcgacatcgaggatgacatcatctacactcaggacttcacggtgcccggtgagtctggcgggggcccctgcccggctctgctgactcggccaggatgtcccacgggagcagggtgcctgcctgtctgcaacaaggacagcttctgccctctggtggccaatcccacgtccccaaagcctccagcccacctgcaggctgcctccgccctgcgggccgctgggacatggctgaaaggtgtggggtcagcgggggcaccagcccaggcctgtctggccaggagggttcctcaggcgtctctccgggtgctgcccagccaggcaccacccaccggccttggcctgagtcccagcaggagcaggcgggggagccccagggtcgggggagggtaggtgagagtcagggtgcagggtggcccctcagacagctggcatgagagagggtccagtggccctccctcccgt

SEQ ID NO: 90420 - DNA, 1049 bp, Homo sapiens
ccacctcccggagtcgtgacccgggagcacgcgcccagcccctgcaccctccctggcgcgcaggcagcgggaggtctccctctacccaaccatggccgggtgggccctgccagggtgtagctgaacttcttggggtgggggtagccccccacccccgtgatggggcggacagggcgtctggagtccttctcgagccggctgcaccgccttggcgtccccattcctccgagtgcttgccctgcccagcgctgagctccagggcctggcgctaccttgcaggacaggccgcaccggctgtgtgcagttgtgatgggtacaggcgcaccctcagagggccaggcctcctcccccgccatggggatgggagatggaggtccagagagagcccccggggcccgctgggcagagccaagccgggtggaggctgcctccggctctgctacctctccatgagtcactgccccctgtgtgggctcctgctcctgcagggaagacccagcttgtctgcagtggctcctgcaggagaagtaggtctagctggagctgaccaggcttcctccccacagggccctcctccccagttcagaatgcagcccacagccaccatggccacagccgccaccaccaccaccaccaccactgccacagtagccctgacgacgtcgtgggacaatgccactggacgccccacggtgggtgcaggggacaggtgggaggggcaggaggtcgtccaggccagcagcacctgaccccccctgcacacccgcaggcagagccagaccccatcctggacaactacgtgctgctggtggtggtgatgtcgctgttcgtggggggcacgctggtggtgttgtctggcgtcctgctcctctgcaagcgctgctgggacgtccaccagcgcctcaacaggtgcgaggcccccacctcggctgggcaggtgcatggtggttgtgggtgccatcgggtggtggggggtctacctcactggcttctgagtcacagggtgggctatgcctctggagactgggtgatgcgcagggcttggcttg

SEQ ID NO: 90421 - DNA, 1050 bp, Homo sapiens
ggccgctcgtcccggcgctgaggtaggcgcggcgggctcggggctgcggggggcggacgggggacaggccggggatcgcagccggctgtgggctaagcggccggagggagggcgcggaggagtccggcgggcgtggggaccgagatccgggccttgcgccccccacccggctgcctccagagggacccccgctcaggccccgccccagcctcagtttctccctgtgaggtcgggcgaggacgatggcgtctcggctcagccctggcgtcgggtccctgcctcccctggctcgccatccccacccttggccggctcgggggcgcggtgctgccccgtggggaacctccgccctcggctcccgcagccgcctcccccaggagcccccctcttcccctcggcctcctgccatcttccccggcctccggtcaccatcctgcgcctgtccccaccccctccagcctgaactcatttcccgacctacatatgcggccccttcccccagtaccagggcccgggcagcctgtgaccgggagcgctgaggacaccagcccccgccgggaccctgcccggctttgggcctcagtttcccgctgtcgcgtgtgggcggaagtccgggaagggcaggagcggctgccgcctgtgcgctcctctcgctccgggaaaggtctcgcgcgtgcggtgctgacctggggccgccgagcaccccggcgccagccccgaccccctgcgattcccgggcctccccacccggctgcgccgcacagcgtccaggcggctcctttccctggtgccgcgccccgcctcagtttcccccgagcgtaaggcggccggggatgctccgggcgcccgggctgggcacggcggggaggcggccgcggccatcttgcggcttcgcgcccgcccccccgaggccgccgcccccccccaggccgccgcccccgcgccccctccccgccgctccctggcaacccgcccccccagccgcggcctgctccgcagtcgccatgggaaccagcttctccggggctgggaacagatgcgccttctttg

SEQ ID NO: 90422 - DNA, 1059 bp, Homo sapiens
agatgtccttcaccttcgcctctcccacgcaggttcgggcgctgcgggtcgggaccctccgtggccgccgcccccggagtccagggtccccacccccagggcgcgacccccgcttccgggcccccggacccgcgcgccccggaagccgaggctactcagccctggaccctcggccctgcctctgctgcccgagccctgcgctgccctcgtcccgggcacctccccgagataagcgtctcctgggtgccctccccgatctccctggccaaagcctgggtgtcgccggatcgttgcattcccatttcgcggatcagtagaatgaggcgcaactgttgaggaccaaagctgcaacttcggatccctgcgctgggttgtctcagtgcctcacatcagcgccaggtcctgccctgacccattacttagcaggacaggccgagtgcccggtgggcgcggggccggcctgccccgccatcattccccacgctgttgtctgcaggtgttcttcaacggtgccaacgtccggcaggtggacgtgcccacgctgaccggagccttcggcatcctggcggcccacgtgcccacgctgcaggtcctgcggccggggctggtcgtggtgcatgcagaggacggcaccacctccaaatactttggtgagtccggtggagggctgcagggccaggccaggctggggctccacatcccaggtcagtctccgtctcagttgaggctgcgagaaaaaatagttttaggccgggcacggtggctcaagcctgtaatcccagcactttgggaggccgaggcaggtggatcacctgaggtcagaagttcggagaccagcctggccaacatgatgtaaccccgtctcttctaaaaatacagaaaactggccgggtgcggtggctcccgcctgtaatcccagcactttgggaggccgaggcggggggatcacgaggtcaggagatcgagaccatcctggctaacacggtgaaaccccgtctctactaaaaatacaaaaaattagccaggcgtggtggcgggtgcctgtagtcccagctagtc

SEQ ID NO: 90423 - DNA, 1267 bp, Homo sapiens
ggtgggtcagagggagggcctctgtccccaggcagtgcttttgggggttcctccagcttctagtcctttcttgcggcccctgttttgttcttctctagcagttgcccgccatgttgggcccagggccagtcctgtgggtctgtttgcacactcaggacacagacttggatgtttgtggagctcctggttcacagggggctctggacttgaccaggggagtccctgaggctgtgcagccctttggggtctcacgccttccccccgccccattcccccagtgagcagcggttccatcgcagtgaacgccgactcttcggtgcagttgttggccgaagaggccgtgacgctggacatgttggacctgggggtgagtgtcagaggggacctgaggctcagcaggttggagctgtccaggctgcgggggagggagcgctgggggaccaggagccgggctggggtcgctgctggcccctcaccgcccctcaaccccttgcaggcagccaaggcaaacttggagaaggcccaggcggagctggtggggacagctgacgaggccacgcgggcagagatccagatccgaatcgaggccaacgaggccctggtgaaggccctggagtaggcggtgcgtacccggtgtcccgaggcccggccaggggctgggcagggatgccaggtgggcccagccagctcctggggtcccggccacctggggaagccgcgcctgccaaggaggccaccagagggcagtgcaggcttctgcctgggccccaggccctgcctgtgttgaaagctctggggactgggccagggaagctcctcctcagctttgagctgtggctgccacccatggggctctccttccgcctctcaagatccccccagcctgacgggccgcttaccatcccctctgccctgcagagccagccgccaaggttgacctcagcttcggagccacctctggatgaactgcccccagcccccgccccattaaagacccggaagcctgactgtgtgctcggctcttgttcctccacctggcccggtgaagccgggagcgtcctgggcccctgctcacgtcctccatgtcccttgcaaatagggcctttgagctcccctggactatgtcccttagggcacctggaggtccgtaggaagcaggctcgagggggtgggtggggtgcagccaggcgggcaggctgctgaccttcaccctacaacggtggggagggtgaaggtcaccagtgatggggacatcggtcagggaggg

SEQ ID NO: 90424 - DNA, 1003 bp, Homo sapiens
tcccaaagtgctgggattacaggcgtgagccaccgcgcccgaccgcatcatcttttttatgtgacaaactcctagtcattcctcaaaccgcagcccctgtgacccccttccaagggttatcccagcctctccctctctggcctagccctgacccttcggggctgggtgtgcctgtcaaggtgggggccacggctgccgggagcatgggtggcagccggaaggagacctggggaggagcgcagccctgggaggggcgcccatggccagggtgggggtggaggtggtcaggccagataaagggaggggccagatgagtggacaggaggtgctcccgtaggaatggggtccccttctctaaatagaggggcaggacggggcccacctcaaccaggaccatcctcaaaaagccgacggggaagggtgagatgcacaccacattcgtgtctcattggctgtggcctcagtttcttcatctgtaaaatggggtaatgcccaccccaaaggctgggaaccagtgcatgtcctgcattaatggggggtgatggccccaaagtgatcctgccgcatcccctcaccacactcccacccaccctggagaaactgaggcttggagaggccagttacctcccggggtcacagcatagccggctggtgactggctgggcacaaggcaggcctggcactggctaatcgctccataaatgccctctgaggtcaccattgacagatgcaggaggccagggctggccagggcacccccactctacggcaggtgactccagcctgttttcctggacgacagccgctgactcaggcccctcttcccgtcccccccacgcgggcgcccccaggcggaagcaccgggcctggggcgacaggaagggggcggggcagcgagtcgcgctgtacaccccaaaaccctgtcccgctgacgattcggggtgcatctcagcccgcggcgaggcgggccgagacccttggctcggggcattcaaggggagtc

SEQ ID NO: 90425 - DNA, 1041 bp, Homo sapiens
atgagcctcgccatccacagcaccacgggcacccgctacgacctggccgtgccgcccgacgagacggtggaggggctgcgcaagcggttgtcccagcgcctcaaagtgcccaaggagcgcctggctcttctccacaaagacacgtaggtaccgcgcgcccccggccggccgccccctcgggccccggcccccgggcgggaacaaagagcgcgccgcgcggggaaggcagggggcggccagacagggggcgggggcgcgccgcgcgctctcgggcgccctctgctcggcctcgcctgcctcggccccctcccccgcccggggtcgccgcacaaaggcggctgcgagggcgtcccgggccgggcttcggcggccccccttgggggcgggcaggaatcccagggcgttgcgggggtcccggctgcgggtgtgggggccgccaccgccccctcccgcctgcgtccgcgccggcttccgcatctgctcggcggcctcctctgcgtctggctgtctccccccacttgcgtctctctccccccctttgttctcgcctccgagcgctccccgcagcctcccctcccccctggtatttaaatcgcctgcaggcccggagccctccccccgcgggcctccggggacacgcagtgtccatcccagtggaggggcccatcgggggaggggcggagggggagggtctcctttgtctgcgcggcggcggccgcctgcgccggggagggaggaggagggggagcccggcccggcgcaacccccagggcctctcctcgggccgaaacccgtggttcctacaaagaggagccaggactagaattagggaattgggggcaggggctgccctggggtcgtgggggaaggtggcatagagcacactggggcccagaggaggagaaagtgcctggttggggtgcagagggggtgccagagtccagggcgggggttccactggagggaaggggtccgaatcgccaggatggggctcccagcaccagacggagacctctctgcacgcgcttagggccctggatc

SEQ ID NO: 90426 - DNA, 1431 bp, Homo sapiens
tttctgactgagccaatagtggttggggaactcttgaaaaaggggagagaatggctgggtgctggggagttcccccctccgagccctccttcccggcccaacctgagggatgtggatttgggactgtctgggggcccctcctgcagcgaggatgggagggggtgctgagctgtgaatcccctgggcagggggcgacaactccgtgtagcattaacccccgtggcggggtccgctgctggtctaatttggaccccctgcctctcagtgcccctgccctaggggtgtctgtctccagaggggagggacaaatcccctactggggccatttcaatggggtagtttttggatttttttccccactcactttttattttttaatgataatggagatgtctggacccttcctcaccccacctgtcggtcttgtcctggctctgcctgtcccccaccgttgttctcgtaggtgaaccccaggtcctcaactccccccctttatgtgttgaaagttaatggtttcagatgtgaacatcacgtgttataactgtagcgctgtaaatttttttgtgggagggtgggcagggaggggtcccagagggtagagctcaaggattttgggttttgttttgttttcatttttccaaaaaaaaaagaaaaaaaaatagaaaaaaaaggagtaaaaggggcgggtttgttttttgaagaactgtcttggatacctatttaaatgtgtgttctgttttgttttttaacgatttttaaataacgtctgtgcctccactggttgagggtggaacctccaggcaggaaccggctcgccaccctctgcccggtaagggctgcccaagaaagcattacccgccctcggggggtcgggctgtgggggtcccggcacctggcgtgagtttcatgtatgaaaacataaaattgaaaaaaaaaaaaaaacctacacgagcaccgtgatttcaagtaataaacagaaaatgaaacacacattgactcccgcctgctcgcctagtggggggatctggccttggttgggagggttcctggggtgggatgtcagctcagggagtcagagggactgacctgggtcccaaggccccgaagagggggtggggcaggggtcagggccctgagaatttcccacgctccttccccggctgccgggtgggcaggaagcagccagggtgggagggaggagcccagccacttcctggtacccaaggccggaagtcccttagggtgtggggcgagggcctgcctgcctgcttcgtggcctgggcaggaccctggccccctcaggacctgccagtatgggggagacgcgaccaccagctctccccagccacaggagtcggggactcccactctgccacacccacctgctccccttcctggagtctcacatctgtgtggcttgctgcagggaga

SEQ ID NO: 90427 - DNA, 3506 bp, Homo sapiens
gaggtggaggctgcagtgacccctgcactccagtctgggtgacagttagacacactgcccccgaccccaaaaaaataagtcctaggtatgagtttgagataatgaaaaataaaaatctgattttctaatatttcccctaaaaaacacatgtcatttacataaaataggaagcggggagaggtggtgagagatgacccctgttgaggatttcattggtgtctgccacaggccgccatggcatcagatgaaggcaaactttttgttggagggctgagttttgacaccaatgagcagtcgctggagcaggtcttctcaaagtacggacagatctctgaaggtgaggctgctgctgggcccgcggccctgggcgggggggcttgtgctcctcctacctggaagtacagctgggtgctgactgcagacctctctcccctgcacagtggtggttgtgaaagacagggagacccagagatctcggggatttgggtttgtcacctttgagaacattgacgacgctaaggatgccatgatggccatgaatgggaaggtgaggatcagggtgctgagcaggagtcccgtctcgaggatggggcacccacctgctaacccgtcccgccctctgtctccagtctgtagatggacggcagatccgagtagaccaggcaggcaagtcgtcagacaaccgatcccgtgggtaccgtggtggctctgccgggggccggggcttcttccgtgggggccgaggacggggccgtgggttctctagaggtgagtgccatgagtgggtcccttggggatgctgtgaggtactgctggtgggagctggtactcactttttcctgtatgtgcaggaggaggggaccgaggctatggggggaaccggttcgagtccaggagtgggggctacggaggctccagagactactatagcaggtgagggggaggccggcccaagcacaggggtggttgcgggatggccagcttccgtcccgggtcccaggtccctgggggagctgagatgagactggctgggcaaggagcagaggcaggtggggacccaggccaagaggagaggagactgctcaggacattcgcagaagcgggagggcctgggggacaggctggtggagattttgaacaatttccaagatgctgccctgctggggtccttgttgtgtccccagaagggacggctggcatgggggctggcggctcagcctgttgtggcagagcagaagtagacgggtaccttccggtactcaacgtttgtctgtcttgcagccggagtcagagtggtggctacagtgaccggagctcgggcgggtcctacagagacagttatgacagttacggtaagtcacactccgagggcgccacgctgctgtggcctgcggtgggagctcggttcaccttggtgccctctccaagcactttaggctggacactcagaccttgtcactgtgcttgcccagaagaggcgcatctgtcctctcagagccatttctatcgcaggacgcaaaagccaaatgagactgaccaaaaaggcaagggagagcgagggcccgctgggcagtcagctaggtgcatgtgtggccgcaggccagcctccctcggctgtggggggtggttgctccccggccgcaggccgcgccctggtctggcctctggggtgaagctgcctcttgttgcttcggtgcctttacactgtgcctgcttcttgtcctcagctacacacaacgagtaaaaacccttcctgctcaagatcgtccttccaatggctgtgtgtttaaagattgtgggagcttcgctgaacgttaatgtgtagtaaatgcacctccttgtattcccactttcgtagtcatttcggttctgatcttgtcaaacccagcctgaccgcttctgacgccgggatggcctcgttactagacttttctttttaaggaagtgctgtttttttttgagggttttcaaaacattttgaaaagcatttacttttttgaccacgagccatgagttttcaaaaaaatcgggggttgtgtgggtttttggtttttgttttagtttttggttgcgttgcctttttttttttagtggggttggccccatgaagtgggtgccccactcacttctctgagatcgaacggactgtgaatccgctctttgtcggaagctgagcaagctgtggcttttttccaactccgtgtgacgtttctgagtgtagtgtggtaggaccccggcgggtgtggcagcaactgccctggagccccagcccctgcgtccatctgtgctgtgcgccccacagtagacgtgcagacgtccctgagaggttcttgaagatgtttatttatattgtccttttttactggaagacgtacgcatactccatcgatgttgtatttgcagtggctgaggaattcttgtacgcagttttctttggctttacgaagccgattaaaagaccgtgtgaaatgaaccttgctctgacaattcccttgcattgcaccacacactccttgctgcgggctcctgcagccagacctgagcagagagagaaggtggagaagcagcgggtctgcaagccttccctggggcctgcagagctagaaagggaggcccagcagactggcgctggtcagggtaggggagccaggcgggggacgggagcgggcagctcaggcctcagggcagccctgggaggcttctggcagtggtggccagagggctggactgtgcgggcagcttagcagggacagtggacgtgcacctgacgctgacctggactgcctcagtctagaagcaggccagagagcagaggcacgtggcatcccagggcgacctcagacggccagccggttagctagttctgctgttgcttcacgagttctgagcattctctgctagcctatggaagctgcagccctcggaggacagaagtgttgtgcgcccaacagaaccctctgagacgcaagctgctcccttggctagctcatatgtggaaatagccctgtaattcgaggtaactccttccgctcgtgtccacatccctcttgttgagagctcactgaaagtcatgtgcccggggaatgttcctgtgactgttttttgtttttccttttttttttaactttgtttttgtttttttcaattaagctggaactaaagtcaggcccagccattacgctccccacgtgcagccaggtgcagcctgggcccagtcatgcctggctcatagatgaaatcccttaagcaggattgaagaccagtgaacgcccccgccttttggattttttgctcaattgaccgtcttttccagacctctttaagtcacactcttaacttagctttctctgatgtctgttgccgccattagtttttttctagagcccacactggcccacatagctccatcccatacgggtagctggctccagctgcgccaaggtgcagacccgccctgggcatgctggcctgtgacggagcctgaggtcacagccccctgactagcc

SEQ ID NO: 90428 - DNA, 2113 bp, Homo sapiens
ggcagccaaaagagcagtcgtttttccgctcttatttttgtgtgtgtgctgtggtcaactgttaactccccaaattggggagggttgtgagctttgattgtgtaaaatgcctctcctgccgaggtcggaggcaggtcttccgcacggagatgatttattcaggagccttttaaaactgatctagatagaacctttgggagggactgtgctgtattttatttatgaaaaaatgcaggcgcctccctggataccgagccccgtcgtttctgtttgtcagtctgctttttggcattgagcatctcaatgcaagattgtggaattaaaccatctacttgaggctaagtcgagctaacctttgcccctgagggctgtgtctgcgttaacatcgccagcaaacagttgtataaaccaccgtgcaaatttcgttccaggacacattggcgtgagacctgggagtacgttgtgccaaatcattgccacttgccacatgagtgtaaatgatggcggatgccaagtatgtcctctgccgatgggaaaagcgattatggcctgcgaaggtgacagccattattctgtaacttcaggacttagaaatgactttcgggtgacaagtaaaatcttgatcaggagatacctaggatttgcttcagtgaaataattgagccagaacacggttggcactgattctcgttccccatttaatggggttttggtctagtgcttccaaggttacacttccagaaatgtcttttttttttcacactaaaaaaaaaaaaagaatcagctgtaaaaaggcatgtaaggctgtaactcaaggaaagatctggcaagcagccctgtgatagtaaattatggtcgtgttcagggaatgctttccagcaattcagtagacagtgctcagctgcaatgcaaaagcccaggtccttgtctttgtctgccactggcctctcatgcctcagtttccccatctgtgaaacaatggggattggaccaaatatctgaaatcccatggttataggccttcaggattacctgctgcatttgtgctaaagtttgccactgtttctcactgtcagctgttgtaataacaaggattttcttttgttttaaatgtaggttttggcccgaaccgcgacttcaacaaaaaataagagaagaaaggaatattttctagctgtgcaaatcctctctctagaggaaaagttaagtgttgtgttgttttaatactgttttttcccgtgtagatttctgatacttcaatcccctactcccccaaaacagttgaagcccagcccactcttaatgggcttattcaccatttgtgtaattcattaatgctcataataacctcatgagaaagcaactagtttgattttatgtcagtttggaagctgaagatccaaacgaggcattctgtgagatctatggagagattggtacaaacactgaatacatgtaaattatactcagggtagaccctatttgtggttaaaatagggatatttccttttttttttttttttttgactgtttcttaatcagtgccatgccaggaaaatagggatgtttccttcccagagatctgtgtgtcttttttcagaaacgtctgtgacaggcccatcaattttgaaatatttggtttttgagcctgtcactctaaaccagcgtttaacgttcaaaaggcaaataactgatgaccaggcggcacattgttctgctccgtgagtgtctggcactgggaaaggtgtagattgtctagaatgacagcaattccgacgccccagtcagtcctgcgtgattgtggcgagggcgcgtctggcaccgggaaggtgtagatcatctagaatgacggcgattccgacgccccggtcagtcctgcgtgattggcgagggtgcatctgtcgtgagaattcccagttctgaagagagcaaggagactgatcccgcgtagtccaaggcattggctcccctgttgctcttccttgtggagctccccctgccccactccctcctgcctgcatcttcagagctgcctctgaagctcgcttggtccctagctcacactttccctgcggctgggaaggtaattgaatactcgagtttaaaaggaaag

SEQ ID NO: 90429 - DNA, 1053 bp, Homo sapiens
ctcgccctgtgattcgaactcctcatctcttccccgcggagacgtgttgggcagttccagacctcacaggaggaggccatgtgtgcaacaaagcctgtcaagttcgttcacttgtgaaaaggaccccgagtgcaaagtggaccacaagaaggggctcaggaaaagtgaaaacccaagaggcccgttggtcctcccagctggaggtggtgcccaagatgagagtgggtccagaatccaccacaaaaattggactcttgcaagtaagaggggaggaaactcagcgcagaaggctagcttgtgcctgaatggatcttccctttcagaggacgacacggagagagacatggggagcaaaggaggcagctgggcagccccgtccttgccctccggggtcagggaggacgatccctgtgccaacgctgagggacacgaccccggtctgccgttgggcagcctcactgcgcccccagcccctgagccctcggcctgctcagagcctggagaatgccctgcgaaaaagaggccgcgcctggatggcagccaaaggccgcctgccgtgcagctggagcccatggcagcaggggccgcaccatcccccgggccggggccagggcccagagagtctgtgaccccgcgcagcaccgccaggctgggcccgcctccctcccacgcctctgcggatgcaaccagatgtcttccttgcccggattcccagaagctggagaaaggtaaaagtttctcgtggaggaggagagcgcagagggtggagtcctgctcctccgcagccagactgggagccaggcacgtgggtgtttttgaccagattttaatgagatcgttgccaaaatagacttagagcagagacttcctcattcctttttgtctgtctccccactgggctataattgcttcaacttctaaatatttgtcttcttatttttgtttagaagggaagggagttgagtgagtggggagcccgtagaggggcggcgggccacgattgtctgcggcgcggctgggagcattgtggctgtgctgaggccgcagctgcgg

SEQ ID NO: 90430 - DNA, 1282 bp, Homo sapiens
accagcccaagccttcgggtccccggtgcccacctgcgttcagaccagcccaagccatcgggtccccggtgcccacctgcgttcagaccagcccaagccatcgggtccccggtgcccacctgcgttcagatcagcccaagccatcgggtccccggtgcccacctgcgttcagatcagcccaagccatcgggtccccggtgcccaccatttgagcagctcagggcccagacctgtgcctggtgcgtttcccatttaccagagggtccctgtgcgaggcgtctgccagagccccctttgtcagggagggtcagaggtgcgggctggagcgtgagcagcctggacacctggctggtccctgggctctgcgtggcttctgaacccagggtgcttggcactgcctcccactgacgcctgctgcccggatctcattgtagaatcaagccagggaggacttcaaccaggacatcggctggtgtgtctccctcatcaccgactacagggtccggttaggtacgtggggtgctggggaggggtggagctgggcagcaggcgtccagcctctgaagaccccttggacgggctgggccggagctgcctggaggcggggcatatttccgtgggcctggggcattccctgtgggtgggctggggttctggcctggcctgattatttcctaaacagagacgccgggccagcccctggaacacacttcctgggactcctcttaggtctacacagtgctctctcccctccaccccctgcaggctgcgggtcttttgctggctctttcctggaatattacgcggctgatataagtaagtctacaggcacatcttggaaaatgtggtttgccttttagccctttagaaaaacaatcttctatgtctgaagctgtggaaggggacgttggggtcaaggcactgtccgcagccacacagcattgttcaacctctatgaggttttgatgtgaccctgaggctccctgggacctggggctgctggtgtccactggcacagcatcccgagcctgccctggggccctcatcccatgggccacatccagcgtgtccctgctgtggctggtggctgcacacatcagatgttgtgaagaatgtaggccaggtgcggaggctcacacctgtaatcccagcactttgggaggctgaagcaagaggattgcttgaggccaggagttcaagactagcttgatcaacagagcaagaccccatctctacagaaaaatagaaaaaaatgagctgggcgtgtggcttgcgtgcctgc

SEQ ID NO: 90431 - DNA, 1094 bp, Homo sapiens
tgtcccccgcagggcagcagccagtgtgcaagtgtgaggcggggtgtcccccacagggcagcagccagtgcgggggccctggcgcaggaaagcggcaggtgccagtgaagatcgccagggcggggagacggggcagcgtttgggttccttccggggccatgcagtctcaagcaggggactaagactctctcgtgttctgaaaaccccctcgttacctaacgtttgttaagtggcactcgagttgggatcagagctaggctgtgcgggcaggagcctgatggggaagcgcctggaggccggccctgcgtgctgcccgcagctcactgttcccaccccgtggtcctctctgcagctcctggcctgcgcggcttccggatccttggtctgcggtgagtgcctgagtctccagccctcagctgggaggggccttcagcagcgacagacgaacggggcggggggggtggggggtggggggagcgccttgttgaaggtcacgtgtcatgttagggacaggatgcaggtgacggtctgcacgctgcccgtgatgtgccgggaccctccctgggacagtccacgcagtggcaaaggctggacagtcaggaggaaaaccctgtgggcccggctcagtgccgtcagagctcaccgccacctggggtgggaaggcattctctgagccctgtgcagatggcagctggggcaggcctcctgcagacccaggtgactgacagggcggtgagggcgcatgcccagggatcttaccttggtcatgtgtggagggcctgctgccagtttccttctgtggatgatcctgggaccgtccttgcttggacactgttgacctgctgggtacgtcacaaaagaagttccattcaagtctgggccatcattgggggtcggggcgatggccgcatggctccagcggctctggccagtggcccaagtgttgacaggcagaggtgagaacagtctcgcagcagggaggggagaggcaggacaacagtgagtgcggctgggggagctggaggggcctgggacagccactgacccgcgttccatctcccggcagctccagcgtgggcccggctgtgcaggca

SEQ ID NO: 90432 - DNA, 1038 bp, Homo sapiens
gttaacgcagagagttcccggttagacctgcgctactactcgcctgtagcccacgcgctcagagagtggctggagccccctgttgaaatggtgggacttaggatacactgggttcgaggaactatgtgatgaggacagatctcacccgtttctctctattttatgtatttgaatgtggctggtggggcgcgctttacaactcttggggcccggaggccacctgcaggagccgctgtgcctctcacctctgccggctgccgccccgggacatgagtcgggggttctgggtgctccacgtggagtctcacgctgggccacgcggggctccgggggtggcgtctgacccgagcccggcctccgcagagttctctgtggcccatgaccttcggcctggcctgctgcgccgtggagatgatgcacatggcagcaccccgctacgacatggaccgctttggcgtggtcttccgcgccagcccgcgccagtccgacgtcatgatcgtggccggcacactcaccaacaagatggccccagcgcttcgcaaggtaggcctcgtcccagccgcccagccgcccccagagtgagctgcgcacggaccccgcctctcttccaggtctacgaccagatgccggagccgcgctacgtggtctccatggggaggtgagtgcagggcggggggtctccagggacagacgtagcgtgagtgctggcctggccgtgccctgatggcgcttatcaaaagtgtcatctacattcagtgaaatcccacgtggtcccggcgctgcccttcagccgtctcggtgcctccaccctaggcagatgcgctggtgggcctctccccagaacgattcctcccatccacccccacgcagcagaccccacattccgcccagttctctgctttactcacacataagtgatgacaggtgctgtagatagttttataatctcagccttctcacttgccattagttttttttctttttttttttttttttgagacagagtcttgctctgtcaacccaggctggagtgcggtg

SEQ ID NO: 90433 - DNA, 1034 bp, Homo sapiens
caagttacagggaagacctcaggctgcaggttcctagctccgggctgaggtggcttgtggaggcagacagctgttgtctggaagtgcagagggctgggggctggccaggctgttactgagttcagaataggaggaaagagtgtgtagcaaagtcggcgctccttggccactgccagcattcagagttgtcttgtttgccttgccttaaacgttgccttcctggacgcctacaaagtcaggttgtaaccgctggccactgctgtgctcactggcagcccctgatttacgtgaggacctcaagtgtgtgttgggcagaattccccagcgcttcccgtacaccccccacccccagtgcagcatcgctcggtgcgtggctggtggactggaggagtgtgcgtgccggcagcactgccaggcacgtgcctaatgctctggccctgtgtgtttgtgttttcttcccgatttctgagcagagactctgcgcagctacttttcccaatatggagaagtcgtagattgtgttatcatgaaagataaaaccaccaaccagtctcgaggctttgggtttgtcaaatttaaagacccaaactgtgtggggacggtgctggccagcagaccgcacacgctagatggccgaaacgtaagtgcccttccgggagctcacacccgctctctgtctcccctgtccttcctctgcttcattttttcctggactctgaccgatgtttgcgttagagtatgtttgaacgtggggtcgattgggaaggattaagccttggtgctgaggctggatattgcaggaggatacagggtgaatggagccggcggggcggggcgggccgggctgctgtgccgtggctgctgttgtgctgacaccctctttcctagagaaacagcctcttattcacaaccagctgatttgaaatttcctgcagatcgaccccaagccatgcacaccccgggggatgcagccggagagaacacggccgaaggaaggatgggtaaggggctgggccgggcggcctccttgtgtg

SEQ ID NO: 90434 - DNA, 1036 bp, Homo sapiens
gtcacctgctggagatgtacagcctgaaatccagcttcctctctgctcatttcgtcgtcgctgctgcctttcccctgccgtcctaaagtccctgccttcacactggagcacttttccacgtggcagtggttgtaattcggaatagctgaggcaaggcacgcactgtgtcgtgggtccgtttagctgaaatgtagctctgcagaaatgctcaatccctgtctccttgggtctctctagaaaagtgagaaagtgtctcagcagagcccagtgtctttggacttagcgggcttgtggagtgttctgctctggctttcagctgactctttaaaccagcgcggattggcctttatgtcctccgcagctcgcgggagggtttggagggttcccgtgtgaactaactatccttcccttcttcaacagcagaaaggacccaggagcgataacagtaaatcaaataagatatttgtcggtggaattcctcacaattgtggtgagacagagctcagggaatacttcaagaagttcggagtggtgagtttctccccaccccggcagcactgtggggacagagccgcttctgctcaggcctgggccttcttggggctggagtggccgagccacaggtgcacgggcctttcaggctgggagctcgctgtctcgtatttccccaacgcctgcgccctccggaaaggtggaaagcccggcctttgccttcatggccatttcgtgtcccagtagggtggttgggcggtgaaccagcctgacagccttcagggcggccgcccgattccattgtgaacaccgtggggtccagtgtcagagaagggcagttacacagaaacggggttcagtgtggcctgggcgagccagccccacagagctgactttccactgggcaggtgggagaatgcccgagctccgttgagcccagtgccagagggagctgggacagccggagggggccggcggggagccctcctagtcacccaaggcaggggcgtgtggtcaccccaaggtcctgctgggactcctgccg

SEQ ID NO: 90435 - DNA, 4061 bp, Homo sapiens
tctcccctctctgaagtcagcagggcaggtgggaggaggggtgaggagtcacctcagggcctcccctcattttccctcagcttcttgcacacccatccatgctggtttgtggagctgggacgatgggcgcccagtttctgtgccccttttccgtggctgctgctgtctgtcccgcccgcccgcatggttttggttcatcagctgcttttggccggccacgtgagcagacctgcagcctgggtctgcccgccacgtccgtgccgcccccgcaccaccggcccaggtcagtcggggcagccccgagcgccaggtggcgccgcagcatgcccaccatgctggagcatagtttgccatttgaacctccctccccacggttaggagtgctcctcctccatgtcggttacgctgttaagtcttagtcgtaacttaatttagacatacatgcttagtgacgtacttaagtgtttcatagtaaagtacagtgatgttaagtaagctgtttttccttttctctctgtgaattgtgtgtgattaacgatatctctttagatttctcttctccaggtgctaaattatatcacacaggtacaggccagtcccgcagtcagaggagggagcggctttgctccagtggggtgtaaacgaagtttcaggtgtttctgtcccgcttcctcagtggtgatgtcgcctcttgacagccgcattcctagacagcgctcagggcgcctcccccaggacccagcgcctcttgcactgtgcccggaccaggcgagccctgtggtttcagacactcctgcagtttgcgaaaatgtctacttctaaatacgttgtttcatcaccgatgctgtgttccaatactgcctctgatcttgggaaacttgagcgcgcgggaatctgagggttgcttctagatcctcccggtccccctccggctgcccagagctggcgccccttctcctcgcgtcctgtcctgtcccgtgtggacgggacgtggcgagtgtcgctgagtccacactggtgtacagagcacttcggggccagcacgtggccacatgtccttagctgttgggctttgaaagtgtcccttgggtgtcaggcgagtggagggccggagagacgctgcggcgctgcttagcgggtcctcccagagagtgtgtccccttcccttggcctttctgcatcttctgagacgggtctgtgtccccctccccgccacctcctccctcttcctctccactgactgaaggtcatggccatgtccctgtcagggaccccgcctgtgtctcgggcacacagtgtctgtgcgggtccctgcttggccctcccacgtctaccctcggcccgcccgctccagccgctgcctcgttcgcctctcagtcccctcaggtcttctccatcctgcgctcctctcgctgtgtgccttgccttcctggtccctcctcctcttcctcctcctcttccccctccccctcctcctccccctccccctcccccctccccctccgtctggttgcagacactgcgtgcacagtcacgctcaggtgcacacgtgtgctcaggacggtgggaggctcctgaaccacagtgacctttgtcccctcacagtctgagctgccctttctgccccgtttccatctttccccgcccccagttttgcttgtcctgtttctgcctggtcccagctacagcagccctggcccctgtctcttcagcttgagaggccccacagtaggctgctccttccgggggccgttgcctgttcccaccccccacggcccttctctgccgcgctcgttcacgcctcacgcccgtgctgcgctgtcccctgctgtgtggtgccttgtcacgcaccctgtgcctctggcgcgggcagcccatcttcagcccggtctcagctcttcccatgtccatctttgttctgtgaggtcttgggcagctgtctgccgggcacttccatctggggaggggctggtgccgcctgggccccgcctcgggaggacggtgtgctttgcggtgtcacgctccacctagccggggaggcctggagagcccggcgcactcctgcgcctagaggaggagacccgccccgttagccgggggccgcgcccaccccagacccactaaacttcgtttatactgccactcttgtgtttgggaaatgctaaattttttttgcctttaaaattttctgttttgatcccatggtgcatctcgctcttgctgctggcagcagagtctgacctgctggaacccgttgtggcctgtatctttgtgcattgtttctctacctgtatagaacatgcatagatgtctacgatatgacctcttctaggactccttgggcttacccaacggtgttgcgtaagcctagcgaggcaccagctatgatagatactgtatctgttaacgctttagaacgatatatggctgctgtcagcactagctgcaaagcaaattgcaagccaagggggagaatcctgggtttcagagaagcatacacacatccacggtgcacacccctgactaagatggcgcattccacgcgggcccccggcctgcagggttcactggcaatctccccacaggcgagagccagaatattcaagcacgggcctctgaccctcccctggggggcgctttgtctgccagtagcgatggaggccctcaccgttcccctgtctccgctgctgttttataagatgtgctccttgttccaaatctttgtgacacggagccccagcccggggtgtctggggcggaggcttgactcaggcctcagtcagcagagccgtcaccgggagtgcggacgtcaccgtctgtccactccgtgtgcagtcgagtggtggctcctggggagggaggcagctgccccaggggcccgcagcgccccacacacagcttagctgaaacccaaggtcgatccctcggcccgtccctaatactgttcatcatcctgttttgtgtcacaacaccctgctaccttgattcactcttcgtcgttggctaggttttggatttattactttcgaggacgaacaatcagtggaccaggctgtcaacatgcattttcacgacatcatgggcaaaaaagtgtgtagttgtagttttattttaccttaagaccaaaccaagtcttaggcaacttaggggtttcactggaaaggaacattccttcacggaaagggtcgggcgagttcgtcctgtgaacctttgctgcgtgaggtgggcctgggtctgtagacgtgaggagggtcccatccttccccagcacccttcctgcggggtggggatctctcagctttgctcctggagcccctccctctgggtgacctgggactgggcgggtagggggctggggctgggaggctgtggcggtgttggggctggctccagtgaaaccgcagcgttgcctcaggcttggtttccacgaccactccttcagatgtctgcaaatccccattgtctgacactgacctgtaatgtgatcagcaagggacctttgagagccgaggttccgcttaaaatggaaagcacagtggaaacatcatgaaggactggttgtttgaattgggtcacttactgtggaactccggcaccagccacatgctctcggtagtactcagccaccatgcagtcaagtgacctctggttgtgtcatcttcatactgtgttacccccggaggtgagagggacaggaggccacccccccaacccccaggccagcccttggaaggcatgtgtcagaaaggggtccctaaatccttgttttacctggacccttggaggttcttgagaagtggactctgaaataaataactggtagaaattctacagtgtggaatttcttgcagttagcaaaagcttaggggtccaggtttttgcaggattcctgtcttggtcctttcaaaccaaggagctctgctggctctgccaggccgcctcacatgcccagtgggattctgacccggcctccttggtgcggcagcttctcccgttaacggaagaagacgcttagcccctctgacagggccatggttgttttttcaattaaaatgtcctgg

SEQ ID NO: 90436 - DNA, 1009 bp, Homo sapiens
tagacattttaaatttaaaaatctaagtaaaacaccagccgtgtttctcaggtatgagttaaaagcacaggtgggcgggctccaagcagtccagagggcgatgaggatgccgattgctgggaagatcctggtccctttttgtccccatgttttcaagaggaaggaggacgctgccattttacttgagtgaaagacccttcgtcacgcacgaaacccccgagggctctgggctcggtcctgctgccccgcagtgggcgggctctgtgtgtcttacggttgcatctgttgtacctgagaaacattttttaaacaaaaaaattcaacacaaaagaattttttaagaaaaaaatgctactggcctaaataaggtttatagttaagtatttagtcttaagttgtaagatgctaagtgtagtcataagttacccgagggtgtgtctaaagggaagggggtgctgggacccgcagcctcgccctaaaccagagctcggtttgtttaggtggaagttaaacgagctgagcctcgggacagcaagagccaagcgccgggacagccaggtgccagccagtgggggagccgggttgtgcccaacgctgccaatggctgggcaggccagcccccgcccacgtggcagcaaggatatggcccgcaaggtaaggctgatgcagaggtgcccacgggaatgtcccccttctcggacttggcccgcgcgccctgggctgtgccgtcgctgcggcctccccacctctgctgtgcatgcacagagccgcggttcacagtgtccttgagcccccgcgaggtgccggctgacagccagctcccgggcagcacccgcagcctcctcagtagcggggtggccacggcttaggtgcccgtccggggcctgggactcattgtcaccgggaagagctgcagtgagcgtctgcacctcgcgaccgtgtgccacggcaggtctgagcacgaaaccctgagagggctggcattgccaagctgagctcagaatcgggg

SEQ ID NO: 90437 - DNA, 1297 bp, Homo sapiens
ggtgtgctggcccctcagccagtggtgtcactggggcagtcaggttgggcccagaaacccttccctgacacgtgccaccgatggacgtgccctgacaggaaggacaacgtggggtctggtctgcgacggaggggcaggccctgtatcgctgcaagggcccgtcaggggttttctgaaactccgagagccagctttctagaagcctggtccaccgtgccttgggccatgtgtgtctccaagccccgaggcttctctacctcccctcacccccccaaccacgtcttcgggattgaacagggaagcggtgaggttacgtgggccatggagggctctggaagccgcttttctctgtgtgtgcccctgctcacatgtttttgagggagagaacatgcccggggtcctctccccggcccaggtgctggcctcagaagggccccacccgcaccccgtgggacccgtggactcaaggcaggctcggcggagctgtgtccaggtggcctcgctcgacggcagtgccaaccgcccagggaccgccccgagctcacaggactttctcccccagcaggttacgggcaggacttgagtggcttcggacagggcttctcagaccccagccagcagcctccttcctacgggggtccctccgtgccagggtcggggggcccccccgccggcggcagcggctttggacgagggcagaaccacaacgtgcaagggttccacccctaccgacgctagcccgcggcgccgcgacgtctgcacggcccagacccaggattccaaacttgtgaactcgtgacaatcacaaacttggcggcaaagtggcgactcaaccttgggggggggggcggggggagggcgcgaggcttttggagcggctgtgggtgtcgtctggactgaggtttttaaatatttctttctctaacccatcagcacaataaaaaaaagtcactggttcaacaacagggtttaaaaaaaatgtcttcagctttaattcaaaacttcaggtttctttttcttccttttttttggaaattattttcctgagccttttgttttacggtatattgtaaacttttatgttaaagaaaaaatatacatttacaaattgtgagatttttaagagaaattttctacgatgtatactggcttattttttaatttaaaacggggtttccgtcggcactggtggagggggtgcgctgttagtcccctcgctcctggctttgggggttgggacttggtggtccagaaactctgggagcttctagaagaaatctactgagtgtatttctgt

SEQ ID NO: 90438 - DNA, 1081 bp, Homo sapiens
gccgggaaagcggaagcgcgtgtgcgcgcacggccgagggggcgggacatgccggcagtctcgcgataactgcgcaggcgcggaccaaagcgatctcttctgaggatccggcaagatggtgagtgttgcgatttggcgcgtctctgccgggcctatccggctccatccaacctctgaccgtctcgcgggggccgcagttcgtccccgcggctacggcggcttgctcccgaccctgcaggcggctggatgttggggcgaggggcggacttggtgggtgtcgggacgacgcggggctgggaaggcctgtccgggccttcatgtccgggtcctcgtaacccggagccgcgagtgatccccggggacgggtcgaagcggtgtgtccctgtcgggcttctgtccccggcggcgccgcgcgtcttccgcggtgtcctcgggcccggtggccccgggagatgggtgtcgggatcccgctgacgcccgatccgcgcccgcacaggcagaagtagagcagaagaagaagcggaccttccgcaagttcacctaccgcggcgtggacctcgaccagctgctggacatgtcctagtaagggcggccgcgggggtcgcgggcaggggctgggccagcggtggggcttgtccgggtgagggcggcggggcgggggtccaagcgcctctgcggcggtgggcgggcacggtctccgcgcgggtttggaactgagtgtggtcttgcgcccagaaaactgtccagagacgttgaggtttttgcttatttgcaacctgccccccgttgttcacttttccgcggcttagttggaaggtgtagcccctgtctgtagcccacgtgacttagaataaggggctgcgttagactccttagattttaagggcggtggaggtcgctgggtcctttccaggcagggtggtggtgggcatctggcttgcgcttttattttttaatttttgattattttgaggcggagtctcatcctgtcgcccaggctggagtgcaatggctccgtcccagctcactgcagcctcccactcccgggttcaagcgattctcttgcctcagcctctcgagt

SEQ ID NO: 90439 - DNA, 1427 bp, Homo sapiens
tgggattacaggcgtgaacaccgcgcccgaccttgatttttgattatttgtggaaacagcgtttctctgtgtcgtccaggttggtcttgaactcctgggctcaagcgaccctcccgcctcaacctcccgaagtgctgggatcacaggcgggagccactgcgccctacctgccttcccctgcgtttttagaggcctttggcccgagctgtacgctgcagcaccttgtctgaggctgtggtctccgggccgcttgttctctctgaatctctgcagtcacacggtggctcttgcatgtgaggggtgagtcgcgcatatctggcgggggtgccagagggacttggcgtgttcattgtagtcactacaatggacagtgacaggtccactgcggctctgtccctggagagaaccaagccttagttctctgtccgccggagtgcgtagggtctccccaggccgggccgctcacaaaactgcctggtgcatcctccccagcgagcagctgatgcagctgtacagtgcgcgccagcggcggcggctgaaccggggcctgcggcggaagcagcactccctgctgaagcgcctgcgcaaggccaagaaggaggcgccgcccatggagaagccggaagtggtgaagacgcacctgcgggacatgatcatcctacccgagatggtgggcagcatggtgggcgtctacaacggcaagaccttcaaccaggtggagatcaaggtgtgtgcggccgtccctgccggctggggtgggctggggtcgcctgatgcaggcgggatcagctgacacccagctttgctcttggtctcccgcagcccgagatgatcggccactacctgggcgagttctccatcacctacaagcccgtaaagcatggccggcccggcatcggggccacccactcctcccgcttcatccctctcaagtaatggctcagctaataaaggcgcacatgactccagtcctttgcgcagcttgttcttcctggcgtcccgagctctgggaggggcctgggcctgcttcaggttcgtggtgtgaggaggttcaggttggacgttcgggggtgtgtggtagtgttgtgtggatggtctcttggtgtcgaagactgacagctgtgcgggccctgccccaactcggctgcccctgctcctgtctgcagggacagctgtggagctgggtgcccaagcccaggtgtgtagctccgtcccttttggccccctcagcgttcttgacctcggggcagctgcctggcctcactctgtcttctgggtacctcacgtagagggggccactcctgggctaagtgcagcccctcaagccctcacctggcctgggctctcctttctggcttccctcatctcctgtggagggttcccgcaggaagtgaagcagcagcaggaacctttgggccacctgagcc

SEQ ID NO: 90440 - DNA, 1093 bp, Homo sapiens
gccatcagggctggaccggggcaacagatggggccgggtgaggtaatgctgtcggagctcgggaggaccatgccggtgggcacggcgccccgagttcagcacccacgtgtggtcatgttgggggccagtggcggtcactgtccatcagcctcaggacacctccaccctccctgcgtcctcagaccctcagctccttaggactggccctggagcattggggggcagacgaggaccccttgtcaccctggtgcagagaggccaggtggccaggcaggggccgcggtgggagggaggccttgcagtgggcgtaccttgagttgattgtccagagaccgcggactgcctgtccccttctggagacagctggactgggcggtgaggtgtggctgtggcccccacggcaggggatggagaaggcgaaagtgagctcaggactcggggtgggggtgggaggcggggctggcagccatgttgcgcaccttgctgctgggcaaggcgtcacgggcaggagccagccagacccaagttctgtgagcttccaggcgtctccccatcatcgctgccaccacgctcccccaagaggtagctctgggagttccccacggcccacatggggaaacagaggcagggagctgggagggcgccgcccagagacttacatatgtggaaggcaatgccgcaccaccttcctgcataaccctggccctgtcaccagcgacctggtggctggcttcgccatttccctaccctttggcaattaggggcgcagcgggccggggcgagtgtgagggtgagcacgtgtttggcatccccaagtccaaaagctcagaagagaccaccaggttccccctcgggccatggatggggacagcaagtgtgagacccccgctgtgtcctgaaagggggctcctggcaggcaggaggtcgccccactcagcctgcattttccccgctctctgctcagccatccatgaccccctcttcccccaaaacaacctgacagccttgcctggctgcgaggtcctaggagggagcattgggcacctccagcacctgctgggtggcacacctcggtgacttatggacgtcctgt

SEQ ID NO: 90441 - DNA, 1021 bp, Homo sapiens
atcagccccgccctccactggtctcgccaatgaatcgcgtcccgtttctccaatcggctcggatgtttctttagcccctccccccggttccgcccccccacgcctctcctcgccctggctccacccttcagccaataatcccatcctctgacaccgcccttccaatcagctacgtctcgctccggcccggccaatcggtgccctgggccgccgcgccccgccctctcccggcggggtctgggcagcggcggccgtggcggagggctatgcggcgggggagacggggcaggcccctcctcctttgtccgccctgccctcccattggtcctagcggggggccgggggcggacaccggcgcggggccggagcatcgcggctcaggctgcgggaaagcggtgcgcgtgcagcggggtgggtgccctggtccgcgggcgagctcgagcagccaaccccgggcgcgtcggggccatggacggcctgaggcagcgcgtggagcacttcctggagcaaaggaacctggtcaccgaagtgctgggggcgctggaggccaagaccggggtggagaagcggtatctggctgcaggtgagccgtcggcgctagcccgtttcgccgacgggcacaccgaggccatgggcctgggggtcgcagaccggactccttccccggctacggggtccggtccggccggtggagcgcgcgaggtgactgggacctcgaggtccgcccgcagcccttcccttgcccgcgccctgcgaccctgctcccgggccacccctctctagcttccgcccctggccgccccccgacgcctccttccgggcgctgggtgcctgccatgccgaagtccggttcttccagttgcccagtggccccagaggggtcgggatgccagtgtcctgcgcgtttcgccgtcccccttcccccgtggaccccggcctggctgcaacagtagagatcttcccgtttttctgaggggaggctcctggcgggaaggggaacggaccgtcctgggggcctgcc

SEQ ID NO: 90442 - DNA, 1047 bp, Homo sapiens
tccccagcagctgggactacaggcacacaccgccatgcctggctaatcttttgtatttttagtagagatggggtttcaccgtgttagccaggatggtctccatctcctgacctcgtgatccacctgcctcggcctcccaaagtgctggggttacaggtgtgagccaccgcgcccggctgcaaacacttcactgggcagctattccgcacccacccccactgcccagcgtcgagctcctgcctgcccttggggagctctcaaccccggtgggggacatggacacgttgaccagttacaggcacaaggctcagggcctagaggcacgatgggggatgtacaggcacatcaggggcagtggacatatcctggaggcggctcctgggaggaggtgacggttgcagtcttcgtcgactgaaaggcggcctgggtaccgtcgtgggggctcagcgggtccccagccctggcacaccaccgcctctctccggcaggagccgtcactctgctaagcctgtatctgctgttcggctacggagcgtctctgctgtgcaatctcatcggatttgtgtaccccgcatatgcctcgtgagtgcacggctggctgcccacgcggggggttctgggggctccctggcagcccctgaccctgctgcaccctccctgcagaatcaaagctatcgagagcccaagcaaggacgacgacactgtgtggctcacctactgggtggtgtacgccctgtttgggctggccgagttcttcagcgatctactcctgtcctggttccctttctactacgtgggcaaggtgggccctgccagggcgggcacagccgtggagcgcatggggcttggggattcctgggaggcgctggggccagaaagtccggaggataccaggagatgggggatgtgaggggaagactcagtcccttccctggggaaacgagccctgtccgggggctgatggtggagggcccaccctgaagggtgtctgatggtggagacccaagcctgctccaataggatgtccgatggtggagggctcaccct

SEQ ID NO: 90443 - DNA, 1046 bp, Homo sapiens
gtcctactgggacaggcctgggtctccaccgtcagacacactttaggggtgggccctgtgccatcagacatattattggaataagcctgggtctccaccatcagacaccctttaagtgagccctccaccatcagacatcctatttgagcaggcttgggtctccaccatcagacacccttcagggtgggccctccaccatcagacatcctgtagggtgagccctccaccatcggacatcctattggagcaggcttgggtctccaccatcagacacccttcagggtgggccctccaccatcagcccccggacagggctcgtttccccagggaagggactgagtcttcccctcacatcccccatctcctggtatcctccggactttctggccccagcgcctcccaggaatccccaagccccatgcgctccacggctgtgcccgccctggcagggcccaccttgcccacgtagtagaaagggaaccaggacaggagtagatcgctgaagaactcggccagcccaaacagggcgtacaccacccagtaggtgagccacacagtgtcgtcgtccttgcttgggctctcgatagctttgattctgcagggagggtgcagcagggtcaggggctgccagggagcccccagaaccccccgcgtgggcagccagccgtgcactcacgaggcatatgcggggtacacaaatccgatgagattgcacagcagagacgctccgtagccgaacagcagatacaggcttagcagagtgacggctcctgccggagagaggcggtggtgtgccagggctggggacccgctgagcccccacgacggtacccaggccgcctttcagtcgacgaagactgcaaccgtcacctcctcccaggagccgcctccaggatatgtccactgcccctgatgtgcctgtacatcccccatcgtgcctctaggccctgagccttgtgcctgtaactggtcaacgtgtccatgtcccccaccggggttgagagctccccaagggcaggcaggagctcgacgctgggcagtggggg

SEQ ID NO: 90444 - DNA, 1057 bp, Homo sapiens
ggtcaggttacaataaaccggagagaaaaggtccgcttgcactttttttagttttcttatttttagacacccctcccctccagggtgatctttaaaaaagcaaaacaaaaaacacgacttttccagcgctcagcgttttttcctttcgtccgaagccgttttctgatttgacttttctcgccggccggtctcaggccgcacagacgttccagaggaggagggtgacatttttactccctttttggggctaaccatttatgcttttgtacatcaaccgtgcgcggccggagggggcaggggggcgggggcgaggggcgttccaatcaaatttctaactttctgttaattattaatcccctttttactgcggtttctgttgtcatttttaaaatttttttaatttttttttttttttacttttactttttacctcttgtgtatatgtagggaatttatagggaaatatgtactttatggaataaattttaagaactaaaatatattttattttaaataaagtaatggacctttaatcttacacagctaaattactgattatatatttgctgagctgatttaagggttaaaaaaattgtatcaagagttttattttttgacttcaaagccttcttaataaagcctcttttctacatgtgagcacacggcttcagcgtggtgtgggggatgggcaccaggaggggagaccccggggcaggggacacccggatccagcccctcaaccccccagttccgtggtccaggccctcaccccgaccaggcactgtcccttgttccagacgaaggaattgggtctgtgggggagggtctagctgggctccccgtgagcaaacctcaggtcctccccatccctgtgggtgttcaaccatggatcccacagagaaaggggacccaggctgtccttcctcagggacatctgcccagctctctgggtgtgtgggatccatcccaacagaccgtccagcggtcgtgcagatggggaaactgaggcctggaaatgcccgtcccaggtttgaccccgatgcatcctggtctgtga

SEQ ID NO: 90445 - DNA, 1043 bp, Homo sapiens
tcaccgacgcgggccccgacagcgacttccacgccaacggcaccgacgtctgcctggacctgctcggggcggccgccagcctctgggccaagacccccaaccagggacgacggccccccacggccacggccggcctccgcggggacacggccctgggcgcccccagcgcccccgaggccttctacgcgggcagccgcggcggcccctccgtgccggacccaggccccgccagcccctacagcggctccggcaacgggggcttcgccttcggcgcggagggtcccggtgccccggtggggacggccgcccccgacgactgcgacttcggcttcgacttcgacttcctggcgctggacctgaccgtgcccgccgcggccaccatctgggcgccttttgagcgcgccgcccccttgcccgccttcagcggctgctccacggtcaacggagccccgggacctcccgccgccggcgcccggcgcagcagtggggccgggaccccccgccactcgcccacgctgcccgagcccggcggcctccgcctggagctcccgctgtctcgccgtggcgccccggacccggtgggcgcgctgtcctggcgacccccgcagggccccgtatccttcccaggcggcgccgccttctccacggccacctcgctgcccagcagccccgcggccgccgcctgcgcccccctggactccggcgcctccgagaacagccgcaagcccccttcggcgtcctcggccccggccctggcgcgagagtgcgtggtgtgcgccgagggcgaggtgatggctgcgctggtcccctgcggccacaacctcttctgcatggactgcgccgtccgcatctgcggcaagagcgagcccgagtgtcccgcctgccgcacgccggccacccaggccattcatatcttttcctagagcgcggaccaccacgtggccggggccatctgcgggggccaggggtgggcgcgggagacggggcgggacccggggtgggagagggacggggagggggcgaggggcggaggccgagggggc

SEQ ID NO: 90446 - DNA, 1050 bp, Homo sapiens
ccatgctgaagtacagtggcgccgttactactcacagcagcctctacctcccgggctcaagtggttctctcagcacagcctcctgagtagctgggaccacaggtatgcagcgtgacacctggctaatttttgaattattttgtagagacaggagtctcactgtgttgtccaggctggtctcaaactcctaagctcaatcagtcctcccacctcgccctcccaagatgctgggattacaggcgggagtcgccacgcctggcctaacttgcttttttttctgttatgaatgtagtaacacaagcgggagagggaatttagaaatggaacccaagttggggttccttccaagaaggtggcagctcccattcttggggcatttccgtggcctgtctgggccacagctgccccgtggtgacctctccacttgcggctgtttgtccactgcctggcaggggtgggacctggctgcacggatgagacgctgctgtcggccatcgccagcgccctgcacactagcaccatgcccatcacgggacagctctcggccgccgtggagaagaaccccggcgtatggctcaacaccacgcagcccctgtgcaaagccttcatggtgaccgacgaggacatcaggtagccccttggcctggtcccctgctgctccaccctgtctcttgtggccgtggggaccctgagtgtccccgtgtgcctgcgtgcttcccgtctccccacgatgctgctggggttttgaaacagaaacagccagggcaaggggacccatcgtcggagcagtatgaaccgtttcacccgcgtcctgggttcagggcgagccaggcaccccttggaggaatgttcttgaaaagagtgtggtcctttgagtccgtgaggactggctatgctgggtgctgggctccatgttgggccctggagacggagggacagggcaggccaggagtctctgccttcagggagatggctctgggtgcctgctgaggggcagttctgatgtgcagagcctcggaacgaacagcagggaacacggccgctcagaaa

SEQ ID NO: 90447 - DNA, 1050 bp, Homo sapiens
caggctgtagtgcaatggtgcggtctcagctcactgcaacctccacttcctgggttcaagtgattctcctgcctcagcctcccaagtagctgggattacaggcgcccgtcaccacaccggacttttttttgtatttttagtagataaggggtttcaccatgttgaccaggctggtctcaaactcctgacctcaggtgatccacccacttcggcctcctaaagtgctgggattacaggcgtgagccaccccatgtgtattttttattcttatttacaaacgtccactggatccctggctgtggaaagcctgggcagggtctggagacccaaggcagtgggaggggagatgccccattgggacccacatggggcaaggaggccaggtgggcctccctggagcccagcaaggacctggagtggggagagggcagggccactcttgaggttcacatatgtgtctggggcagctcttctgggagaagaagctgagcggcctgaacgccttcgacattgctgaggagctggtcaagaccatggacctccccaagggcctgcagggtgagcgggcaccctgaggggaggcggaaggggatgtgccgggtggggtggaggtgctgcaggtgccctcatctcctggcagggtggatggctgttcctgctttgggtgcttagggcaaatctgccagcgactggggcaggaggaggggacccagtggggttggggatgggtaagggcgcttgggctgggcccttcattcttgaccttggagaccctgcgggtggggctttgtggcttccaggtgtggcgcaggcctggggctgttttcacctgcaggacgtgcagttttgccatggagatcctaaataaacaaacaaggacagctgactttgcttctgtactctcccagcacgtccacaccacagaacaaagaatgcagctcttgcatggttttggtggttgttttttgagacagggtcggctgggtacagtggctcacacctataatcccagcacttggcggggctggggcaggagtttcacttgatctc

SEQ ID NO: 90448 - DNA, 1032 bp, Homo sapiens
gtaggtagtagcgtttgtacccgaactcagcgtctgctgtgcctgacgctgccagggcctacggtggggaggattcagaggggaccggggttgggggtctggagcaaggatccgatgtggaggctggggctagggccagggtgtgaggatcggggccagtgctctgggtctggctggcgcccagatctaggggccagttgtggggtgctggggtctgggatgaaggtctggggtcacgccagggttggggtctggggctggggccagggcctgcctgggtttggggtcagggccgtgttggggtctggggctggggtcgcgacctgaagctggggctgggactgggtttgggtctgcggccgaggcctgggtttggggtctggggtccgcccggggcgccgaccgtcccgcctccccgcagcccgagcgggaagaagttccgcagcaagccgcagctggcgcgctacctgggcggctccatggacctgagcaccttcgacttccgcacgggcaagatgctgatgagcaagatgaacaagagccgccagcgcgtgcgctacgactcctccaaccaggtcaaggtgagtggtggcgtcacgcaggtgacgtcggcgcggggcgttctaggcggggacgcggccatgacgtgagctgcaggcgacacagcccggcgtcctgagcgcaggaggtcacagcgggcggagggcacagagcggaaggcgcaggccacagggtgcagagcgcaaggcgcatggcgaggacgcggcccgcggcgggcgttccagagccggccggaccgaccctgcgggagcggcctccccggaccgtgggggtcctggcgggcgcgggggacacgaggggcgccggcaaagcagggggtcacccgggccccgcaccccctgaggctccgcgccgccggggcgcccccaggccggactgcatatccttcctcccgcagggcaagcccgacctgaacacggcgctgcccgtgcgccagacggcgtccatcttcaagcagccggtgaccaagat

SEQ ID NO: 90449 - DNA, 1040 bp, Homo sapiens
gatcctcgccagctgtgtggcctcaggtgagggcctcgccctgtctgttgtttggtgtcctcgcctgggaacagggactgtgatggcggcacctgcctgagtcctgcagctgtggcagggatggatgaatttctgcagactgcagcagaccggacccatcatcatggtggttgcaaacttacaaacacctacacatgcgccaggcccagcctccccccagctccactcccaccccagcagccccttgagcagttactggcttcctgagagccggcagcatgggcagggcctgtgctgctggtgccagccctcagggctcacagcactgggcgggcacaggtgccaggcccgcacctcagccatcaccgctcaggacggggggccggggtgggcaggagagggtcttggagaaagggtccagagcaggcctgaccatcccctctcctctcgcagggtcccgacggcctacacatggggcgctgtgggcgccgtggggctggtgtgggccaccgattggcggctgatcctggactgggtaccttacatcaatggcaagtttaagaaggataattaattacacaaacccttcacagactgctctggtaagtttcagtgggctgcggtgggtggactgcatgatggccggatggtggccgaagagtgggttctccaggctcccagagccggggcggcagccctcactgctccccctggagagacctgcattcgagagtggggccctgggtgccccttctggcatctccggcccacgggcacagaactgtccgccccgcagccttgggttgtgtgattggggtgtgggcctcgccctccctctggacaatcccagtgagtctttgaggcaaaccttgcttccgtctcagtgggcactgcagcctgaactgggtggggcccatgttacagacagagggggaaggtggaggctggcccacagtggctggacaccccatgagctcttggaagcgcctgtgaggccctggacgcatccacgtgtttctccagcatgccagctgccccct

SEQ ID NO: 90450 - DNA, 2205 bp, Homo sapiens
accagccgtgtacctgcactgcagtgcctgacaccagctgtgtaactgcactgctgcccacaccaacaccagccgtgtacccacactgctgtgtccaccaacgtaagccgtgtacccgcactgctgcccacacccacaccagccgtgtacccgcactgctgcccacaccaacaccagccgtgtacctgcactgctgcccacaccaacaccagccgtgtacccacactgctgtgcccaccaatgtaagccatgtacctgcactgctgcccacactgctgtgcccaccaacaccagccgtgtacccacactgctgcccacaccagcacaaacacaagtagctggataccctctccacaacccagccctgccctcccacccagccttggcgcatcactaacagaggcctcggtgctgtgacccagcagtacggacgaggtgctgtccctggaggagaaagacctgagggaccgggagaggcgcatggccaataacgcgcgggagcgggtgcgcgtgcgggatattaacgaggccttccgggagctggggcgcatgtgccagatgcacctcaagtcggacaaagcgcagaccaagctgctcatcctgcagcaggccgtgcaggtcatcctggggctggagcagcaggtgcgaggtaggctccccggccagggctgccccagcaccctctcccttccccacacccaggtgcagatgctggggtcctcctgtgcttgccgcccccggactctgtccatgtctgtctttgtggctggactcagacccagtgatgttccccagacaccccctgatacccactctcttctttacaagcctccaccccatccccccagccttctcaaggaaggaggtgagagccggaaatacaggaggccacacgtgatggggctctgcccccacccccccccccgacatcctaccccccactcccacctcacatctttctcctccctgggaccgtctcccacagagctctcccccctccctccagagcggaacctgaatcccaaagcagcctgtttgaaacggcgagaagaggaaaaggtgtcaggtgtggttggagacccccagatggtgctttcagctccccacccaggcctgagcgaagcccacaaccccgccgggcacatgtgaaaggtatgcctccgtgggacgagccacccgctttcagccctgtgctctggccccagaacggccactcgagaccccgggcttcatccacatccacacctcacacacctgttgtcagcatcgagccaacaccaacctgacaaggttcggagtgatgggggcggccaaggtgacactgggtccaggagctccctggggccctggcctaccactcactggcctcgctccccctgtccccgaatctcagccaccgtgtcactctgtgacctgtcccatggatcctgaaactgcatcttggccctgttgcctgggctgacaggagcattttttttttttccagtaaacaaaacctgaaagcaagcaacaaaacatacactttgtcagagaagaaaaaaatgccttaactataaaaagcggagaaatggaaacatatcactcaagggggatgctgtggaaacctggcttattcttctaaagccaccagcaaattgtgcctaagcgaaatattttttttaaggaaaataaaaacattagttacaagattttttttttcttaatgtagatgaaaattagcaaggatgctgcctttggtctctggtttttttaagctttttttgcatatgttttgtaagcaacaaatttttttgtataaaagtcccgtgtctctcgctatttctgctgctgttcctagactgagcattgcatttcttgatcaaccagatgattaaacgttgtattaaaaagaccccgtgtaaacctgagcccccccgtccccccccccccccggaagccactgcacacagacagaacggggacaggcggcgggtcttttgtttttttgatgttgggggttctcttggttttgtcatgtggaaagtgatgcgtgggcgttccctgatgaaggcaccttggggcttccctgccgcatcctctcccctcaggaaggggactgacctgggcttgggggaagggacgtcagcaaggtggctctgaccctcccaggtgactctgccaagcagctgtggcccccagggctaccctacacaacgccctccccag

SEQ ID NO: 90451 - DNA, 1050 bp, Homo sapiens
acctgctgctccagccccaggatgacctgcacggcctgctgcaggatgagcagcttggtctgcgctttgtccgacttgaggtgcatctggcacatgcgccccagctcccggaaggcctcgttaatatcccgcacgcgcacccgctcccgcgcgttattggccatgcgcctctcccggtccctcaggtctttctcctccagggacagcacctcgtccgtactgctgggtcacagcaccgaggcctctgttagtgatgcgccaaggctgggtgggagggcagggctgggttgtggagagggtatccagctacttgtgtttgtgctggtgtgggcagcagtgtgggtacacggctggtgttggtgggcacagcagtgtgggcagcagtgcaggtacatggcttacattggtgggcacagcagtgtgggtacacggctggtgttggtgtgggcagcagtgcaggtacacggctggtgttggtgtgggcagcagtgcgggtacacggctggtgtgggtgtgggcagcagtgcgggtacacggcttacgttggtggacacagcagtgtgggtacacggctggtgttggtgtgggcagcagtgcagttacacagctggtgtcaggcactgcagtgcaggtacacggctggtgtcgggcacagcaatgcaggtacatggctggtgtgggtgtggacagcagtgggggtacacggctggtgtgggcagcagtgcgggtacacagcttacgttgctgggcacagcaatgtgggtacatggctggtgctgctgtgggcagcagtgcagttacacagctggtgtcaggcactgcagtgtaggtacacggctggtgtcgggcacagcaatgcaggtacatggctggtgtgggtgtggacagcagtgggggtacacggctggtgttggtgtgggcagcagtacgggtccacatgctgatgtgtgtgttgtcacatgcgtgaaaatgtgcttctctgtgcacgcggcgaatgtgctccctggaatgcagcagagccccatggtggggcgcctgtgtgtgtacgcg

SEQ ID NO: 90452 - DNA, 1633 bp, Homo sapiens
ggggtttcaccatgttagccaggatggtcttgatctcctgacctcgtgatccacccacctcggcctcccaaaatgctggcattacaggtgtgagctggtgtgagccactgtgcccatccgaagtgttccatatttttaagttaatgattgaaacagtttactttcaccaaaaaagaagagtgttcttttagcatcttagtagattcctgccattgagttgctgcagaatttctacacactttgttccaaaggtggtaaaactgtttccctttcatcttgtggtccttaatctgtctggcattggtagctacacatggcgtgaggtagggatccagttctggttgttggttttttgtttttatttttggccaagacctggtttttccaggaaagcccaagtccctcaccacaggagcacaaagagatatgtcagttggccctggaggccgacgcaggcccctgaccctaggcctgttgcagggctagggcgagcaggtgccacggcggccgccagcgagatcaagcgggaggagaaggaggacgaggagaacacgtcagcggctgaccactcggaggaggagaagaaggagctgaaggccccccgggcccggaccaggtgccaacccacccctcggcactccccaccctcaccccatcaggacgcacatgtgcacaggccacacgcacaccgcacccacactgggaggccgtcggcgggccccacgctcttcccccaacctcactgtctccctctggccccctcccggcgccctccccatagcccagacgaggacgaggacgaccttctccccccagagcagaaggccgagcgggagaaggagcgccgggtggccaataacgcccgggagcggctgcgggtccgtgacatcaacgaggcctttaaggagctggggcgcatgtgccaactgcacctcaacagcgagaagccccagaccaaactgctcatcctgcaccaggctgtctcggtcatcctgaacttggagcagcaagtgcgaggtcagtgggggcgcgggccaccagcgtccctgcagcgccaccctccctcgtgttcctgccctcgttctccttccccgcccgccttcctggagccagccctccctctgcagcagttgcctccttgcagtgactgtgcccttcacccctctgaccgcattgccatgactgtccactcctgactgccagcccttctccctgcctgcctcagcatcccctccacagtgggaggactggactctttctggacccctagtccttcaggcctgggctctgtggctcagaactgtatctcccagctccacggggctcccactcgccgtggtcctcctttcttgggaagcccagaacccagctcacagaggccagtgtcccccgatcccagagacaggagctggtgtgcaaaccaccctggccccttcccgtcaggcagatgccacgcaaggccacatgagcccatcccctgtctctgactcagtttccctatctgaaggtgatagggaaacttcctatcacccccatttcccagggccagggggaggaaggatacagacagaccctgtccccacccgcagatgtgagctgactccttccccccgctggcgctggcggctgcttc

SEQ ID NO: 90453 - DNA, 1046 bp, Homo sapiens
agggaggcgggaggtgggggctggaaaaggagtaggagagagagaccaggacatcataagaacctcaaacttggccaggggctgggatttacctaaaggggggtggctttacagggaagggaaacggggtggtagatgtgctaccaggaggggacaggaggccggcaaggtgcatgggctgatcgtggtccctccgtcctgactgcaccccccaccgcccacccgcccgcaggtgtacccacccagctcaggtgaggactacggcagggatgccaccgcctacccgtccgccaagacccccagcagcacctatcccgcccccttctacgtggcaggtacatggcagggcgggggctcgccagggacggtagggcagggctggggttccccactcggcccccaccttaccagctcccctccacagatggcagcctgcacccctcagccgagctctggagtcccccgggccaggcgggcttcgggcccatgctgggtgggggctcatccccgctgcccctcccgcccggtagcggcccggtgggcagcagtggaagcagcagcacgtttggtggcctgcaccagcacgagcgtatggtaggacccagggcagggggcagggggtgggcggagggtggcagtgcccatctaacccaccctcctcctgcctgaccccccagggctaccagctgcatggagcagaggtgaacggtgggctcccatctgcatcctccttctcctcagcccccggagccacgtacggcggcgtctccagccacacgccgcctgtcagcggggccgacagcctcctgggtatggcccctccctgggatgcggcctctccgaggggacactgggctccaggcagggtctgggtggggggtggcgaggactccacgggaggcgcaggcgcgtctgctggccctgagagcgggttgttgtcagttctcattgtccgctgtctgcagggcctgccacgtgcgttgggcttgggatgtctggaaacagatctttgaggagcggctttcccgccttacagctgggaaaga

SEQ ID NO: 90454 - DNA, 1027 bp, Homo sapiens
cccgtccccacctggggacccctggggaaagtcgagactggaggggcctggagtgcatttctttggaatggaaatttttctctgtacctttttctgggggtggaatgggtcttggcaggtggatcccccatcccccatcttagaatggagccccctgggaccacgcgggagcaccctggtcttgagacgctctccccgctcatggagggcaggcaagggatgttgtcaaagttttgcttaaaaataattcccggatacatcgcgacagtaaagcaatctagggctgttttttttttctttcctgaatactgttggggttttcttggggggagggagattgagggtggaggaaagctttgctggtccctgcataggatgcgcgtcccccccacccccggcactttaagtcttgaagcttgtaaaagagtttcgtggttttctgacttgtggatttccttcatgttgaatttgggggcgacctggtcttcaacgggctgtgccatctgctgggggaggggggaatcaccaaatttccctcggggcggggtaggatcgggctgttcctccctttcccgggggtagggggcctcagaggaagcccggggttggttggaaatgagagagttggagaaaggagaggttctggctgccctgcgtgcagtttaaacttggcaacttgatgccctggtgttccctgggggagttagggagtttatatttgcacaccctccccccatttttcagactccctgtggtctctggggaggactctgcagggacctagactctggaattccagcttccctgcgcctgctcccagggctccccgtgcccccagggctctgctggaactcagaccccagggcggttgagggttttttaggtggcttttagcactctgtgctttgaccactcacaactcttctcccctccctgtttctccctgtccatctgtccccacatccaccaagcagggtttccaggcctgaggtgcccgccctggccccaggagaatgaaccagccgca

SEQ ID NO: 90455 - DNA, 1060 bp, Homo sapiens
aagaaacagaacaagccagagaacagaaaggtatacctctgcctctctctctccctctccctctctctccctctctctctctcttgcgctcgctctctctctctcttcctttctttcctaaaggactcatttaaataagaaatctgtaaacgccactggtcctttctgccgcagtctctctcgcgatcacgctccctctaactttccctctggtctccagccctgacattcaatgcgtctcccacggaactcgtcaaagaaacgacatgccatcgtctgcaaaattataatttaacggtataaagcttcaagtcacgtattccaaaaactagctaaggatttttttttaatcacataaactatacattaaatattttgaggtatttcagagaaaattgtcaaaggctcgaaggaattgtgctggaggtgttgatccctgcatggagaacgcatgctctttggtatgtgacagccaagtgggcatgcggggaggcaggagagggcctgaggggccggcgggcaggtcggggatagagccttctgtgggggtctggccaagtttggggtggggtccggaaacaggtaggggtgtgtgtgtgtgtgtgtgtgtgtgtgtgtgtgtgtgtgtgtgtgtgatacgaagatatctgaaaaggatccaggagtcctgggccactttatttatttttttttgtagaagtggggtcttgctgtgttgcccaggctggtctcaaactcctggcctcaagcgatcctcctgtctcggcctcccaaagtgctgctgggccacttctgtgaccaagaggcttgacctgatctgaccacagttcagcatagctaaaacattccacaaccagaacgatcccaagccaagtcctaaatttccagcaggggacaaaactggaggccccctagcgtgttacccttggggccttgaaggccaagcagagggcatctaggagacccagcaccccgccaggcccgtgctccggccagtgcctgaagcccaggcatcgattttctaagaagctcactgggccagggctgcagcgtgattctc

SEQ ID NO: 90456 - DNA, 1138 bp, Homo sapiens
gggtgctgcccggggcagcgctgccaagaggcctctgcagagggcactggtctccctggatccaggcctgggcgtcctggctgccacacgactgccggggcctggtctgcttccagctccaccaagaggctgaggcctcctgtcctcagtcctcactccctagtagggctcggtagatgcaggtggtcagtgccccgggggctgtggagtgggcctggccgggccctgactgtgtgtctgtgtcccctgcagtggccggaggctgggagacccagtacatgtgctgctcggctgccgccggctctgtcggctgccaagtcgcaaaggtgagccctggcgtcccagtcccctctgcctgttctcaacagacttctgcctccccatcgttggtgtggggtctcgggacacagcacagtcctgggctcagggtctgggcccccgggcagcctttcttgtgttacccagagaacgtagcacccgtaggccccaggccctgtccctggccacttcccatcctgggaagccgtcctccctgtgtcttcttggcaagcccccttccccacctgctcaccagggtcccaaccagtgaatgggcgtgatggatggataggatggtcccgaagggctcagagatgtgctgctgctgccacccccgcccccactgcaccccgaagctgccctcacctgccttctccacccccagcaacacgtgcaggatggccggaaggagcgccttgagggcttcgtgaagacctttgagaaagagctctcaggagacacccacccggggatctacgccctggactgcgagatggtgaggctgttctctgcccagcgtcgggttcaggattggggaggacctggcctggtgcggccgccccatctggccccatctgggcctggctcaccggccagcgctcagggtttctctcgcagcaccggtgcctgtggctcctgccctggaccaacaccccatacttcccagcagagccaagcacaccgggcactgggccccggctctgcctctgaatgggaggcaggagggctttgcgaaagggggttactgaggtcacaccccactcggcctctcctagaagtcccacagagtctctggtcactgcctctgcctggaggggct

SEQ ID NO: 90457 - DNA, 1030 bp, Homo sapiens
cacgttgtccaggctgatcttgaactcttgtcctcaagtgatcctcctgcctcagcctcccaaagtgctgggattataggcgtgagccaccacgcttggccttgttttgtttttaattaatagactttatgttttttgagcaactttaggtttctaggaaaattgagcagaaagtacagcaagttcccttgtgcccccatggcctcagtttcccatgaccttagttccgctgccctcagtttcccctgctgctcctgtcttgccttggcgtgtctgtccctactgcagccaggctgatctgtcccagcgcacctcactcttgcctccagccatgggcacggcctcatcgcgtctgcgttccccgctggaggccttgtggaggccctcacccatggcagcttttgccttccctctagagtttaaagaaacccattatccccaaagagtttgggggcaaagtccccaccgtcatccgccagcgctatctcaacctgttcatcgaggagtgtctcaagttctgtacctccaaccaggaggccatagagaaggtgaggtcctggagttcctatctggccggtcgggtggggactaggggtccagggtggtccccagacatcccccggcctctcagccgcagctgtgacccggagctgcctgggagagatgcaagtccccgaccccatggcgaccccaccgctggggctccccggcaccaggcaggcatggcctcagctgggcaccgcctgtcccccaggcactgaacgaggagaaggtggcctatgaccgcagccccagcaagaacatctacctgaatgtggccgtgaacaccctcaagaagctcaggggcctggcccccagcgctgtgcccggcctcagcagtgagtcctggcgggtgggcgggggaggctcagggttgctcttggggtggcagctgggctgggaccctcgctgggaccttcacagccctgagctcagccacagtctcagacaaaaggaaagcgcggtgctgtgggggggctgcctgctgcct

SEQ ID NO: 90458 - DNA, 1070 bp, Homo sapiens
ggtgccgagcccccagtccagaagcccccctgccacacagacgtacatgcccaggttgcagctgcccgcgtggccagccctccgaagcagcccctgcaggcctggcctcctccctctggtttgtgacttcatcaaagggcaaggcagaacacagaggccgcagggcagggcaaagccaatgagcaggtgggggcacccgagacccttcggtcctctgtccgggagccagggcctttccctcagacatcgacgccttgggcttggggtcagaacacgtggcagaggcctggaccaccccaccggtgacgtgtcctcagcggcctccgcagcctgacctgtgtcctctgcctcgatggacttgcctgaaggcagctagagcctgatgccattgcgcagccccagcccctcaccctggcccggccccctgcacgcggagatgcacgtgctgctggcgctgagcggccgcggctgcctggtgctccgccacgtggtgatgggcagccactcgccctgtgcccacaccccctgtgccccgccagcccccacaggtgccaagaggacccttgcggccagcggcagccagtcctccaacggccctgagccaggtggccagcagctgaaaacacgcacattgtcggggatggcgtccaagactaccaccaccatcatccctaagcgaatcgcccacagtccatccttacaggtagcccctcccatctcggccaggaccaccacccccaagaccacgccctgaggcccggccacatgggacctgcggagggccagcctcgcccctgccctgcgggccttcgtgctccacaccgcagtacagccttcaccttccctccccatgccttggtgttttttttttttttttgagatggagtctcgctctgtcgcccaggctggagtgcagtggcacgatcttggctcactgcaagctctgcttcctgggttcacgccattctctggcctcagcctcctgagtagctgggactacaggcgcccgccaccacgcctggctgtttttgtatttttagtagaaacggggtttcaccatgttagccagg

SEQ ID NO: 90459 - DNA, 1970 bp, Homo sapiens
gcggccggcagaggcccaccccgccccctccagctgcccgacaggaagagcaccaaggccccgtcggggaagctagtggagcggaaagcccgctcactagacgagggcgcctcccaggacgcccccaagctgaagaagcgggccctgagccacgccgacctctttggggacgagagtgaggacgaggccgcagggccaggggtgccgagcgtgtggccctctgccctccccagcctcagctcggactcagactccgactcagactccagcctgggcttcccggaggcgcaggggccgcccaagcggctcaaggcctccccgcccccctcccccgccccatcctcctcctcctcctcctcctcctccacctccagcgcgggggcggatgtggactactcggccctggagaaggaggtggactttgactccgaccccatggaggagtgcctgcggatcttcaacgagtccaccagcgtcaagacggaggacagaggccggctggcccggcaggtgaggcgcgcgggtgctggggctgggctcgggcagaggcagagccgagggcctggtgagagaccttctatctggagtggtttccagttggctcggaggcacggggtggaggcagctcctcagtgctggtccctgagcccgttgaaatctcaggagctcaggagcacccgggcagccctgttgctcctgttgcccctcacccacccagaggtcactggcccgtggccaccagccaggcttctgtggccacgtgcacacggtctgttcccactgactggcagggggatattggcccacccacccacctcaggggaatccacctccggcacacccttctagcccctctcccctcgcctcccctttcctcccttccccctctcttctcccctcctcccttcccccatctctgtctcttctcttccagctcctctgtctcctctccttgcctcctcctcatcccctccggctcctttctcctcccctccctcctccctactcccagcgtggcgagctcttgctctcctgggccagccctggacccctgggtctcctggccccgtgtccccaaattggccaccagggggagctcactccacacagactgagcccaagtgctcagcccgcagcagctggttcggcccaaggtggcctcgctttcccagtgtgctttcattctgcagccctggggtctccaagctggggccctgggtgcccaggagaggtagccttgggcatctgcagaacgtgtgacacctgcccacccctccgactgcacccacacaaagcccagggactgttggccctgagccctcagctgctgtgcctgggggctggactgttccattccccacttgccgggggcagtttgaggttggggtgtgttggtgttggcagcgagggcagacctgtgctgacggacggacatgtgtcttagccccccaaggaagagaagagtgaggagaaggggctttcgggtctgaccactctgttccccgggcagaagaggaggatctcccacctttccaagcaaggccaggaggtaaggtccgcagaggccaggccagcaggagccttttttttttttttttttaaagacgaggttggcctggtttggtggctcacgcctgtaatcccagcactttgggaggccaaggcgggtggatcacctgaggccaggagttcgagaccagcctggccagcatggcaaaaccccatctgtactaaaaatacaaaaattagctgggcatggtgatgggtgcctgtaataccagctactagagaggctgaggcaggagaatcgcttgaactcaggaggcagaggttacagtgagccaagattgcaccactgcactccagcctgggtgatagagcaagactctgtctcaaaaaaaaaaaattataaaaaaagggggtcttgctttgtcacccaggctggtcttccaactcctgacctcaagtga

SEQ ID NO: 90460 - DNA, 1044 bp, Homo sapiens
gacaatcaactctcccttaacgacgactgcggctgttgggctgcgctgccctccctggcctgcaggtggggccgtggagcccatgcccgccggggttgcaggctcttccgggcctgggctgcagcctggcccggccctgcttccctggcctcccctccttctcctgggtgcttggaagaggtgggtcctggcccgtggttgaggtcttgcctcgtggactggaagcagagggctggctgtgcagcctcctggggtagctcgttttttttgcaccgggtagaatattttttcaggcacggattcctttttttctgggcccccatgggtggtccggcatcctcagggggtgtgagtgtgtgtggggggtctctgagctgaacttgggtggggtggggacttgttcctcgggggccacctttgtgtccttgtcagcggtcgtcctgctgtggcctgggttgcatttcctcttggggggggtattgaggacccccagcctggaatgagaagggtccccggttccatgtcagacccagaaaggtggatccccccactgttggctgcaggaggtttttggtacccccttttgttccagaaccgtcctgcctctcgcttggggacaggggggctttggatggcactggtgtgcacctggacccagccccggcctggcaggatccagggatgggtgcctgggatcctggggggagggaggcaggggacgcccttctggagctgggctcggagggtcctgccccatccagccctcggctctctgtgttctctgtccctagcctcaaaccctcttctggcagcgctagtgagatgccttagtctgtgggggtgggtgggggactggggccccgttttcctttgtgagtcttggttggccccagccctggcaggggcctgtctggagcaggggtaggtagggctgtgggttccagaactctataactgggcccctctccagtgtccaggggcttggagagacctgcgcccacccctccactctcccaggagtcgctgatcactgggacctggttc

SEQ ID NO: 90461 - DNA, 1142 bp, Homo sapiens
cacccaagaggcgcttccataggcccccgggtattggggcagcggtccctaagccagcagggaggggagggatgggtttggagtcctgggaaggcagtattgttatcccgggattgcagtaagaaacaggcctgggggtgcccagtcgggcatccccaggggtggatgcagttgtgctgatggcgcgccaccgtctaccctgtgtggtgggggagggcagggcggatctcctggcaccctcccccaccccttgagcctgctgacgtcccattccaaagccccctttacagtaacgatttggggactgggagggcagtcccaggcccaggcaccttggattcggtttccaaagggttttggatacttgtggctttccaggctcctcttccgggcctccccagcccccaggaccaccaaggggtctgtgtaaacggcctcttttagtggaaggtggtctggtttttcagcccccggaggagggagggaatggctgccgttaagctggttttgggggacaggaaggccatgcgtttttttgggagggagccccattgcagggctgtccctgaatggagtggaggccgggaaagatccgcagacgaacccgagtcaccggtggctgcagggctgtcccgggggccattgagaacgagttccacccccacccacccctgcctggagtgcttctctgtaaagggaacaccagtcgtggcctggccccatttttacagataaaccaactgaggcacactggaggagccccacctgtgatttcggccacatttggccctgggagcagggaggccaggggagcagtgggatgttcttcatgggggcagcaggcggcaggactgcacctcccgtcccctgggtctggcccacagcccctatcctagcccggccagctctcggctctctctcccctgcgtggggcggggaaggactttggaagctgtgggtgatgttgacgccgttgctatggttacggagagtgagcgagccagcgagttggggcgggggcgggaggagaggctggctgtcggctccctgctctccaaaccccctgcatccccggagggccccccccccgcccccggcatgccagtgcccggcacaccgtcagcctgcacctccagagggtt

SEQ ID NO: 90462 - DNA, 3599 bp, Homo sapiens
ttctcccaggatgaagtgcaaactctcgggggcgcgacctcacccgtcccaggctctctcttaggacccttctgctcacttcttcctcccagggtctgctctagccaggagcctgctctgtcacctcggattttgctcctgcttgtccctctgtcccatccccctgtcacctggcccgtttgtctgccctctgatatggccgcgcctccccccaggcgggtttcccaccctgactggttgagtgaggtgcagtcaccgtctcccatatgtaggtcatcttccagtattttggctgctcggttgcttgctggtcctcagaacacctctagcttgcagagggttgcccagttaagtgcgtgggaacggaattggtgggattcagggtgtcaagggtgtgtgcccagtgagtgaggcgtctgggtttgcactccccagtccacgcccattagtgacactagggaggttccaggtacctgtggctggagaggagaggagactagactttcccttccctgtcaaagctggcggaccttggggattcttttcctcctgtgcttcctccttaattctgtgctgcctaccacctgcccattcctttagtgagtggcaggtcatggtcctgctctcatagagtttctggtttggaggtggggggagatctggccaaacgtgtgaaaaatacaagctgtggaaagagcgtgtaaggggtcctgtcccagctttgaggactctgagagcgttggcagtgaggtgcaaagggtggttgggttgggcaaggctgtctagtgaggttggggaagggagttcctggcagaggagcagaggcaggaaggggcaatttggcttgtcttgagggagccaggagtggcagggtgtgagatgagtgagtctggagaggtcggcctgagccggaatgcggacctggcaggctgtggggagggctttgatctctatccagggaataatgggaggcccccaggacaccccaagagggaagcggctccattgcatttgtgtcgtgaaagattgtttggctgctgggggagaatgtcctggagcaggtgatcagcaaggagggaggctgttgctgtggctctggtgaaaggtgatggaggcagggaccgggcggtggctgatgggagacaggcagagccaccgggctggtgatggaccggctcagatccagtgggtggaaggaggtgtcaaggataacatctttgtttctggcctggatagtggggccctggccacctcggtgtgccccttcgtctccggggtctccaggggcctgctgctgtccactgggctctcaggacccagctgcatgatgccacctaaactgcagggccctccaagtccccagcaccagcggggcagcaccggtagggcctggacctctttgagaatatgttgaaaagctgacatcaacctcgacgctgtggatgttgggcctgatcattctttggggtgggtctgtcctgggcactgcagggtgctaagcagcctccacccagtccccagtggtgacacccaaaactgtgtccagacattgacaggtgtctccaggagggagactcgcctccatctgagaagcagaaccagcctgacagtccacctcccggctgaaaagtgcttgcatgtgcgatttgccttccgcctgggagtctgggggcactgggatgccatccttgccccaccctggctttcagagctctctcctctcctcctcgtgtgcccatgagtccggctcacaggaacgtgggtctcacatcaggtcctgagggagcaggtgtgtttctgggcctgaggctgctccttggtagtgagggtgtccccacgagccgtgtctgtggcgcctgcagctgcctgcatgtccatctgtgtccacatctgcctttgagcctcatcttcctggccccacggttttctcatgctgtgacccaaaagccaagcattccagggtgttctgctgaaattgagttgtgagcgtgtctctctcctcgctccagtctgaaggagaagcgtggtcggtagatagacgtctcagaccttcgtgttttcttcacgtctgtctgttggcaggtccttacactattgtggttgctttagcaacttagctgttgtcgacttaatgtgtttcatgacgttctgcagcaaggaagaaggtccgagtttccactctcaatcaggcaccttcgttcccctcccccctcacttgacttcctgtggggtgtgtggtgtctgcacttatagatgagaatgctgaggcctcaggagggcaagggactcgcccacggtcacggaaccctaagtcaggggtggagaaggaccccctgacgccagcccacctcccctgcccctcagcaggcctggctccagcacagagaagagccattgttgctgctctgggggccctaggagcctgggatgtatcctgcctttgtttctagagcctttgtttgttgtatttcctctgtctccagacatcgcaggccggtgggacccggcgcctgtgcacgctcacgtagcggggcctgttcgggtccctcgtgggtcccttcagttcgagctctgtccttgcctcagcggcccgtcacccatagggtggcagagatgggccgggggagggagtgggcagcagtgcggaccgagtcctggcgcatggggtttccctggtgctggagccgggcgtttcgggggtgtgggcggggctggggtcatatcccctgcatgccccgcatgccatggctgtactcacatggcaagaggtggtgatcgccagctcagggaaggtgggggttccttcatcctgtggagagggggctgaattggggtcccctgagctgtagggtgcagtgcctgacaggccgtggggagggccgaggggatggggactgacaggccccgggcccatgccgccccctggcacgggtggatgccccgcctcccgggggtgcccagctggactgtggcacccccaaaggaccccacatgtcactgttcccccgcagggcttcccacggcacgacatggagacctgtggttgcgaggctccctggggctcggcttggaccgcgatggggctgggccctggcctcctaacggggctgctgtctggggcggtagctgggggggcgctctcccccctgcccgcgactcggagcacccccacccctcccctgccgggccaggccgggcggcgttgttggcgggggccccggtggaggcccggcctgggcggcgcccgccatgaatgggctgtcgctgagtgagctctgctgcctcttctgctgcccgccctgccccggccgcatcgctgccaagctcgccttcctgccgccggaggccacctactccctggtgcctgagcccgagccggggcctggtggggccggggccgcccccttggggaccctgagagcctcctcgggcgcacccgggcgctggaagctgcacctgacggagcgtgccgacttccagtacagccagcgcgagctggacaccatcgaggtcttccccaccaagagcgcccgcggcaaccgcgtctcctgcatgtatgttcgctgcgtgcctggtgccaggtgagcagctgtggccgc

SEQ ID NO: 90463 - DNA, 1024 bp, Homo sapiens
cagcgccctggctgggcggctcttctccacgcaggagcgcgccgccatgcagagccacatggagcgggcggtgtgggcggcccggcgggcagcagcgcggggcttgcgggccgtgggggccgtggtagtggacccggcctcggaccgcgtgctggccaccggccacgactgcagctgcgcggacaaccccctcctgcacgccgtcatggtgtgcgtggacctcgtggcgcgcggccagggccgcggcacctacgacttcagacccttccccgcctgctccttcgccccggccgctgccccccaggccgtccgcgcaggcgccgtgcgtaaactggacgcagacgaggacggcctcccctacctgtgcactggctacgacctgtacgtgacccgcgagccctgcgccatgtgcgccatggccctggtgcacgcacgcatcctgcgcgtcttctacggtgcgccctcgcccgacggcgccctgggcacccgcttccgcatccacgcacggcccgacctcaaccaccgcttccaggtgttccgcggggtgctggaggagcagtgccgctggctggaccccgacacgtaggcgccgccctcctgcctccggacccttcccgctcccggccgtggggcgcccctcctggacttccgggcctcgatttcttccgcacaagcctgaccgtggatttcagggacacataccgcctccagcggggagcacgggtgctgccttccgtgcggatcgagctttcctggactcggtcattggggccaccccgtgccagcggtgcccttctgcggccgcccttgctgcgtttgtgtcccctctgtctcgcgggccgggaaactgctctgatgggaaaataaacagcccaaaaccaagtgggtgtctgttaggaggtgtgtgcctttgtggccagggtcccgagtggggtggggtctgtacagggcctggtggctcagccggaggggacctgctgagccacgtgtggtcagagacctgggctgattctggggtagagca

SEQ ID NO: 90464 - DNA, 1081 bp, Homo sapiens
cagcgcgagactccgtctcaaaaaaagagtcataaacttagttccttaaaacagtgaaatcagttatctgacagttctggagaccagaaacgctaacatcaagctgtaggccggttcccgccttgcccagcgtctagaggcgcccccatccctccactcagggcccctttctcccccttcacagcctcagcgcagcctcttcccgtttctctctgactcccaccctcccgtctcctctcgtgaggctgccacgaggaccctctcctgtctcagcgtcctgccctcaatcccaactgcagagtcccttctgccatgagaggcaacccagccttgggtcgaagggatgaggtggggcctccttcaagagacaaagtctggttctgtccgtgggttctctgtccctacagaaaaggagaacaacttcccgccactgcccaagttcatccctgtgaagccctgcttctaccagaacttctccgacgagatcccagtggagcaccaggtcctggtgaagaggatctaccggctgtggatgtgtgagtgcgcctgggggcaggaggcgggaagcgggaggcagggctccccgagggagggagtggcattcaggcaggggcagcccgtcgggggcccaccgtctactgaagccgtcctgggcctggtggtccctgcggtgaacgaggctggtgtccaggccccagtgtcttggcttgcacagttcatcctcgacatggggtcactgggctggggaggcggacagcgggtgccccattgctgggcccatgctttcccacggccacaccctcccgtgcctgctcatccgtcctccctctctcttcgcagtttactgcgccaccctcggcgtcaacctcattgcctgcctggcctggtggatcggcggaggctcggggaccaacttcggcctggccttcgtgtggctgctcctgttcacgccttgcggctacgtgtgctggttccggcctgtctacaaggccttccggtgagcagagctgccgggggccgtctgcacccagagggaaccagggcccactctgcaccccagtcccagcccagctgtgaggag

SEQ ID NO: 90465 - DNA, 1050 bp, Homo sapiens
ttttttttttttttttttttagacagagtctcgctctgtcacccaggctggagtgtagtggtgcgatctctgctcactgcaagctccgcctctggggttcatgccattctcctgcctcagcctcccgagtagctgggactacaggcgcccgctaccgcacctggctaattattttgtttttgtatttttggtagagacaggttttcaccgtgttagccaggatggtctcaatctcctgacctcgtgatcctcccgcctcggcctcccgaagtgctgggatgacaggcgtgagccaccgtgcccggcctattttttatattgtagtagagacagggtttcaccatgttgtttggactggtctcgaactccagagctcagacagtctgtctgcctcggcctcccgaagtgctgggatgacaggcgtgagtccccgtgcccggccgccatgctcattttctgtcttctgcctccctgtcctctgtccttgcaggtgcacaggatctaccgaggggctggcggaagcttccagaaggcacagacggagtggaacacgggcacttggcggaacccaccgtcgagggaggcccagtacaacaacttctcaggcaacagcctgcccgagtaccccactgtgcccagctacccgggcagtggccagtggccttagagggagcctgccctgcccccaccgcccaccacctcctccccttcattcctgctgctacccctggtcccgagggctgggagtacctggggccccatccccccagctgggatggtggaagccggtggtggccacggaccgcccccctcctgccagggccacagaacccgtgttcatctcatccgagagcggagttcctcacaagcactccccagcagcccttggcctctgccgtccacaggacgccctcttgctcccggaaacgtgtggtcacccgccgtccactgcacggctggtacggccttgtcttcaggtctcgaggcctgactccgggggacaggtggcagcaggtcggccgccctcccgtcctcccagagctgctggcg

SEQ ID NO: 90466 - DNA, 1048 bp, Homo sapiens
gggcgaaggggccggggcgggcgcgcgcgtcgttaccttggctccgccgtggccgggcccgcgggcagcgtctgggcggccggcccggcctcagcagcgcagcgcggacccccgctccgggccccgcgccccctcgcgctccggctccggtgccgcttgggcccccgctccggctcccgcgccgcctgggccggcctccgcatgttcgggacgggaggcgccgggctcgccgcgctccgccgcgcccgctccggggcccgcgcgccttacgccgccagcgtctgccagcggggggcggcagccatacgcgccccactgcgcagccgcggccacggcgccgggggcgcgcgccgccgacgtcacagcgcggggcggggccaacacccggctgggcgtttctcgcgccgctttgcgacaacggatggcgccgcgcgacggccacggcgttttgcggccgctacgaggccgccgggccgctgcccgcgggggacaccgaaagcgcgtggccgcgagggcgcgcgcgggcaggaaagggggtctaacggtttccacacccttctaggggcgggccttccgccgcccgcccctccccgcccgctgttgccatggcgacgcgtggctggtcgtcctggcaccgccctgccgccgtgtgttacgtcacagtctcgccacctgacgtcacggacgggcggcgccgcgggatgttccgtgcgtggggcggtggcgggcgcggcgcggggaggcggcgggctgcgcgcgctaggccgcgaggtttccgggacaggcgctggaaggggcgactggccagaaaatgagctggttcagggcaagagggtttttccatctggctttcctgggcgaggaggggaaaacagttctagaataactgctccgtgttcagggggagaacagcggtgacgtgggtgccccgttgtcttcatccaccgtgacatcagcaaggagcagagaggaagtggccccggacccgcggccggcagctagacaaatgcactgctgggactgccatgcccagcacgggccgctcccc

SEQ ID NO: 90467 - DNA, 3181 bp, Homo sapiens
ccgccgcacgcccgtgcgtctgtcctccgccgcagagggcgtccctcaggtctactacttcggtccgtgcgggaagtacaacgccatggtgctggagctgctggggcccagcctggaggacctgttcgacctgtgcgaccggaccttcacgctcaagacggtgctgatgatcgccatccagctggtgcgcggcgggcggggcggggcggggctcggagggaagagggtggccctggaggggagcgcgtgggacggggaggggcccggccgacaccgccgtgcccccctgcagatcacgcgcatggagtatgtgcacaccaagagcctaatctaccgggacgtgaagcccgagaacttcctggtgggccgcccggggaccaagcggcagcatgccatccacatcatcgacttcgggctggccaaggagtacatcgaccccgagaccaagaagcacatcccgtaccgcgagcacaagagcctgacgggcacggcgcgctacatgagcatcaacacgcacctgggcaagggtgagctgcgcgcgcgcggcggggggcgggcgcccggaccccgctgaggctgcgcccctgtccccgcagagcagagccgccgcgacgacctggaggcgctgggccacatgttcatgtacttcctgcgcggcagcctcccctggcaggggctcaaggtgggcgaggaggccgggcaggcgggcggggacgcagggcgggagcaaggctgaccacagacccccgcaggccgacacgctcaaggagcggtaccagaagatcggggacaccaaacgcgccacgcccatcgaggtgctctgcgagaacttcccaggtaaggggtccctgcgcccccgccctgtgccccccaccccccaccccccacccccacccccgccgaggccccgctggcgctctctctgcagaggagatggccacgtacctgcgctatgtgcggcgcctggacttcttcgagaagcccgactatgactacctgcggaagctcttcaccgacctcttcgaccgcagtggcttcgtgttcgactatgagtacgactgggccgggaagcccctggtaggtgggggggtgccggtatgtgggagcgggggaccgggaaactgccctgagggagatgggaaccggcgctgcagcccatcctgacccctgctccctcacccacagccgacccccatcggcaccgtccacaccgacctgccctcccagcctcagctccgggacaaaacccagccgcacagcaaaaaccaggtgaggcccgggcgggaccgaccgccccagggaggggcatgggcggccagcgtgaccccctactgcccccaccaggcgttgaactccaccaacggggagctgaatgcggacgaccccacggccggccactccaacgccccgatcacagcgcctgcagaggtggaggtggccgatgaaaccaagtaaggctctggggcggtgccttcggggaggtgggggtgccctgggtccccatgggggtgggagggcctgaggcctgggctgcccccgccctgcaccccggtcctcctacctgagccactgccctcctcagatgctgctgtttcttcaagaggagaaagagaaaatcgctgcagcgacacaagtgaccctgggcgcgtgcagccccctgaatcttctccgtgcagccccttggggcgcgaccttgtgcgaggccctcggggcccacccacagcggcccagggccagaccctggctggaagccagaacgcagactgcaggggccgcgcctggctcaggcggccccacccccgggacgtggggtcacttccttcatgtaagactttggccgaaatttctacacctgtgtctagtcctcccctccaagagcattaactatttaaaacaaggaaaagaggaaaaaaaaaacagaggcccgccctaccccactcctgcccctccgtttctttgctgaagtgagtagtgtgatcctggaggccccccggcctggccccgccccgccagccgcccccgttagcgtcataaagtccagcttgtctccctcgatccaaaggccgttttctcgaggggagggcaggcccggcctggaggggtgctgtggagctgtcttgcccaggccctcctgggagggggacaggcattgttgccaggggtgaggccgtgccccaggcctccccgaaaccaaaggggaaggcaggggtggggccgtggctgaagccggctccccaaccaaaatgctgcaccaaagctcgggcgccgcgggcacggctgctgcagtctcttcccagcctggccctggcaaggggcgggtgggcgctgccaggcgggtgcttctcgacgcacttgctcccggaggctgcgccccggcgcctggaacccgaggtgggaggaccggttggtgtcaccctgctcggccctcagccctgccgcgtggggcgcgtgggcacggagcttcctgcctctctgctccgacacccggcaagcagccggagacaaaacgccttaaagcccccggcccagccctgcaggtatattgcaggggcctgggggcggccctggactggcgggcggttccccagtggggtgccctggaggctgccgggcagagtggagcagcttggggccgtgcccagggcggtggctgtgagtctagtttttgctttaccaagtgtacagaaatggcatttacgtttctctgatgctcccttgaagccatagaatttaggggcttttttaaaaaaataaaagaaaaatgaaaccaaacccaagtgtagagggatttgtctgggctttccacgaagcttgacctggaacgggcgttgcttccatccccatcctgcctgtccgggacgagtccggagcggctggcggcctccggtaacagaaaccgactgatgaggcggaaggtaaggaagatggaagcagagggcagagctgggctctgtctggggagagggcaggagacgagtgttcacgtaccatggaaaggggaagtcacacacatgcgacttggccccgggggtcccgttccccgacactacacaaatatacctgaaagcctcagcgacggggcccaggcaggatggtcctggctgctctgacggcggaaggcctccttgactccctctgttcacgcagcagggcagaaaacatctccacgggggccacgaca

SEQ ID NO: 90468 - DNA, 1056 bp, Homo sapiens
ctgcaacgccccttttgcctaaagcagcaggccctgccgacagggacctgagcatctttttcttccttccttggcctctgaggtcctgagagggaactccccaactctcccgccccagtcagcggtcacaggggagtctctgggcccacaacagggccggcctggtggctgagaccctggtggctcctggccacgctcaggaaggcccgtgtggtcagggctgcatttgaaccggccccgcactggggatctgccgagggctgggtgctgatgtccccaccgcgccccccgtcgatgtctcttgccaggcgcgactcttcgatgaaccgcagctggccagcctgtgcctggagaacatcgacaaaaacactgcagacgccatcaccgcggagggcttcaccgacattgacctgggtaagggcccaggagcccaggtgtgggaatcccagcggggcctcggcgggagggtccggggattgacagtgggagctttgggcctgggggagttgcacaggtgagctggggcctcaccacttgcagcaggtcaggagtttgggtcctagcacagccccacgggagtccggggccttggccaggaggccacaggccagagcccaccatcccagctgatggtgaccatctcgtcctccgatggtccatggctttgactttgctgttgaacagcttttgtcaaagctactcaagtctgtccttgtggcttaaaaacaaccacagccgaggaaaatgaaggggcgtggtcttgtgttgataaagctttatttataaacacactcacagggccagatttgggccacgggccatagttgccagcccggctttaactgctggtcctcacgttagtctcactgcctcctgcagggtgggcatgtgggtgtcgtgttcacgcagccccttcctccaccccacagacacgctggtggctgtcctggagcgcgacacactgggcatccgtgaggtgcggctgttcaatgccgttgtccgctggtccgaggccgagtgtcagcggcagcagctgcaggtgacgccagagaacag

SEQ ID NO: 90469 - DNA, 1074 bp, Homo sapiens
gtggactgccccttccaaagacccctggggggggtggggcattccgcccacccctttcccccatcacttctcgcctgtcagtgattccatgtttcgtaacgggggattctctgcctttttgtatcaaagaacaagcaaatggacccccgcccgctgcaggcgcccatagccatcgggtctctaaagctgagtggctagcagcgtttgtttgtttgtttttttttttttttctgaaggtgggacagtcacttcctcctccctccccacccctgtcgcatccacgtgcgacctggaggactggtcagaaccgttactgtgaatgagtgaagatcctggaggaccctgggccccaggccagctcccatcgctgggggacggtgaacggccatgtgttaatgttacgatgtttttaaaagacaaaaaaaaaaaaaaaacctcaaaagtttttttaaagtgggggaaaaacatccaagcactttaattccaatgtaccaggtgaactgacggagctcagaagttttcctttacaccaactgtcaatgccggaattttgtattctgttttgtaaagatttaataaaagtcaaaaaacttgctgtgtgcctgagttttagttttctgtcaccgcataaggagccatccacaaccagttggtgcaaaaccacgttgttgctggtgatgctgagtcaggagttttgagggggtgcgctcctgtggggtctgtctctgctccaggatgcctggatgcactgctgggaagacaggcaaaaagctgagctcggctgggagcagtggctcacgcctgtaattacccagcactttgggaggccaaggcaggtggatcactcgaggtctggccaacatgatgaaatcccgcctctaccaaaaatacaaaaattagcccggtgtggtgcaacatgcctgtaatcccagctactctggaggctgagacacaagaattgcttgaacccagaaggcggaggctgcagtgagccgagatgatgccactgcactccagtctgggcgatgagcaagactgtctcaaaaaaaaacaaaacaggcctggcgcggtggc

SEQ ID NO: 90470 - DNA, 1015 bp, Homo sapiens
gttttttaagctatcgccagccggtgtccagcgggctgcccctcctctgcctggattcccaggcactaagctcagctgaggggggtgttttatagaaggtttttgcttttgggttttttttttcctgtttccacccctccccgttattttttcctttggatggttaaaagcattgcaggcacccgggaaggtgagcagagggtaggtgggtgggcttgtcccctccccggtcccccgccctgctcacctctactatgaaggtgcccccaggtcacctgtgctgcccgccatctgcccacgtggcttgcagtgactcaggagagcaggcccacagcgtttgccatcttgcagagctggggaggggcacaggaccctgccctcgtgttccctcccagcccgcagtatttcagggacaggctcttcccctctatccctcaccctgagagcacccctggtggcttggttggggaagggaggggctgcctgtctctggaggtgtcaggcaggcaggtggcaggcagctcacccacccaccccatgggatcccccagcccttcacccgcgcctgccttgtccccatgatagttgacaatcggggcttcctgcaaggcccgtctgtctgtccaggactcctggtggccagattcggcctccgaccttgaccttaaactgcagctgaccccaggggctcgccgctgcccctcccctccacaccaaggcctgagacagcaggagccccgcctggcccgaagccgtttccaccgcagcaggcagaggggctggacaggcactgtcagccaatgtggggggtcctgaagacacccccttggggcacccgagtgccccttctcagggctcagtctgaccgtagccacgtcctgcctcgcgccgcccctcgggcctgacctggaagctccgtcagctccgtccttgtccttagagctgagcccagaccccggggtctggccgaatcctcacccccagggcagtgtttttggtctgccaccttcaggaa

SEQ ID NO: 90471 - DNA, 1028 bp, Homo sapiens
ttttgcagaagtcataggtctcaaatgtgtctctgagggctgtcagggtcacaggtggagagcagcctccactggctttttttttttttttttttttttttttttgaggcgaagtctcactctgtcaccaggatgctggagtgcaatggcgcgatctcagctccctgcaacctccacctcccgggttcaagtgattctcctgcctcagcctcacaagtagttgggattacaggcgtgtaccaccacacccagctaatttttatattttcagtagagacagggttttgccatgttggccaggatggtctcaatctcctgacctcatgatccacccgccttggcctcccaaagtgctgggatgacaggcgtgagccctgctttctagagttgcagggcgttaagtgtggtgaattccagccgtggcagtggagtttctggccccttctcgactatgagcgtcccaccaacccaggtgctgtgtcctttcgcctgtttcagatcattgagaagcagccaggccacattcggagcagggttttcagggaggtggagatgctgtaccagtgccagggacacaggtaggtgagccacccttgccaccgcactggcctgagctgtctttcagtggatgaagggcctgagtgccacatcacccccagcaagcgtctgtagggcacccagtttcccaggccctgcattcccctccctgaagcaggctggctgacagccccaggcgggcagtgtgaagctggcctattgccccagtcccagcttccggtggacaggccagcaccaagagggtgggcccctcctaggccgggcagcaggtacccaggggcctcaggaagcctcagctcctctcctgcccccacccccaccccaggaacgtcctagagctgattgagttcttcgaggaggaggaccgcttctacctggtgtttgagaagatgcggggaggtacctgggggctccaggctgtgaggagggagggagctgggaggtattacgggatgggggcctagtgccac

SEQ ID NO: 90472 - DNA, 1048 bp, Homo sapiens
ggagtgcagtggcgcgatctcggctcactgcaaggtccacctcccgggttcacgccattctcctgcctcagcctcccatgtagctgggactacaggcacccgccaccctgcctggctaattttttatatttttagtagagacggggtttcaccctgttagccaggatggtctcaatatcctgacctggtgatctgcctgcctcagcctcctaaagtgctgggattacaggcgtgagccaccgcacccggccattttttgtatttttagtagagacagggtttcaccgtgttgaccaggctggttttgaactcctgacctcaggtgatccacccaccttggcctcccaaaatgctgggatcacagacttgagccaccgtgcctagcccctgcacacacttttaaaatatccatcttttttccttacacagggtgagaactctgtctcagtcgacgggaagtgcagtgactccacgctactgagcaacttgttagaagagatgaaggcgacgctggccaagtgttgagagctgcctgcgagccccgcaccaccccgcggagcacgtacccagggaccgcagccctgacgtgtctcgcctctcctcagtcgtgtgtactgtacccaagcctgagtgttaatttaactctatgttgtccgccgtgtagacatccgaggtcatttgttgcgttgaattatctgaccatccttttttactgtgactcttcccattctctttggcaagaagtccccttctcgcccccaaaccagcaagggactcccccacctgggtctgtgccctgccccgcgctgggggccgagtccttgaatgtggcttcaggggctcctgtcctgggccagggcctgatgggcaccacgtgaggggcacttggtggacagggcggggctgacgtggcctcctctggggtcgcctgcttttgacccaaaggtcctgacggttgcgtccgggggaggggaaggaagggccgctgtcgccaaggttttctctcccagaacccacagtgggaaagcggtcttgccaggcgttgtcc

SEQ ID NO: 90473 - DNA, 1409 bp, Homo sapiens
aggcccctggaagtcctgaaggctggaggggtgagaccaaggagccagcagggcaggctcctcctgaagcctctcctcggcacggcttggcgtgcggcaccccctcccccctgagtcctcacaggccgtcctctgcgtgcctgcatcctagcctatccccccagtcccttcctacaggacatccgtccttgtcggaggagggcccatcccatggcttcaggcacctctgtgacctctttaaagacaagtcattgtcagtttctgggtgtgacggcttccgcacatgaaaatgagccacaccttccaggacccccaagacctcccggcccagacacacaggagggtgtccaagcgcagcgtgtgtggcaggttttgttggcctctgtgccaggaagcctgaggagcccggccccaccgcagtcagcctccctgtccctcccacagtgacgcctttgctaagttgctggagtctggggacttgagcatgagctcaatcaaagtcgatggcattcggatgtccttccagaatcttctggcgaagatctgttttcaccaccatttttccggtaaggagagtgaggggctgatggattgcacggggctttcacgcacgcggcagctgtcccttcctattggagccgggcctgtggccctcccacccaaactcacaccctttgggatcccgggtggctggtggccccgaggcctgggagctggtgcgggggctgcattccccacaccccaggcctctcagggccacaccctgctcctacaggcctcctgaagctgtggccaagggcagcccaagaaggtggcccctgctctgggggtggggctgcagccatgcaatgtccgggaagcctaacactgcccgctctgttgcagttgtggagcgagtggactcctgcgcctccatgtacagccgctccatccagggccaccatgtctgcctcctggtgaaaaaggtgagcctcgggctgctgtgcacaccctggctcctgccacctctcctggggtcatgcccaggccttcatccccagaggcgcgctttgggacttagagggctcgaggacagtgatggcagcactgctgccatgagcccctcacctgtgccagccccactcagcagcacagactctccctcagcaagacagggcttctgcctcctgctgcgctgctcaccgcaggctgacacatggctccaggggccccactcccactgcactcctgcccaccaccccacccctgtgcacaaggcagccaaggccctggggtcggactctccacctctcactgctgcgcttctagaatgactcctcgctccctccgctccgggcctccctctcctgagtactgcagggtggttgtcttcgcagtgtgtcgactgccaaacgcagtgtgtgaatatt

SEQ ID NO: 90474 - DNA, 1025 bp, Homo sapiens
cgctgaaaattcctatgttaaaatggtgagtggcagccgctcccaggggcagggtgggccagcccacactctttggcatgggatcgcgcggaacccgggcagcccccacagctcccggatgttggtatacccagggcctgtgattcctggcaggggcgttgcttgggcagcacctctggcttggggtaaggttggagacatgccctgagacttggactggcaggagggtccccgccatgcactcaaagagcagccataggaggcgcttggcctgcggctagggggcgcccctctccgtgccttcctgtgcctgtgggacccctgctgcctctgtggtcattaagagacaggtggctgtgcctgttccctgtggcgggcccgcctgccctgctaacactggccatgccctgcagacctgtgacatccggggcagtctgcaggaggacagccaggtcactgtggccatcgtgctggagaacaggagcagcagcatcctcaagggcatggagctcagcgtgctggactcactcaatgccaggatggcccggccgcagggctcctccgtccacgatggcgtccccgtgcctttccagctgcccccaggtgagccctgccccactcacggcctctcctggggactgtgggagcgcagtggcagctggtgactgcccggatccgctggttcttgttgcttcctccccatgtcccctttgtccccaggctgcacctcagtacctcctgagtgtcggggtctcgccacagctctctgagaagcgcaatggcctcggatggacctggctagagtcccaagggttgtgctgggggctggattctggggccttcttgggttccacggttccagtggccaagtctgccctctgaaacagggatgggaccaagtccaggccaaattagggacaccagtagcctcttgtttctgctcctgtcccctggtgctcccttgggggctgagctcagtttcctaatcagccacagaggacttgggactgaggacagacctggag

SEQ ID NO: 90475 - DNA, 1045 bp, Homo sapiens
gaatattcacgtaaaaaaagtgaacgaggatttgcttctctctgctcataggcctgtggggtcactcgtgtgacaagctttccagtcctcactgtcttaaagagtcgggtcctcgggatgcgctcgctcacggcgctcctcgcggcccagggctctggcaggaccccagctccttaggatgttggggctgcgtcacgctccctgcatccccgaggcttgtcttgcacgtgtgtcacccctcggtgcaccggtaacgcctgggtgttgcctttgcagcggtaccaggacaccccgggcgtggagcacattcccgtggtgcagattgacctctccgtccccttgaaggttccaggcaagtgtctccggtgtgtcggcgccgcatttgtcacatgggctgtggggtgctcccgccgccctccccgtgagcccctggggtgcagtgctgagtggctgcccgctgccggcccgcagggctgcctatgtcagatcagtatgtgaagctggaggaggagcggcggcaccggcagaagctggagaaggacaagaggaggaaaaagaggaaggagaaggagaagaagggcaagcgccgccacagctcgctgcccacggagagcgacgaggacatcgcccctgcccagcaggtggacatcgtcacagaggagatgcctgaggtcagcctcgctggaggtcccggtcctaggatgtctatctttccgcatgtgtgtgtcctggggccatgcacagtggcctctccccatggtcttcgttggtggctgggatgaggccccaccccggagagcataggaggagaggcctctctgtcctcgagcacgcgtcccgacgcaccgccccagggccagcagcttcagaggcagatgcaggttggctgcgtcctggggcccagccgcccttagtgcctagacgctgagcggagcctctggtggagccacgtcactgcccacctgtgcgtgtggcccgcatgggcagtcccactgcgtcccagatagatggcgttccaccaggccacaagggcgggttccagtga

SEQ ID NO: 90476 - DNA, 1048 bp, Homo sapiens
ttggagctgcccagcctggctgtgtctgagttggagccagcacagaggcggggagcccgcgggggccgagggaggtggtgcttctggtgtcggggcactgacctgatgggaggcatttctgcagtgggcaaagctccctgttgtgcccccatctctgttctgtttccggactggtctgtttctgccgcttcctggcgaggatgatgacgacagagacggcatgaaggctgggctctctgtggctatgtggctgtaccagggggcccacacgtcactgtgccaggggctgagccaccccgtgtccctgaaggtggccgagtggccttccgggcaggtgccagcagtgacccctgtgtcccccacaggcgtcctgcatcctgcagctggtcaagcacatccagaagcttcaggccaaggacgtgcctgtggcagaggaggtcagcgctctctttgctggggagctgaacccagtggcccccaaggcccagaagaaggttccagtccccgaagggtaaggatacgggggtgggggcattgcaaccatggccctgacatggtcccttgatgcctggtggcacagcgggggctcctgcacccctgaacagccaggagggtgtggggctgattggaggcctcaggcgggtatatccctcacacggactcaccaggtctctcactggttctgggatctggcttctgcctggggatgctccctgcgaagtgggcctgctcccacccttgccataaagctctgaggcagcctgagcctgccgtgggggccccactgtgaccctgccgcagtcttcctgggtccctgcgtcctcttaaggggcagtgacacctgcctcgctggccctgtgtgggtggcaggccccactgtttgggatatcacatggccaggcacgtggtgagcctgctcagggcggacgcctgcaggcgcgtgctcggtcacacactgccttgtgtggccctcctgtccggtgcagcctggacctggacgcctggatcaatgagccactctcggacagcgagtcagaggacgagaggc

SEQ ID NO: 90477 - DNA, 1025 bp, Homo sapiens
cagtgctcatctcgctgtcctccggcatgcccaaccacagcgccagcatccaggtacgtcccgcactgggcggggcccatggggtcccacactgcagaggccacacctttccacaggcgggagcttgcccaccctgtgaccaaggtgctggtccccccacgccatcttgcggcttgggagggcacagccgcgtcctgtgtgcactacctacccgagcctgcttgggatccccatcatgtgtctgtggggtggatgcatggggcactgaggagtgggggagagcgcccgtgggaagcagggcctcccttgtctccagtgccccatgtgggccatgcttgtttccctcctgggctttgattggtgggtggggctgacgccgggccttaggccaggttgaggttgaatctggagggtacctgtgggactcacccttggtttagaggatgtaaccagcatcgtttttttcttcttttcagctttgtgttcagaaattaaggatattgatcgaggactccgatcagaactgtgagtcatcccctccccagtgctgtcattttcgtgtccccagctctgtgaagttaggggtcctcctagtgtgaggaggaagtggacacggcatctgcaaccccagctgtctccctgatggatggcactctgcctcagaggcagccctctgccagtgccctgtggcgcccttgcaccccgacctatctgcgtggggtggctgggaaacaccagctcctctgagccccagtcccaggggagatgcagggggcatggcaaaggcccccactggggagatcctggcagttggacagatgccactcactgagcaccttggtccgaaatttctggatatttcagcctctgcatgtttttgcgggggtgcgtgaggctttgcgttgtgagatagagcagcacacagcacccttgcccaggtgcctgcctgcatgtgggtgcccccgtgctgctctgttgaggaatcagaattagcggcccctgcctggtaccttgtacctgggcgg

SEQ ID NO: 90478 - DNA, 1293 bp, Homo sapiens
aaggccctgtgtgcaggaggggagaccccagccctaagcccgggacccgatgggcgagcttctccctggagtggtgggcatggatgcagcaggaagactccctgagccccgatggctgggcagctgtttctggagccctcatgctgaaacccccactcagagggccgctgtcaggctgtcctgagcttggtgacgcttgtgcgcacttgttcctggcaacagtgccgagcaatgctttctcagcgccaggagctggctgctgtggcctgttccctggaggatcaggtctgtggctgctgtccctgtcaccaggaggaggtggcagagccagggccatgttcagtgggagctgctgcaggccccagaacttcctcgcgggccaggaagacagtaggatggttttctaggtggaaggacaggcatgctgatgagaaccccttgttccccaggggttcagtcggctgccgtcaatgtcatctgcgagctggccagacgcaaccctaagaactacctgtccctggccccgctctttttcaagctgatgacgtcctccaccaacaactgggtcctcatcaagatcatcaagctggcaagtactgcccgggaatgtggcctcctcaccctgtgtggggcattccctcaccctgtgtggggcattccctgcgggtgaccgaggccccccctgtccctcaccctgcgtggggcattccctgcgggtgaccgaggccctgctgtccccacagttcggtgctcttactcctttggaaccgcggctgggcaagaagctgatcgagcccctcaccaatctcatccacaggtgagtgcaggccatgcgcggtgggggcgggccggctccacggggtgcagtgtcggagcggcgggggcgggccggctccacggggtgcagtgtcggagcggcgggggcgggccggctccacggggtgcagtgtcggagcggcgggggcgggccggctccacggggtgcagtgttggagcggcgggggcgggccggctccacggggtgcagtgtcggagcggcgggggcgggccggctccacggggtgcagtgtcggagctgtggggcgggccggctccacggggtgcagtgtcggagcggcgggggcgggccggctccacggggtgcagtgtcggagctgtggggcgggccggctccacggggtgcagtgtcggagcggcgggggcgggccggctccacggggtgcagtgtcggagctgtggggcgggccggctccacggggtgcagtgtcggagcggcgggggcgggccggctcc

SEQ ID NO: 90479 - DNA, 1128 bp, Homo sapiens
cctctttcagttcacctagggcgtagttcgctggttgcagggtacagttctatacgttttgacaaactcattgggtggtgccctgaccagtgctgccgtccaggtgcagaacccccagcttccctgcggcgcccccatcctcagcttgcctgggagctcctggctgctccccacctggccttacctgtagttctgccattctcagaaagttggctgaatggaatcaacagcatgttgccctttggtcctggtggctttcaggcggccaaatccgtgttgctgcaggtttcaaaagttaccccatttttttgctgactgtaaatccattggacagttgggccacagattgttgacgtgtttgcctgtgggtcacaggactgtgggctgtttccaatttttggtgattagaataaacccgcactaaacaccactggcgggatttttggtgaaagtcagtgttcgcgtggcgaggttctcaggggtggaccgcacggcctgtgctaagcgtctgtttaacatctgcatcccaacagttgccacttgtcagtgctaagaaacccactggaacccagcgtcggggcctggggtagtggtcttgccagggaccctttgccttttccttggtactgaagtgaacattcacgtgaaggcagccctggtgtccccgcccgcatgcctgctgccctgcctggccagtgctccattgtaaatagtaagggcgagagctggcgggagcgggctttctagtggtgggcgggactgtgccgtgtctttccctccctggccaggccctggcttggcagggtgtgctggtcctggcgccgtctacggcctcttcctgctctggttggcccactgccgggcccagcatcttcattcgcccaagtgccagaggcagccttctgacaacctcgccgtgacatttgtcattttctgtgttcccgttgaggaattttgctttctcacaagaagtgaggggtggttctgattttcttttcttttctttttttttttttttttttgagacagagtcttgctctatcgcccaggctggagtgcagtggcacaatctccactcactgcaagctccgcctcccaggtttcagtgattctcctgcctcagcctcc

SEQ ID NO: 90480 - DNA, 1048 bp, Homo sapiens
cttatttttttgagagggaatctcgtactgttgcctgggctggagtacaacggtgtgatctcggttcactgcaacatctgcctcctgggttcaagtgattctcctgtctcagcctccccagtaggtgggactacaggcacccgccaccacgcccagctaattttttgtatttttagtagcgacaggttttcactatgttggccaggctggtctcgaactcctgaccttgtcatctacctgcctgggcctcccagagtgctaggattacaggcatgagccaccgtgcctggccctgcgtggtatttctagggcaggatggccctgcccttcttctagtgggaagggcacaagtggcattattggttgtttgctcggaaagaaccttcaaaggccacagaacgggaccttccccctggtgactcacaggctgtgggcgggcaggggcggcctccactggccaagggtccggactctctgactctcattaatgagtgagtacatgttccgcctgacagcctggcctggagcccggctgtgggcggcggtgagtgggcagccagcagtgagtagcagccggggcggggtgagctgtccccaccgtgactcagaaggtattttctgctgctgacctctgagcttgagtgtcctgagtaatcccagctcccccggaggcagattaacctttaggcagctttgtgtgagtaaaggagtcgctttaaataggaaggaataatagaaaaaacccaagtgttccgttttatagcaaatgcacactgctttgttcctgctggcctgaaagaggttgcagggggtactggggcggggaattgtccagaaactctgcagatgatacagggacactccagcctagcctctgaggagagttttttttgagacggactcgctctgtctcccaggctggagtgcagtggcccaatctcggctcactgcagcctccgcctcctgggttcaagtgattctcctgcctcagcctcccgagtagctgggattacaggtgtgagccaccacgcccagctctttttttcct

SEQ ID NO: 90481 - DNA, 1050 bp, Homo sapiens
cctctcccaccctacattgagcctcagtcagatcctgctcatgagccttcctggggtgccataagattttatcagccaggttgctgtgtgtctgtgtgctggtgacgtggggataatttgaggtggacggcagcctttccagacctgcaaagtcttgggcagccctgtctgtctgaacagtgaacatcacatagggccctgagactcaaaatggattctggtttcgggggccaccaagtgatgtccatggatgacgcgttgtgatgaccgtcccctcgtgggggctctgtcaggggcctggtctctgggaaggatcctgagtgaccttggagcatcggatatgtgtggagactgtggcctcccctgtgggtcttcatggccgcattcttgtggcctctgtctccgagcctagcacggcctcccgggtggcatctgagcgctgtgtggtatctgatggatctctctgatcataggtgtgggccaggtcgtgctccaggttgctgctgccaccaactgcaaacatcactatggcgtcgagaaagcagacatcccggccaagtatgcggaggtgagcggatctgagggccagggtgtgttggaggcaggggaccatcagagaaagtgacgccctgggtgcctgcaccccactgctgtgggacttccgagtctgggtggcgttctttccaggcccaagacgtcttggttgcctgcagcgtgtgcctgtgaatagggtgcccgatcgccctcacggcccattacaggccggccctccaggcctgtccaagcgctgcaggggtgtctcggagcctgtttcatggcacgtgccactagtgaggcgagaggtgctcagctctacctcgtggcacagccctccgagaagcggggtgttttgggtggcctgcccaggcaggcgcattgaggccctgttgctctgagagtttgttgttgtttttttttgttttgttttgtttttgagacagagtctcgctcagtcgcccaggctggagtgcagtgactcgatctcggctcactgcaagctccgccacctgg

SEQ ID NO: 90482 - DNA, 1059 bp, Homo sapiens
gaggcgtgaaggatttacaggacttttgtggacagagacaggcccacggtgggaaggagccggcccctcccatgccccctgcctgccttactgtgctgcgtgctctgtcagctcccagccttgcggggcagcacggcctcctctgaggggcttccctgaggagcgcccacccgggaggtgcctgtgttgctggatgctggccgttcttgcagccgtgatctaagtcgcttccagatcttctccccctccttttccattccactcagctgggtttgtggctgtttttctgaggttggaggggcccaggccaggtggtgttgaatggtgcacctccctgggccggcctctgtgggccactgtggcctgacgcagtgtgggagaagagggaagacgcgcagctcaggcttctgtccccacgcctgccctggggtgggtgaggtctgcatggaggggctgtgggcaggcgcaggccccggcctcacctgtggctcctgcagacatcggcaccatcatgcgcgtggtggagctctcgcccctgaagggctcggtgtcgtggacggggaagccagtctcctactacctgcacactatcgaccgcaccatagtgagtatctcgctgcgcctcagccgcagggccgtcctggtcttccaccccgcccacgtcacactgctctctcctttctcatgtggcctctgagaccctcccctcagagccctcaacgccccccggcccctgagctcaggcccagctcctcaaggcccctcagtactgcttgcaccgcaggacccaccagggtcctcccaggcactgggcgtgtcctgggtgagggctgagtgctgtctcccctagtctacgctcagctcctggggtggggcggggccatcagagtgatgtgtgaccataagggtcccggccgccatatccagaggcccctgtggataggagtcccacgtccctgttcccagcttcctccatgtgagagggtcctgagcggggagacaccagggtccatgggtggggtctgggatgcttcttccctccctgtgttccccagggtc

SEQ ID NO: 90483 - DNA, 1330 bp, Homo sapiens
ggaacggcccgaggtggccggcgcaccctgtgttccccttcccgtgggtcgcgccctccactaactcacatcagagaacttgtgcatggcgtcccatgtgtgggcctcggtgcctttcgaagagaggagagagggcaggggaggctgtgggctgtggcttctaggtcctgctgcctgaggggcttctcgtctcctgtcttggatgtggttctttttctctgtggctcacagtctggcttcttactgacaggcatctgtgattgtgggagtggctgtgaatgccgttatccgtgcccacgggtcacgtcctggcctgcggggccccaagcagcccactgctgtctctgggcctcagtttcctgatttgtgccacagaggacttgcagtggacagagttgggcccgtggcccccttgagtctgagctccgcgtgcctctcggtgcaggagggccgtgggcagcgctggggcttcctgtggctcaacctgctctccttccaggaggaacaggaggcagcccggcgccgccagcagcgcgagagcaagagcaacgcggccacgcccactaagggcccagagggcaaggtggccggccccgccgacgcccccatggtaaggccccagcctggctcctgctgctggagggcacccgccccctgcccgggagaccccatgggtgggaggctctgtgcccatccctgttcttcccttgtgtcctccaggactctggtgctgaggaagagaaggcgggagcagccaccgtgaagaagccgtctccctccaaagcccgcaagaagaagctaaacaagaaggggaggaagatggctggccgcaagcgcgggcgccccaagaagatgaacactgcgaaccccgagcggaagcccaagaagaaccaaactgcactggatgccctgcacgctcagaccgtgtctcagacggcggcctcctcaccccagggtgagccgcccccacgccacggcccccgctctccccgagtgcggatgcctggggtcccctctgctgggacgctgccctcctgagccccgtgtgttcagggtgtccctggagcctccctgttgtggctgtgccttcagggtggccccatcctaaggggttgctgggcacctgccccatgctgacgcctctgcccaccgctctcccgacccgccctgtgctgacgcctgccctccgctctcccagatgcctacagatcccctcacagcccgttctaccagctacctccgagcgtgcagcggcactcccccaacccgctgctggtggcgcccaccccgcccgcgctgcagaagcttctaggtgagcccgtgtgaggcg

SEQ ID NO: 90484 - DNA, 1023 bp, Homo sapiens
ccggccatcctccaccacgtgcggcctggcagcctgggaagaggcggccgacagctgtctctggggttcggagtgcgatgcgctgcctgcaagcttcttcattctcggctgtggggccttagtggtggtgggcacatcaggagggggcatggggggctctgggattgcggggtggtgtgtgaggaccaggaagaaccaggacaggggctgtactggccgctgggcagggcatcagtttcctcaggagaccctggggtgcagacaggagcctcctggggcgggggggctctcctgccttggggtcccgggtctgtggtatgtgcatccattgtgtctgtctgccctcaggtcagtaacatcaaccagcccctggagattacagccatctcgtccccggagacctccctgaagagctcccctgtgccctaccaggaccacgaccagccccccgtgctcaagaaggagcggcctctgagccagaccaatggggcacactactccccactcacctcagacgaggagccaggctctgaggacgagcccagcagtgctcggcgagtccaggggcccggaggggggcggggcctggcagcaggggcaggaggtgcctgctcactgtgtgtgtgtgggtgggtgggtggggaggaccggcaggctcttagggggtgccctggatgggaggaaggcgtctgttttgtgaggggcctccccacaggtcctgggccccgttccgggcagggccggcctcccgggccattcggggtgggacacgagcagggccatcggttagaagaggcaagctgaggaggagctgagcgcagcaggagagaagcttcagcagtgaggcgttggaggtctcatccacacgtcttgccgagtgtattacagtagctttattagataaaattcacatatcgtattctccatttaaagtgtgcaattcagaggtctttggtatatccacattaccactgcctaaatccagaaccttccatcatgtcctgagaaaatctcatcatcccc

SEQ ID NO: 90485 - DNA, 2271 bp, Homo sapiens
gggatcgtcaccttgggtcccctgtttgctttgcaccctggccttccccccgagtggtgcctgcgtcctcagtgaggaccctgacctgctctggggcagccccaccttccctcccgcaggctgctgacctcagcattttccccagagctcatcccgcatggcctctgagacccgcttcagctgcctctgtcctgtcttccgccctcctgtcccatccagtcccgtcccctgccatctcatcctgtgctgtagtcctcctgtcccatcccatcttgtcccctcccgtccccttccctcctgtcctctcccatcctgtcccgcttggcatcttgagtgtctgtgaccagccctgcctgcagagttgcccgggccgtggcagcagccccggttagcctcatgggtagcccgggcaggtgctctgggctcacggcttctgcctttcctctttgccaggtggtggcttggcgggaaggaagcccgcgcccgccggcgagccagtcaatagcagcaagtggaagtccaccttctcgcccatctccgacatcggcctggccaagtcggcggacagcccgctgcaggccagctccgccctcagccagaactccctgttcacgttccggcccgccctggaggagccctctgccgatgccaagctggccgctcaccccaggaaaggctttcccggctccctgtcgggggctgacggactcagcccgggcaccaaccctgccaacggctgcaccttcggcgggggcctggccgcggacctgagtttacacagcttcagtgatggtgcttctcttccccacaagggccccgaggcggccggcctgagctccccgctgagcttcccctcgcagcgcggcaaggagggctcggacgccaaccctttcctgagcaagaggcagctggacggcctggctgggctgaagggcgagggcagccgcggcaaggaggcaggggagggcggcctaccgctgtgcgggcccacggacaagaccccactgctgagcggcaaggccgccaaggcccgggaccgcgaggtcgacctcaagaatggccacaacctcttcatctctgcggcggccgtgcctcccggaagcctcctcagcggccccggcctggccccggcggcgtcctccgcaggcggcgcggcgtcctccgcccagacgcaccggtccttcctgggccccttcccgccgggaccgcagttcgcgctcggccccatgtccctgcaggccaacctcggctccgtggccggctcctccgtgctgcagtcgctgttcagctctgtgccggccgccgcaggcctggtgcacgtgtcgtccgctgccaccagactgaccaactcgcacgccatgggcagcttttccggggtggcaggcggcacagttggaggtaggcagggcggccgtccgtccgccccccgccccggcccccgccggaggccccttcctttgcaggttcccttccgcactctcttgcagcaggagctgagctgcaggtcccctggtgccggccggcccccgccatccgtgcacggtggcgaactccagtcctgtggggagagggctcacgctgagtccgtgtgtcttgggttctctggttgtaaccgcgtccctcttgttttcagaaggccaccgtgcgcagggccaccagagcattactttctcccgtggaggtcacctgctaggtgtggccgcccgggctctggcaaggctctgggagctggtgttgggtaagagcgagtccccgcagtgcctgcccagacagggcggagaggagccgccggggggagcggcctggccctggggctgctgcggggcggggggccggagggcggagggcgggccaccacgagcctggccgagccgctgcttgtgcttggtgcccgcacacgcctggcggcgccgtttcgcttccctttttgtgagcctgcggctgctgctctgcgcttgcctggatgctgccgcttgttgaagctgcgtttttctctcctatttgcaggtgtctttaaccacgcggtgccctccgcctctgctcatccgtttggagcccgtgtcggccgcggggctgcatgtggcagcgccacactgggcccgagcccgctgcaggcggcggccagcgcctcggcctcttcctttcaggccccggcctcggttgagacccggccgccccctccgcctccgcctccgcctcccccgctgcccccgcctgcgcacctgggccggtcccccgcggggccgcccgtcctccacgccccccctccac

SEQ ID NO: 90486 - DNA, 1523 bp, Homo sapiens
ctctgcttgcccctggccttctgcctcaggggcccctgggacacaggccttcctgggcgagtccaaagcccaccgggcaaggagaggaggactgggagccaggagccaaggcggaggctgtggccagggctggtcagcctggcgggtcaatgcgggcacctgcgggctggacaagctatgctgggtctcttaggagatgagctgcaggtagggtggctttagctggactcggctgtgtgtctcctttggaggaaggctggagcttggccggcgtgtccaggtgtcaggctccctggtctgtcacggggcacgcccgtcgtctgttgtggttagaggagctggcactatgcctgtcatggtgctggccccaggtggcgtgtgtgctcgtgggaggcctcggtccccagcctgggtgagtgttgggctcccccaggcgcgatggtaacctcaggccgctcttcccgctgtgcccttctgcaggtaactaggatttctacctcaaccgcgagacctatgcaaggacggtgtggaccaactcgcgcccgcggcatggtgcccgccggcctgccgggctcccacccctggacggcagaggcaaggacggacgggagctccactgtgaatcggcggcacgcgccgcaggaggctgggactggtccagtttgtactgtcgatagttttagataaagtatttatcattttttaaaaagtataaacaattctgacttattttattccatctaagtggtaaaaggcaacttattgagaaatataaatatctatatatgagagctctatataaagacacgtgtctgcagggcgggcccgccagcggattcgccacagcctgccccggtgctatctcgtccccaggcccgcgcctgcctccacccgcttggtgctgactagacgctgacaacgccgaaccccgttctcggaaacgccgcccggccggctcccccgacgcgctgctcccgtaccaaaggcaggcccgtcgccaccacattcctcggaggcctccccgcggcctgagccccttcctgagcgccctggcgcctgccctgagctcttcacctttaccccggcactgtgaacccccagactgttcaccctccggggcgtgggttgcgcccttgcatgtgaaggggcctgcgcggtgacgcagctggccatgtgctgcgcgatggtgctgtgaggacggcgcgggcacgttgaacaagtgcatttacttttgtatttctcggctgtccatggctcgcagcatgccctgcgatgcggggcaggcctgtcgtgggtcccttggtgtttctgtacaggagagagtcacactaatgagtggcagtattttatagagatgtgatgagaatttataaatttcatagatttgacagcttttatttttagatggtataatgcacagtgaagaggaaagaaaagcgaggggaaaaaaccttatttattcaaacagtgcacaaaatggccccagcgtcagccccgaccctagacccctcagttgcagctcc

SEQ ID NO: 90487 - DNA, 1866 bp, Homo sapiens
cccacttctgactccggagtggctgggcctacaaggccccaccaccacacctggctaatttttgtttttgtagagatggggattttgccatgtcacccaggctggtctcgaactcctgagctcaagcaatcctcccaccttggcctctcaaagcgctgggattataggcatgagccaccgcacctggcgacaacctcattttgactagtttatatgcaaagaccctgtttatatacagggccatactcatgggttctggggggtcaggacatgaacacatctttgtgggggccagagaagggacagtttatgggcaatggcaagaggaagctgcttgtggctgtgggtaggaccgaccacaggtgttccatccccaggcttcattgaggaccctgagaggaagtatcactttgagtgcagcagcgaggagcagtgtcaggagtggatggaggctctgcgtcgggccaggtggggccaggcggtggtgggcactgctggggtgggcacagcagccatgcagagcgggcatttgaccccgtgccacccttttccccagctacgagttcatgcggagaagcctcatcttctacaggaacgaaatccggaaggtgacgggcaaggtgtgtgcagggctgcagagggccggggtggggctgcaggtggcagaggcagtcctccagccctggctcatggccacccgtcctccccacaggaccccctggaacagttcggcatatccgaggaggccaggttccagctgagtggcttgcaggcgtgagcgcagggcacggtggtcagcgtgcagcgggacgggactggccctgcccagccatgaatcgcttggccatgcctggatctgttttgttttggtttttggtttttgggtcagggtttcactgtgttgcccaggctagagtgcagtggtgccacagctcactgtgaccttgaccttctggactcaagtgatcctcctgcctcagcttcccaagtagcggggatcacaggcatgagccgccacacccggccatcacacctggattttcagtgggaggtttttggtttggagacatccaaagcctgaagccaggtgggtgtgggcaggggctgcattttatgaaactgcccagcaagctgcgctccctggggccccaggatccacctaactggcctggcacctggtgccacgtgctgctgccgccaggatatgcgccttcccacaggtgccctgcctgagttgtgtgcatccaggggcctggtgagcccccaggctggtggcatggcccccctgccccgtgctgaatgaatgtacagagccagacaaagctgtgaatggcctaggggctgagtcccacaccagctgtgaattctcctgcagacaggagggccctggctgtgcacctggggaagtggttgccctggggccagggtgcttgttctgttcaaataaaggtacctcttttccacactggatggcggtgaagtgaaggagaggggaggggcagccagggagcccccacccaagggaagtaaggctcagggtcctgagaggcagtggctgggcctcctgcactgaggggagagctagaacccccagccaggacaggtggaggctgggacccaggcctggggagaacagagctgctgtgtggtatcaggaatcctgtggtgacctggggtcctgcctctggcattcacgggccctcccggagtgtggctggggcctgggcgggctttggtccatctgatgtgaaaaggactttgccgatgtcattggggtcgcagatctggttttccgttcatcaaaaggcactttgcctgtggcctggtgccctcataagcctccccttgcctgtggcctggtgccct

SEQ ID NO: 90488 - DNA, 1810 bp, Homo sapiens
tgcggccactgtgccctgtccctcagcgtgcccctgcacacctgcagacactgtgacacatcactgcagacgcagtagttcagatgacacggctgtatcagcttctggttctggggtcagagtccaaacagtccacagggctccattccttctggaggctctgggggacaactcgtttcctgcctttcccagtgtccagaggcacctgtgtgccttgcctcggggccccttcctccccattcacagccacagcgcagcctctctgactctcagcctcccgcctcctctcatgaggtcacccaggatcacctgccattttaagatcctcaagcccacctgcacatcccttttctgccatgaggggacatgttcacaggtcccagggattaggatgtggacatcttttgggggcagtgattcactcagtctcatgggccccatctctctgagctcacccaagacccttaaaccagggcccggggccaacattgagcaggcaagggaaagactaccaggagatgagaggaggctgcctggaactcagatttgcacagagcctgaaagggcgtgggagaccttggcagaggcctgcatcaggaagaggatgttggggactcagcagagccccctgcgccacaagcagatgtggcagatctcccaggtgttactcagtgaggatgcgaagatcagtgtcctcactgatctccgcctaacaaatttacatcgagcccaagagattaggttgggacaagtaagcgtagccaaccagagagggaattcagaggaaggcgtgaacactaggggcttgggcagtccgggatggcttcctggaggtggtgactcgtttgtgagatcttggtcttgtcttccctttatgccttctctgggctccctattacaatttcaggtctccaggccttggcaccctgggctggagcggcttcctctccatccctcatgcctggtcacttggagacaggctccagcttccttgtgtctgtgcctgtccacagtgggcctcagcctcctggaagagactgggtgcgctatggggtggccccctcagggctggttagaccctggcgctgggagtgcagggtgaggggcagtctcgagggctccagcccagcccgcccagggaggtcccagcagcagccccgagttctgagccatcttcctcactctcctcttggcctccacaggtgtctcccagtctgctaaagccctaaggccatcaccatggacttccagcatcgccccgggggcaagaccgggagcgggggcgtggcctcctcctccgagagcaaccgtgaccgcagggagcgcctccggcagctggccctggagaccatcgacatcaacaaggtgggccagccaccgtgcagctgcctgtggtgggtgctgggctttccagggcagccctggagagggtgccagaggctcttcttgggcctccgcccaggctgggcgatgcagccccgtgtccagacgctcccctgttgcccccgagcagccacagctcccatctgtccaccccagagagcagaccctctgtggctctgagtcccatgtggacatgttttgttctgtccacagccttctgttttgcattatttaattttctgggagtggggagagctgatgtcagtccagccagatgtggtgaagggcagcctttgattttagcttgtgcagaggcaggggtgagccgagtcccctcagcaccgtggacatcggggctggagcactctttgtgtaccctgacatgccccacgggcctggcctatggcaagggctctgttaccgtccc

SEQ ID NO: 90489 - DNA, 1177 bp, Homo sapiens
ggccccccgccctgggaaggttgggctgtcctgggcggcgccgcccgaggagtcggggctcagtgactgctgcccttgtaggtgcttggggcaggcgttggagctgccttcgggaagcctcgggggtgtgggaccgggtgggcccctgcctgggcggggcggggtcttttggccgaggcaggggtggggatgtgctgaaggccgcccggacgccctggaggggtctccgcccggagcctggcgctgcctcgtgacctgcatcatcttcagttccagggtctccctccactgctgtagtaacccgggtccggggcctcggtggtgctcctgatgcccctcacccacccctgaagatcccaggtgggcgagggaatagtcagagggatcacaatctttcagctaacttattctactccgtgagtatggggccgggcctgctggggctgctctggggccacaggtactttcttgtgcaccttgctgcccgtacctgtgattgaatgtaatcgtgggaaccctgagtttcatcagagccggcgcacagtctcctgcagcccaggcgttgcctgagctcaacacggcctaggcccaagctttagcgctgccgggttcttggagtcctgtggggtgagtcagggttctgaattgggctgcaccccctggacaggatgatcggctgaatgtaacagaggaactaacgtccaacgacaagacgaggattctcaacgtccagtccaggctcacagacgccaaacgcattaactggcgaacagtgctgagtggcggcagcctctacatcgagatcccgggcggcgcgctgcccgaggggagcaaggacaggtgaggggcaaggacaggcagggagtgctcacccaggggagcagggaccaggtgaggggcaaggacaggcggggagtgctcacccaggggagcagggaccaggtgcgggttgctgcccaaggggtgcagggacagatgagggagggcactgccttcaggcagcacatatgggggccaccatcgctttgttggtggggacagggtccccccttttttttttttttgagatggagtcttgcttttgttgcccaggctggagtgcagtggcatgatcttggctcactgcaacctctgccttccgggttcaagcgattctcctgcctcagcctcccgagta

SEQ ID NO: 90490 - DNA, 1054 bp, Homo sapiens
gccgccgcgcacgcggcccagcgcagcccccgcgcgcccccgccaggcgcgccgaggagaccggcgggcggttgcgcgcggcggcggcgcgcacggcggagcccgggaggcggcggcggcggcggcggcggcggcggcggctgctcgtgtcggctccgggcggcccccgcgccgcagcccgcgccgtgtccgcggcggagccgcccaggtgagtggccgtgccggggcccggcgtggggcgcgcccgcagacctggggacccctcacctgcaccctgcgaccctgccgcccaaagcccccaacccgcgaccccatcctcagccgggggaaattgccccgcgcacccctcccgggctcatcgctccttgccaggcccccgacgctccccctggaaactttgggggcgaactccccaccctggggccccccgcccctcctctggggcgccaaggagcggggaatcgggtgggcatctccccggggcactggggacgctgggaggatgcgctcctctccaggaggagatgaagggggcactggttgggtctggggtgtggggaacgtccgaatagagcctgcagcccgcgccttcctgccctgtctcccccgagccgggtctggtccagcctgggggtgcggagctggaagacgcaaagggtatctggggtccacaccggagcctgctccatcgctggagctgacggcccggcctggcggggagggacctgggggcatagggctgagtccccctgctctgggggcgtctgaatagcaccagaaatggtgggcctgggcaccctgagtgggtgccgccacctcccgggcctctggggcctggccaggggaggccctgagtcccattcaacaagtttaggggagcagcacctcgtgccttggtccgggcacaagaaaagccccgggtccttacgctggagaccaccatgtaactgggtttctcaacgtgtgcttggggcgctaacggtgccggtgtcccggcccccccagttctgaggagtcagaacttctgaggcgatgtgccccagaagctgcattt

SEQ ID NO: 90491 - DNA, 2437 bp, Homo sapiens
tgccgtgtgactcgaagcctagcgccctccctgcgaagcatcagacgccacccagccctggggggaggcccacgcctgctggaccaacgcgggttctggggtgcacagcgccaggttaacgctgaagcctgccccgctgagcccaggagccgggaggcctgcgggctgacccagaatccgatcatgcacctgtcctcatgccagcggctttggctggggttggtctgaagcctgcacgcggcagttctttgttaaagatctgagggactcctcagtcctggggcgtcgccgcctgcagcctcttccaagccctgcgtccagcgagcgtcacagcacaacctgcaaaaacggagctgggctgcagctggggctggcatggactttcatttcagagattcggtttttaagaagatgcatgcctaatgtgttcttttttttttccaatgatttgtaatatacattttatgactggaaacttttttgtacaacactccaataaacattttgattttaggttctgcctctgagtttattcctgaggggaagctcgagccggggcctctgccctaatgaagcggatgtctaagaaagatccctccacccccaaggaaaaaggtcactggctagtgtagctagtgtaaacaggacccaggcgatgcatgggaccctgcccttttttttctagtgagcctccgacgctgttgcacaagctgactcttcgtcacgtgatgcgaccgggctccgccccggcggcaacacgctgtatagacgcgccgggtgcctcgtgcgcatgcgcggcaggcccttcgggacgagctggaggcagagcgtgagtacaaagtgatcggcctcggccgcacgtagtagcccccctactccccggccaagtcagggcctccctcttcccgcggagtcgcaaccacgggtagctcgtgtaggtaacggcaggtccaggcctccgcatgagcggagggccccccgcgcgaccttgaatggcccgggcgcgcgcggtcgtgtgggagttgtagtcctccgtccccgtccgcgcggactccgtttcccgtggtgccccgggcggcccgcttccggcgcagttagttacgagtcggcgcacgcggcctcggtccggttgactttgcggagccatggagggcggcttcggctccgatttcgggggctccggcagcgggaagctggacccagggctcataatggagcaggtgaaagtgcagatcgccgtggccaacgcgcaggagctgctgcaggtgcggggctggccggggacgggcgctgggggcgacagggccacccctgggggccgacgtcgcggctaaagcctcgcgtgtctccacagaggatgacggacaagtgtttccggaagtgtatagggaaacctgggggctccctggacaactccgagcaggtgagacccgcggaggttcggggcaagggtcgcgagggcctagattcgaggggggaggtgtctgcgcgtgcgcagactaacggggaggtgcgacggagtggtcactgcacgtgcgtagtctgcagcccgggcgtcctggagccggggtcagggcggtccccggggccgcgaagtcccgagctgagccgtgcgcccctccgctcccgcagaagtgcatcgccatgtgcatggaccgctacatggacgcctggaacaccgtgtctcgcgcctacaactcgcggctgcagcgggaacgagccaacatgtgaccggcgagcgcgggccaccccaccctgttcatttccataaacgtgctttgagaggcggggtccgcatgtacgtactgcctgcccggggcttaggagggtggcaccggtgctgggacacacgggactgtgtcctcgccaccccccgccctgccccctgccagccagtgcagcttggatctcgggggtgtggggccctgtgccttcctgaagtgctggcagcccagtggcacctccttcaggcctttggggtattcccctagtgtgcccaagtcagcctcatattctgggcggacagcttgtctggacttcggagttgggggtggtcagacaccacaggagctgtcacctcctgcggatgggcaaataaattggtggaggacggagagaaacctctttatttccctcctgaggggtctctgggaagaggtgacgcgtgtccctggaaccccagctcggagggtctcagcctcccctgggttgggagaagtccatctttccccttagtgccaccgggctgctgagtcacgaggaatgtgttgctgctgccacccctgccccaaaggctaagggggacagccttccccttgtcagggcttgctttgaccctgcttcgttccaccccgggtcctggtggagcaccaggcaggtggtcctcgctgtgacactgaggtgctgagccagtgagctagggtggaggggctgtgtt

SEQ ID NO: 90492 - DNA, 1124 bp, Homo sapiens
taagtttacaaacaaggctgacccttcaaaggccagggtctttgtaacatttacagaggatgcattaatttctccccaaatggtcgtcctgggtccagaacaggcaggagaggctgggaaagcccatgcctccagggtggtcccaagcgctggtgcctgtcacttgctggactcctgacagtgcagggcagatgatgagggcacgtgtgcctttgcctgggcgcgtggggccgcgtcgtctgcaggacgggaaggtctggggctcggaggcctcggtgaccttgtctttgggcttgcctgacgccccctgaggtgctccctgtggccccatggaccttgcccctccccactcacttgccctcttgactttcagcgccaagaagagggagggcgagcttacggtggcccagggccgtgtgaaggacctggagtccctgttccaccggagcgaggtggagctggcagctgccctcagcgacaagcgcggcctggagagtgacgtggctgagctgcgggcccagctggccaaggtaggtgccaggagccacgggacgccccagcagggtatatgcaacagacagattgtcacaccagctcgctgtcctgtgtctcccaggccgaggacggtcatgcagtggccaaaaagcagctggagaaggagacgctgatgcgtgtggacctggagaaccgctgccagagcctgcaggaggagctggacttccggaagagtgtgttcgaggaggtgagtgagtggcctggcctccagcctggcacagcggaaacgcaaagtccaccctcatggctgtggagggcggaagcctgagggcaccgtgtggccggggtccctcccacggctctagggaggctccttcctgcctcttagggtgcccttggcttcggctgcgtctccccagtgtctgcctctgtcttcccgcggctgcctcccctgtgtccatactctgtgtatcctacaaggacacttgtcattggatttggggcctgcctggatcatccagagtgacctaatggcatctgcagagaccccatttccaaataaggtccattcacagctgctggggatcgggatgtgggcacgtctttttttgagatggagtttcactctg

SEQ ID NO: 90493 - DNA, 1002 bp, Homo sapiens
ggggggagggcgggtggcttatctccagaattgatgtcctcccctccccttcctccttccaggctctggggcagcggtggggggtgggggaggggtgttccccagcaaggtggtctacagtgggagaggaggaggaaccagtttctacctgctgcactgggggtgggggtgtgtttatggggagggtccagaggttccccgggggtcagtggtttgaacctaaacaggcaaattcaagtccctaagcctccgttttctcttctgtgaaatgcgagccactgttggggcaagtaaggtgacaaggtggagaaaggccctaggcagtgccctgtacagcggagaccccgatcacaattgtgatcacagtcacaagggcttggggccggtgggcagggcacttggctgtgcctgttggttgcaaaggcaccttctggattatcaagggtaacagatttgccaggaaaagaaaagaggctgatgaaagcgccagctgacacagtccccagttgtgatgagccaggcaaacttctgggcgcctcggcaatgccaactcatgtgattggctgccgggtttgtggactacatgcatagtaatttctcggcattcggaggaggctgggggtgctggtggtgggggggaggcggcctgtgctgcagaccctgccctttcctgggtgggcgccctgagaggcgggcacgctgctgtgcagaaagacgccaccaagaccggcctggggtcctaatggccatgggttctgtggacccagatccagcctttgccttgctgcgggcactgaagctccagcccccatgagcagtactgtcctccccgctgggtctggaatccctgaccagaaaggcgcttgcactcaacagccccgaagcccacgccacttcccacctccaccgcctggggggtgcgggtggagggagggggtcgtgggcaccgaggcaggagcaggaggggctggctcaaggtcacagagcaggggggtggaggcg

SEQ ID NO: 90494 - DNA, 1050 bp, Homo sapiens
aacactgactcccattcattgcgcagctgtgacgctctggagtccaggtgtccaaacgcggctgcaccacgtggccggcccagcaccacgtggtcagctcggcgaccggctggagtcagccactgttccaccgtgcaccgcttcattcccgctctagagggcaaaccagacccgatttccggcctccattaggtcgcagaggtcagttgccctaacaaccagctggttcccgcctctacgttgcgtcacttccttccacgcccgcctccatcattaacgcgcctgtgcagaagggaagcaactccgggcgcctttcttttgcgcaggcgtcgcgccctggggccggggccgggcggcaccgcggtgcgcaagcgcaaccgtcggtgggtcggggatcggtcgcctgagaggtgagtgaggggcactgcgctgagcctggtgggtctggggtctgcggctcggggcccacggggccccaaagctcgtaagagtttggggatcgtgaggccagggtcaccgcgacccgcggggtcctgtgagtaggcggtgcggaggggaaactgaggccgggcgccatcgggcaggcccttcgagccctgatctcccttccccaggccccaggtcctggaaatgctggtccgcggcctggtggcgaggacggcgggaggggaaggcgccccgcatgtagtgagcgctcgctgggtgttcgctgccgttccgctcttattaaccgcctggaaacgtcgtccctgtgactcagggacccccgtttgtggggactgaagtcggaactctggttccagcgccgccagtccctacctgggtgaccttgcccagcctcttggcttctcggagcctcagttttcccctctgtaaaacgggcgttgttcaaaagtccctgcctaggagaaggagagccgcagggtccagcggaatctgagaactccaaagaattagcaggcgttcgtcttatatcatgtttagagtcttcttctgcatatcgtgctagaggtgggggaaatctgggattcaggaccgtccaccaccacc

SEQ ID NO: 90495 - DNA, 1050 bp, Homo sapiens
tattccgggctgatcgttctctgctggggccgtcctggtcactgcagggtactaagcaggatccctggcctccacccactccacgccaggagcatctgcaaccgcgacagccacatgtgtcctagatgtcacccagggttccctggatgggattgatggcagagtagcctcctgctctagaggactggtcagtctgtgcttccctacaagagccctggacctcactcttctggatgagaagcgggtgatcccttcctttccctctgccctcctgactttgaccctaactgaaccgaaagcagacccgcccggcactgggttttgtttctgcgtagcctgtgcaggagacatggcggacgcagcatctccgtgctctgtggtaaacgacctgcggtgggacctgagtgcccagcagatagaggagcgcaccagggagctcatcgagcagaccaagcgcgtgtatgaccaggttggcacccaggagtttgaggacgtgtcctacgagagcacgctcaaggcgctggccgatgtggaggtcacctacacaggtaagtcccaggcagggtctgtgcgtgggccgcaggtgccgagggaggtggcaccgcaggcgggagtagcccagcccgtggagccggttcagaacctggcttgaagtgtcaccagcaccctgcccctgagcacagggcagcgccacctgctcccaggctggtcgtggtggctaaatcagatggctgggcggaagcgtctggcaggtgctggtcactagaggtgtaggagagaggcagttcctcccgtgctccgctctgcttcacagcctcgtccattcaaaggactccctggttgtgtgatctgagagccggagatgagaaaatatgtctaaacagcacgcctctccagcctctcccagagccagcagccttgaaccctgaccccgtctggcctctttccctggcccgggaaggcgggtatttgtttctctctgaatgactgaacttggcccccttggcttctgcctctgcgccctccggcgggggtgacctcatgtcctcg

SEQ ID NO: 90496 - DNA, 1072 bp, Homo sapiens
ttatgcttttctagccactgacacttcctctactcaacctaaagcacagatgtgctcaggaaattgtaagtagtttatgcatttaaatgtgaccatcggcagctgcagctctctctggaatggaattccgtcagcctctgtttcgtcgtacccagctctgttgggtcctccttggcttggagggctttgagttgaatccttatttttcttcggtctgtaagatctccaaggacacaggcaacagcacctcctttctccatcccagggcccagcctggaggggacggtggcgtgtgcctctagtcccagctacttgggaggctgaggcaggagagagttcacggggggattcagcagacaggcctgggagaggggtccgggcaacacctgccagttgtactggggcctgttctcacacctgtctccctggtctcccctgttttagttcagaggaatatccttgacttcccccagcatgtttccccctccaaggacatccggacagccagcacagaggccgacaagaagctctctgagttcgacgtggagatgagcatgagggaggacgtgtaccagaggatcgtgtggctccaggtgagggggccctgcggggagtgcaaatagcctcccaagtaactaggattacaggcgcccgccaccacacccggctaatttttgtatttttagtagagacggggtttcaacgtgttggtcaggctagtctcgaactcctgacctcaagtgatccgcccacctcggcctcccacagtgctgggatgacaggtgtgagccactgtgcccggcccattttttgtatttttagtaggcacagggttttgccatgttggtcaggctgttctcaaactcctgacctcaggtgatccgcccgccttggcctcccaaagtgctgggatcacaggcctgagccaccacgcccggccacacatgtgcactttcatttcctttcctggccatcctagtgtgacccaaacaccccatccccacatggcgtgagctggcagggcctggcggcatggctgcgtgggctcctgctcccccggatgctcctcgca

SEQ ID NO: 90497 - DNA, 1050 bp, Homo sapiens
ttgtaagtctctggcagaggccgtcattgcgctttgctccctgttgggaaggtactcacggcattgagtgtactgcactttttcatactgttggtcacctctcacaaggacataagctctgtgtggctcagttccccaggctgtcagcctcacccctcttcctgcgcacatgggggaggcggtgcctttgctgaagtgggatgtgtggaatgttttaggactgcgtgatctttgaggaagtggctgtgaacttcaccccagaagagtgggcattgctggatcatgctcagaggagcctctacagagatgtgatgctggagacctgcaggaaccttgcctccttgggtaagggtggtgtcattccctcactgcctccttgggtaagggtggcgtcattccctcactgcctccttgggtaagggtggcgtcattccctcactgcctccttgggtaagggtggcgtcattccctcactgcctccttgggtaagggtggcgtcattccctcactgcctccttgggtaagggtggcgtcattccctcactgcctccttgggtaaggatggcgtcattccctcactgcctccttgggtaagggtggcatcattccctcactgcgtcctggagagcaaagagaccttggttttctttttttttttttttatttttttgagacggagtcttgctctctcgcccaagctggagtgcagtggcacgatctcggctcactgcaagctccgcctcccgggttcatgccattctcctgcctcagcctcctgaatagctgggactacaggtgcccaccaccacgcctggctaattttttgtagctttagtagagatggggtttcaccgtgttagccaggatggtctcgatctcctgacctcgtgatccgcccgccttggcctcccaaagtgctgggattacaggcgtgagccaccgcgcccggcctaagataccttgtttttctttttatttgagctcaaaaattgaaatatgttggaaaagagatagacatgatcccaacacccatggaacatgggagtcaaa

SEQ ID NO: 90498 - DNA, 1631 bp, Homo sapiens
tgaaaggaagcagttggagagagggagggtgctttctgatggggttgaaaaccactgggaggagcagacatgatggcccacttggtagtggggctcctcctggcctcagggccgtccccctctcctctcccaggatcaggaggaatcactgcctctcctctcccccgacccccttccagcaccagcagcaggtcttgggagccattgagagggccaagcaggtcaccgctcccgagctgaactctatcatccgagtatgtatggggacctgggcgggtgggcgggggacaggtgggccccaggcagctaatgttcccctcccccgccctgcagcagcagctccaagcccaccagctgtcccagctgcaggccctggccctgcccttgaccccactacccgtggggctgcagccgccttcgctgccggcggtcagcgcaggcaccggcctcctctcgctgtccgcgctgggttcccaggcccacctctccaaggaagacaagaacgggcacgatggtgacacccaccaggaggatgatggcgagaagtcggattagcagggggccgggacagggaggttgggaggggggacagaggggagacagaggcacggagagaaaggaatgtttagcacaagacacagcggagctcgggattggctaaactcccatagtatttatggtggccgccggcgggggccccagcccagcttgcaggccacctctagctttcttcctaccccattcccggcttccctcctcctcccctgcagcctggttaggtggatacctgccctgacatgtgaggcaagctaaggcctggagggtcagatgggagaccaggtcccaagggagcaagacctcgcgaagcgcagcagccccggcccttcccccgttttgaacatgtgtaaccgacagtctgcctgggccacagccctctcaccctggtactgcatgcacgcaatgctagctgcccctttcccgtcctgggcaccccgagtctcccccgaccccgggtcccaggtatgctcccacctccacctgccccactcaccacctctgctagttccagacacctccacgcccacctggtcctctcccatcgcccacaaaagggggggcacgagggacgagcttagctgagctgggaggagcagggtgagggtgggcgacccaggattccccctccccttcccaaataaagatgagggtactaaagttgtcttggtttttattttattattatttttttctttttccagtatactagcttgtcttttaagaaaggggatattaaaaaaaaaaaaagacaaaagtgtttttaaaaaaaagcaacacccacacctgtgtctgtatatagtcagcttatctcgtgttcaatcgtctgatctctacagagagaagtggaaaatgctgtatcaagggtgggcttagctgtgcctttccaataaagatgtgagaagcttcggtgctgtgtccctgcctctgtgttgtggctgcccccgggggaggacggggttccttccaatgtgagacatcctcctagaacatcaggagttcctagctgtggcccggtgcggtgtggctcacgcctgtcatcccaacactttgggaggctgaggcaggcagatcac

SEQ ID NO: 90499 - DNA, 1032 bp, Homo sapiens
ccagaagacctagcgcgccaggcaggcacttccttttctctttatccccaacttccttccaggtcgcaaggtcacgtcctgtccccacctttcgcccctcaccctagctcccccaacgccaaagacaaggttaagaaagtgatatcgcgaaatagttttttaaagcattttattgcattttatgacttggagtttatgtgaaacctcaacggtattagccgaacagcctgccgcaccttccgggagttccagagtgggcctacaactcccacagggctccgcgagcgccggacggacggactacaattcccgacaggcagcgcggctggcggggcggttcgccgcggtgcccacaggacctcagggcgagtgcgggctgccccgcgcggcgcccgcaggaccccggcggctacccatgccgaggtgagtccgcgggagccgccgccgccgccgtcccgtcccagctgccgccccgcgcggccccgccgccggccaggatgctggaggaagcgggcgaggtgctggagaacatgctgaaggcgtcttgtctgccgctcggcttcatcgtcttcctgcccgctgtgctgctgctggtggcgccgccgctgcctgccgccgacgccgcgcacgagttcaccgtgtaccgcatgcagcagtacgacctgcagggccagccctacggtgcgtgtccccggcccaccctcggggctccccgggctccccggccacgccactccggcccggcgatccccaggccgatccctagctccggcctgggctgcccgacccatgctcaggccccaggcgaggcagagccctgccgccctggacccccgggcgccctggaatccctgctctccttgcctagcgcccagggaccccccgcgctcgctcccacagcccccggcccctgcctaggtctccctgccccggaacccatggccgggccaagcgtcccgcgtccctggagccctaagtcccctctctcctgtccccagctgggccggcgtctgcctgccttgccgagtttct

SEQ ID NO: 90500 - DNA, 1020 bp, Homo sapiens
ggtctcctaggctggagtgctgggattacaagtgtgagagctaccttgcctggcccaaagtccacattttaaaacattgtttttgaatcgtgaaggtcccgggtggattctaagaccctgacccgtaacacgaggatcattgcagaggccctgactcgagtcatctacaacctgacagagaaggtgagccctgagccctctgtgccgccagacccagccccagccctgcccccggccccggccccacccctggccccagccccactgcaggggcctggactcagggccatcccctcctctctccgcaggggacacccccagacatgccggtgttcacagagcagatggtaagggggccaggccagtgggtgggtgggtgggcggggccaggccatgactaccaccaccgtccctacagcagatccagcaggagcagctggactcggtgatggactggctcaccaaccagccgcgggccgcgcagctggtggacaaggacagcaccttcctcagcacgctggagcaccacctgagccgctacctgaaggacgtgaagcagcaccacgtcaaggctgacaagcggtgaggctggggctccgcgctggccccgttcagcctggggccgagggggacctccccctactgcatctcccaccccctcacccctgggggatgccaggtggagcaaatacaaagagagggtgggatgagggccggacacggcggctgtgcctgcaatcccagtactttgggaatccgaggcaggtggatcacttgaggtcaggagttcaagaccagactggccaacatagtgaaacctcatccctactaaaaatacaaaaattaggcggatgtggcagtgggcacctgtaatcccagctacttaggaggccgggacggaagaatcgcttgaacccaggagttggagaccaacctgggcaacatagcaagaccccatctctacaaactttttaaagtttttatttatttgtctttgagatggagtcttcctctgtcacc

SEQ ID NO: 90501 - DNA, 1068 bp, Homo sapiens
gaaaagagaagaaaaagatggggggaaaaaatcaaaccacaatggatttttgtttcctagttgggagtggggtggggtggggtgtctttgtgagggtgcctctgtacagctgcccaatccgcgacacccacgtcaaagcacagcatcaagttcgtttggacatccggcaaggcctcttaccaaatgaggcgccagataacttaataagctcaaaagaaaaaaacatttaaaaagaaagaaaaaaaaaaaaaaaaaaaccaagcatttccttttctttctaccaaaatgtgttgactgacccggagggggggcggtagggtgggggaaaccacacagaaaaaaaaaaaaaaaaaaaaaagaaaagaaaaaagaaaaaaaaatagaaaagaaaaaaaaaaatcttctgaaccaacttgtttcgatattccagagtttgataattgtttcgagactctcctctagcgtgcctgtgttccgtgtgtccccgtgtgcaagcgtgtgccatgccaatctgcctcgagggggcctcacccgtgtccgcggcgcccgccgaggcccccgagggcctgcttgggagtgtgtgccggtgtgcagttgtacgtgtctttctggtccatgtttactggctgtaaataccatttttatactccacatcgcagacctgcgtgatttgtacaatgtactttatttctgctacgagtaatttcatgaagtttcaacttgcaaactgacttttgggacaaaccaacacacacacagaagagaaagcaaagaacttggaactttgggttgactcggtttgagttttgtgtcaaagaagatttcccgcggctgaagaggttggtgttcctgttacgtgtttcaggtgagaagcagcaaagcgtcttaatgttcaaaacgcctctctttggtctggagaaaaaaaaaaaaaaaaaaaaacaactaaaaatttatttaataaaagttttacttgctaaagggctgactcttctctttctttcctctctctgtcatccacacagaccaagtgtatctggccccatccagcacctgggctggagagaaatg

SEQ ID NO: 90502 - DNA, 1058 bp, Homo sapiens
acctgtcccgggctgtctgtggggctggcctggagcacgggagcgtcgtagccacccggagctgtcacagggtacagcccgggtccgagggcctctgggttgactcctgcctgggggatgcctgggattcccagagacagcacaaccccctcccaggcagaagaaggtgatggtttccagtgtgtgaaaggatggggctgttcccgttgctctgaaggtgaaactgaggcccagagagggcaggggagcagcctgaagctgcacaaccctgagcagagggaggaggcgatgacaccagagtgagatccaggctgggtggcctttgcctctcagctcactgcaacctctgcagtgaggcttcctcagcaaggcctggtatgcagctggcgctcaataagtgcgccagtggaggtgacacttggcagtgtttcaggcccttctccctaataccctctaattccacgaaccgactcaatccttgcgtagctctctgtgaagctaagacagccatcgcctcattctgcatttggggaaactgaggcacggagcaaggtgaagaaggaattgccaagtctgcacggcggatgaatgctgggctgaaacagcaggtgctctatcaatgcacagtgggcgccggaagagtgtcaactgtgtgcaaaatcctggataatatgccatctgcccagcaacccacaggggtggcaccaaggagccccctgatctagatggggaaactgaggcacagagagatgaagggatttatccaaggtcaaacccaaaccctatcacatctcctgctccagacaggcctcccccaagccacgagggtgtgtaggtacacagctccccacccccgtcagacacatgagtggtccaccttggggagggtgtgggatttgggagtggacgcagcctcccccgctcacattctttctgagcactggccctttaaggtagccacgctgcctgggcatgtcccagggtgaccccaaggggcgggtgtggccaggaacaagaggcccattcagctgccccgttgccgccacctccgggcagcc

SEQ ID NO: 90503 - DNA, 1154 bp, Homo sapiens
tgtgttaaccagaactccagtttcactgggcatcctgtactgtgtctggaagcctccctcagagacaaagtcacttgccatgggtcacccagcaggttgttagagcctgggatggggaaactgaggtcacagggttgcaggaggtggggggtgagcgtgggaagaggtaaaccatgtctgcagcagagtctgacccctcgacttctctccctttttctctctccctctttctgtcgccactgggccactcagtcctggtatctgggatagcaaaggtcttcttccctcgccccttctccatcgtcccaggaatcccagggggcagcacagccggcccccggcccacgttttcggtggaaaattagagtgaacaagaacacccctgccgactcccagcccggccaaaaagacaaaacacatagacgcacacactcaggaggaaaagaaaaaacaaaggcagaagaagaagaagaagaaataaaaacccacccaagcaagaagacaaaaggtaaagacgcaacgtttccaactctcgggacgccaaggccgcaggactggagggccaggccccgccacccccacgggagacccgggacagggcgtcttcctaagttattcatctcctctccgcctgctgctcgggaaggacagacgccggccgcccgcccgcgccccggaggccctggctctgtccggagaccaggtgagcacagcctggagcctgtgcccagggccgacaggcgcgacacccagcaaggccacctctccccgggcccccgcgcctctgccggacacggaccggcccctcagcccccaccgaggacgcagccactggggggaaagggagacacagcggaccccggccgggcagcggagaccgcagaggcgggcagggtggggcaggcgagtggtgtcgcgggggtgcgtggcgcttgcgagccctggccaggggaggaagtgaggcccaggcacctgctgcccctcgagggggccctgcctgccgcggggcctccccacaagcccctcccaaagcgccggccgactcgctgtctcgctggggactctttcagccctcgcgcccgcccgtttgggaggagaagtctctatgcaattggccccggcccctccaccccccacccccggcataggaggcc

SEQ ID NO: 90504 - DNA, 1043 bp, Homo sapiens
agcagtgcctcacatgtctgctggtgtggctttgggattctcctgccccacccccccgtccatggcagccccctccccaaggctttgctcacacctgagacaggaaggaggaaggggatccaataggaatatgggccccggaggggaagtcatgcacccccaagccaccaccccccagccttccacgcacatctcctggctggaagagagccctccaaaaaggggacacaggctgccccggcccctcaactgcatccacaccccatcctctcatcttgggtcccagccaggcccccccaaaaccaaagccccctcaagtcctggggtcccagcctgtgcccccagcttcctgcccacccagccctgagcattctcacacagagaaagaacaagcaagggctccagggggacaggatggggcagggcatacagtggggggtgggggggcagctgggaggagggagggacaaaacaaaacattttcctttgggttttttttttctttcttttttctcccctttactctttgggtggtgttgcttttcctttccttttccctttgagatttttttgttgttgtttcctttttgtattttactgatatcaccaggatagtttactctccttctagctttctgcttaccgcacactggataacacacacatacacacccacaaaaatgctcatgaacccaatccggagaaggttccagcaggtcccccaccctcccctcctcctcctacttctcctcttgacagcgaggacaggagggggacaaggggacacctgggcagacccgccggctctccccccaccccaccccgcccctcacatcatactccaatcataaccttgtatattatgcagtcattttggttttcgcggacgcgcctacctaagtaccatttacagaaagtgactctggctgtcattattttgtttatttgttccctatgcaaaaaaaaaatgaaaatgaaaaaagggggattccataaaagattcaataaaagacaaacaaaaaaaaaagaaaaaagaaaaaaat

SEQ ID NO: 90505 - DNA, 1038 bp, Homo sapiens
tctgataggcctataggcgagaggcagtgcagagactgaggcccagagagggaaagcaacttacggaaggctgcacagctagtagggaggttggagctgagctttcagcgtagatgctcaggttggtcagtgggtaggaatttgccccacccaggtcctaggaacagacaacgcactggtgaagggggcttctaacctgggctctcatttttctgccacaggttcttacatccccgcgtccccaggtttagcctgagcagggttgtggaaggccgggacccattgacagcacgatggtgacggagcaggaggtggatgccatcgggcagacgctggtggaccccaagcagcccctgcaggcccgcttccgggcgctgttcacgctgcgtgggctcggcggcccaggcgccattgcatggatcagccaggccttcgatgacgattccgccctgctcaagcacgagctggcctactgcctgggccagatgcaggatgcccgcgccatccccatgctggtggacgtgctgcaagacacccgtcaggagcccatggtgcgccatgaggcaggtgagcacctgtctgtgtcccgggcacctgctccctcctgcctcacttcttcatgaccccacgtgtccccttcctcactcaggtgataaatatcagagtggtcaactgccccatagagcaccagatagtaaatacctgcagctctgcagccagacagcgactcaataaagccagcgcaggtcatctgtcaccaaatggctaaggctgtgtgcccagacaacctcaactgggcagggggcggtggctcaggcctgtaatcttagcactttgggaggcccaggaaggtggatcgtttgaactcaggagttcaagaccatcctgggcaacatggcaaaaccctgtctctagaaaaaatacaaaaattagccaggcatggtggcatgcacctgtagtcgcagccacttgggaggctgaggcgggagaatcgctggagcccgggaagtcaaggttgcagtgagccatgatcgtgcc

SEQ ID NO: 90506 - DNA, 1342 bp, Homo sapiens
tgaacgactgcatttcttcctttttttattcctcacctacttaaggttcgagctccctgagcccattggccaacacctctggagtctgaccacgcctagaaacactgcgcatgctccgttgctagccagcccaggcagggcgctgaatcggcacaaaccagtctcacttcttgtaccgcagtggggaggttggagagaattttttcccatgaaagggcatacgttgcccgtccccttccccgaagaacgcactaggaatactgttcctgcgtttgcatgagctgtggcaccagcaccgactcagccttccgggcctccctcatgcacggagcctctcactaggtctcacccgcggctgcgttggtgccgtccggcacggtcacgtgggcgagaaaatggcggcccccagaccgcactgcgggcgtcgcggcaggtgaagcggtggtggcagaggcgcctgcggttactggccgggccgacgggtcctgagtctccagagctcggtgaggcgtcccggaggcggcgatcacggtgtggggcccgggtctggcgggcggtggcaccgggagcgcctcgttagggaatccggtctcagggattcgttgactgtggatggggcgggttaaggggtctcgagtcccggcgatctctttcctctgggattttttacatgaaagagtgcccacctcacgtcctgaagctcctatgtcgtacggttgggtctcaatggtccccagtgccctgccagctcgcacaggcctgccctctggtttctgatgacccctctttaaaggtgtcactctcctttgatggtcacctgtgcttaggtggctacactgccctcgtcaagcccaggcagccttgctgacgccactgttcaccagagagggctgccagcatgccatagccagcctgtcttgagatgaagcatccgccaggttctcagccgatctggaaagagaggggtcccttctccccttggctgtgttcttttatcctaagtcattcaacaaagcgttggtggtttagagcccgactctggagccagacttcctggattcctaactcttcacgctgctcccaagcaagttcccaagcacagtcccaaactgtgcctcagtttcctcacctgtaaaatggggacaatcttagtaactacctcacagggtagtgatgtagatcgaatgaattaatgaatgtaaagagcatggagtgcctggcgcgtagcaaatgctacataagtgtcagctgctattgtcacggttgtcgtttttattttatttatttattttgagacagggtcttgctttgtagctcagtctggaatgcaatggcacgatct

SEQ ID NO: 90507 - DNA, 1148 bp, Homo sapiens
gggcgaggctgaagggggcttcccagggcatagtggcctggagctgtgactgtgtcctcccccagagtccttagagtggaggggccccagccccccatgaggccatggtcagtaatagaagtgtagtccaggcctagagcagcccagagatccccttgctgagggcacaccatggcctggcagtgttggcctcagacaaggggcagggtagtcaggaagggctgcctggaggaggtgtggggagcagagccagcacagctgtggaagggaggccagggcagccagacacccgagggtgaaggcctgtggggctgtccctgggtttaggatcacatggtggcggtggtgattggaggggccggactgggctcctggggctggcagggaaggagacacttcccaagcgtttgcaagaggtgacccaagtgccgtggctcacggatgccacgtggccgcctctgcagccagaagctgctccggtccccccggaaacccacccgcaagatctccaagatccccttcaaggtgctggacgcgcccgagctgcaggacgacttctacctcaatctggtggactggtcgtccctcaatgtgctcagcgtggggctaggcacctgcgtgtacctgtggagtgcctgtaccagccaggtgggtgctgcgtggggtgtgcatgtgcatgggggcctccccagctcccagcagacctcaatgtacccaccgggatccagggagcatcagtacgagccaggcgcctgccatggccctcctagctggggcctcccagcctcccagccacagccctcccagccactaccctcccagccctcccagccatggccctcccagtcagggcctcccagccacggccctcccaaccctcccagccatggccctcccagccactgccctcccagccagcagtggcatctgcggcagcatggggtccccactggagccacaatctctgttcagctctatagagaagaagagacaggtgtcccagcctggctgagcccaggggccactatgaccaccgagtggccgctgtcctggagtggcctctgggcgcatggagcctgctagtccctacagggagactgggttgctggtgcagggcagcagcagacactgcccgctggggtgggggt

SEQ ID NO: 90508 - DNA, 1026 bp, Homo sapiens
gcaggggagagcggaggagagagcggaggagagtggttgagggagtggatggttgagcagaagggagagcggatgggagagcggatgggtgagcagatgggtgagcggatgggagagcgcatgggagagcgcatgggagagcggatgggagagcgcatgggagagcgcatggatgagcgcatgggagagcgcatgggtgagcggatgcaagagtggatgagagtggttgagggagtggatggttgagtagatgggagagcagatgggagagtggatgagagtggatgggaaagcggatgagagtggttgagggagtggatgggagagcagatgggtgagtggatggaaaagtggatgggactgtggatgggagagtggatgagattggatgggagagtggatgagagtggatgggtgagacagtggagggatgaatgtacccatggatagactggggcttcgagaccagcggcaaagctcacactgacctctgcctccaggtgacgcggctctgtgacctctcagtggaaggggactcagtgacctccgtgggctggtctgagcgggtgagtgcagagggcttggcccccacctgggagatctgatggggctcttgacagtgttgggggccttgaagacccagagggtctagtgcgtggcctgaggtcgcctgtgtccaagcataggtctgtgtcccccactgtccccggccttagtgtggtcctggtagagggagtaacagggatgagcaggcacccaccaggcccctagaaaggatggcaggtccagtggggaaataacgccccagttccttccatgggacctgcccacctgggactcgctcccctggagttccattttccactcagggtcgagtgggctttagttccattttagattatgatgaaaacatctcagcagcagctttgaagcatatcatggggagggtctgtgcccctcacccagagctgcccagggctgcccctagcactcgtaaccgctcactgtgtccaggcgtgtgcgctc

SEQ ID NO: 90509 - DNA, 1064 bp, Homo sapiens
gggcctgtgtggaacctggagctcagtgtctgcagtttctccttccctctgtgtgaaatgtccatgtgggaaggtccacgtaccgagtcttggctggactctgagaaacccaggcgcagtgtgtgcggggtgtgcccgccaccccagcatgcactgaggggggtttatgcttcttccgaagggacgtgcattcgagagtcgttagggaaaccgtcccagagccctggtgaggagagagcctggcgcgaccaacgccaggacgggcacagtccccgggccagacctgacaccggtgctctgcccatgccttccatcctaggggaacctggtggcggtgggcacacacaagggcttcgtgcagatctgggacgcagccgcagggaagaagctgtccatgttggagggccacacggcacgcgtcggtgaggagcccgggtcccatggctggtgagctccctgaggccccagctccgcgagggcaggagaggctcacccccgcttccacctggcctccaggggcgctggcctggaatgctgagcagctgtcgtccgggagccgcgaccgcatgatcctgcagagggacatccgcaccccgccactgcagtcggagcggcggctgcagggccaccggcaggaggtgtgcgggctcaagtggtccacagaccaccagctcctcgcctcggggggcaacgacaacaaggtacccccgcccagagcctgggcttccccttcaccagaagccgcacccctcacactggcaggaacggaagagcctgggctggggcgggcgcgggcgcggggcccactccacagccatcagcagggcaccaggcttgtccttcctgctcagccagtcctgccctgtggcacagggtgacgagtgtgtgcccccaggggtccttgagggagcagcaggaggagtgtggggtggggtgccagggcaggtcgtcacacctgtgaggaccggcctatgggaccacagggctgggacagccccggcctcacagcccctgtcccccagctgctggtctggaatcactcgagcctgagccccgtgcagcag

SEQ ID NO: 90510 - DNA, 1099 bp, Homo sapiens
gcgtcctgctggccccttacctgccacctgagagcagcctgtggggagatgggtcagagtcgctctgaagggagatgggcgagggaggccgagcggggaggcagggagttgtggggggcaaggcccctgggcctcatcagggcctcacctggggcaagacttggggcctctgggcccccatcgcagccacacctggcggctctgtgaggagccggggagctcctatggctgcctctgcttagaggggaggcccaggatgaagcgggctccactgagcaccctggcctgctccagccactccgggcgtgtcaccaggacagtctcgggggtgacttgcaggtggggcagaggggctgtgggccccgtttgggtccttgttgggctccagcctttggcggtgggtggaggggtccacctgtggcctccacacctcctagacagactcaggtggcagagccacatcccagcatcccctgctcctcctgggctggctggcggctctgagctctcacatgggctcaggcgggtgcatgtgaggcagcaggcatagcacccggcctcgttgcccctcaccgaccgcagcgccccctccgccctccaggtgagcacgcacggctactcacagaaccagatccttgtctggaagtacccctccctgacccaggtggccaagctgaccgggcactcctaccgcgtgctgtacctggtgagttcacgccaggcacttcaaggtgccccgggattctggacaaactgccatggccaccccagagcaccctgtcctgtgttcttagggaggatggtgtgcagatctaaaaccccgtgggacccagcagcaggggccggcagggcatctggtgctggttgtgttgccagcgttggaatgggctctaccgaactccccagccctgcaggtgcaggccctgtcctcctggaggaccttagcttcttcatttgtttattttccccataaagaggggtgaagaggaaagccaaaaccaactcacagctgaccactcagatgaccctgtgaacgtcctacacagtaactgtatgcacgtggctggatgggggccaggaggcgtccttggccccacgt

SEQ ID NO: 90511 - DNA, 1047 bp, Homo sapiens
ccgctacggcgtggacagagagcacagctctggcatggaggatctgcagagcctcggtgttgtgtccagggccagagccagggctccttagggaccatccagctcatgccttgtttgctggggttgggggtaggggtggcggattgaagcgccaggcttgggggcacccagtggtgtgggcctgaccccggggctgtccctgcagatgacctacttctcaggcctcctggtgatcctggcctttgccgcctgggtggcgctggcggagggactgggtgtggccgtgtacgcagcggctgtgctgctgggtgctggctgtgccaccatcctcgtcacctcgctggccatgacggccgacctcatcggtccccacacggtagggctggtagccaggctggggtgggggaggccgggtcctagatctcggggtgcacgctgaccacctcgcctgtgtctccacagaacagcggagcgttcgtgtacggctccatgagcttcttggataaggtggccaatgggctggcagtcatggccatccagagcctgcacccttgcccgtgagtgccgctgttcgttcattcattcttttgttcagtaagaggggattaagcgcctgctgtgtgtccagcagtgttctgggtctgggcatccagctgtggaccaaagacacctgccccaatgggagtcataggcaggggagacctttcctttcttccactgagcacttcgtttattcactcaacaaacgttgggtccatgtgtgcagtgctgaagacaccgtacagaaatatatcgggggtgggcccagctggaagggagccccgagtccgtgtaacccagacccacagaactcagggttcagacatggatggttctagaccacagcatcacagcattcacgcctgtagaggcccagggcctggaaaccacagccggtctgggcctggggcagagccagccgtgttaatagtcacagaggtgaacatgtggttggtaccggcgtgggtggtgtgtaaaggtgaacgctcagagaaacctggacagcca

SEQ ID NO: 90512 - DNA, 1019 bp, Homo sapiens
tgtgtgcaagcaggggcggtgccactgcaccgtgggatcgctgttgattgtactcccaccggggtgtcccaggagaccctcctaggcttggggcacacccagagagcgtggctgcctcctaccaccagtaaattgccaccttgtcccttcgtcttagggtggggactgcgatggcttctccaccttcgatgttcccatcttcactgaagagttcttggaccaaaacaaaggtgagcggtaactgcgctcctgatgcgaactccgtgaaactgggtggtagaggggggcgtgggccaggagggccccaagactgcaggaggcggatcgggaggttccctatgagcgtccaggcgcacgctgtcgctccagaggctgatgtggagcaggaggcagagggcgcagtgagggaaacctgggcaggggcacgtcccgggcaaaagcccggaggtaggggaaaggggaggcgcaggctttgaccccgctccccccggcgcagcgcgtgaggcggagcttcggcgcttgcggaagatgaatgtggccttcgaggagcagaacgcggtactgcagaggcacacgcagagcatgagcagcgcgcgcgagcgtctggagcaggagctggcgctggaggagcggaggacgctggcgctgcagcagcagctccaggccgtgcgccaggcgctcaccgccagcttcgcctcactgccggtgccgggtgcgggccacgcccatctcccagtcccgccccggtcacccggccccgcccgcctccccccccctcctcccttccccccttcccctgtcgcccggcgccgcccatcgccccgtcccctcttccccagtcacccggccccgcctatcgccccgccctcatcacccccagctccgcctcctccccgacccccgcacccctaccccatagctccgtctggttcttcccagaccacacccgagctccgctccgcgccccgttactcggccggctccctgacctcgcccccaccgaccgcgcctcccggcca

SEQ ID NO: 90513 - DNA, 1020 bp, Homo sapiens
attctattgctgcgatggcctgggtcccaggactagattggactccagagcttagctggattctggaacttggctgggtctcagctgctgtctgtgttttggagctggctgggatttcagaaccagcctgtgctccagaactgagctgagttccagagctgggtgcggtgcttgggctggattgagctctggagcttggccaggccttgaaattggtctgggtcctggaagtaaactgcattctagagctgagctgcattgtgcaaggagagtggggcttggcaccaagctgtgtgctggagctgggtcttgcttccaagatggatggggttccagagctggtctgaatcctggagttgggcctggttgtagcactaggcgaggttctagagctgggctcagtctcagagctggaatcatcactggagctggactgggctgcaggatggggatgggcacttggatgcaactggggttgggatctggactgggcagccgtgtggacctgggtttctgagctggtctgagttcttgaataggatttgatttgggagctgtctctgaatcctgagctgactggggttccagagctgggctgcttcatgaatctcacatgggttccaaaattaactggggttccggagctagaccgagtgtccaggtgtggctgcatcgtggagctgtccagagttccagagtcagcttgagttttccagcagggcttggtctccgagctagcctggattctggaactgggattggtctccaagctggtctgggtcttaaaatgtgtctgggttccagagtttggcttgttgtcagggctcagctggattctagagatgtgcttcgtctcagagctggcctgggcttcagagcagggcttggtctcagatcttatctgggttctagagctgggtttggcctcagaggtggcctgagttctagaacagggcttggtctcaatgctgggattggtttcagagcttatctgggttctagagctgggcttggtctcag

SEQ ID NO: 90514 - DNA, 1040 bp, Homo sapiens
ttcgccgcctccttctgcgtggtgggcctggcctccaacctgctggccctgagcgtgctggcgggcgcgcggcaggggggttcgcacacgcgctcctccttcctcaccttcctctgcggcctcgtcctcaccgacttcctggggctgctggtgaccggtaccatcgtggtgtcccagcacgccgcgctcttcgagtggcacgccgtggaccctggctgccgtctctgtcgcttcatgggcgtcgtcatgatcttcttcggcctgtccccgctgctgctgggggccgccatggcctcagagcgctacctgggtatcacccggcccttctcgcgcccggcggtcgcctcgcagcgccgcgcctgggccaccgtggggctggtgtgggcggccgcgctggcgctgggcctgctgcccctgctgggcgtgggtcgctacaccgtgcaatacccggggtcctggtgcttcctgacgctgggcgccgagtccggggacgtggccttcgggctgctcttctccatgctgggcggcctctcggtcgggctgtccttcctgctgaacacggtcagcgtggccaccctgtgccacgtctaccacgggcaggaggcggcccagcagcgtccccgggactccgaggtggagatgatggctcagctcctggggatcatggtggtggccagcgtgtgttggctgccccttctggtgagtaggggctctgcggggtcctgctaccctcctgactggacctctggtcacccagggtggatttagatcctgatggtgggaccgggcgcggtggctcacgccggtaatcccagaactctgggaggctgaggcgggaggatcgcttgaggccaggagtccgagaccagcctggccaacatggtgaaaccctgtctctactaaaaatacaaaaattaaggccaggcgtggtggctcacgcctgtaatcccagcactttgggaggccgaggcgggcggatcatgaggtcaggagatcgagaccattctggccaacacggtgaaacactgtctctactaaaa

SEQ ID NO: 90515 - DNA, 1309 bp, Homo sapiens
tggtggaagcttttaccggccgctgtccgagcactccctgggcagcctccgtcctaagacagaggagaaaatactggcttcagaaaacccctgggccaggaccccctcgggggtcatgcgtggggctggatcccgcagccaggccctaaccaccaggttctcctgtcgctcggcggggaagcgcgctgcgcttggtccccacccaggaggacgatagacatgaagaccaaggtccggggctcggggcggatggtgtgggtctccgggtcgcccaggccctgtcccctccccatgtgccttagctcgccccagcctgttttccttttgcgggaggcaccagcggccgcccctgccagagaggctaggagggaggccaggacccagggggaggccgaggcccgggtgaacgccgtcccgcccgcaggagacgccagcgagagcgccgaggacatcttcttccggcgggccaaggagggcatgggccaggacgaggcgcagttcagcgtggagatgccactcaccggcaaggcctacctgtgggccgacaagtaccggccacgcaagccgcgcttcttcaaccgcgtgcacacgggcttcgagtggaacaagtacaaccagacgcactacgactttgacaacccaccgcccaagatcgtgcagggatacaagttcaacatcttctaccccgacctcatcgacaagcgctccacgcccgagtacttcctggaggcctgcgccgacaacaaggatttcgccatcctgcgcttccacgcggggccgccctacgaggacatcgctttcaagatcgtcaaccgcgagtgggaatactcgcaccgccacggcttccgctgccagtttgccaacggcatcttccagctgtggtttcacttcaagcgctaccgctatcggcggtgacggccctggggaacggcaggcaggtgtcctcgggggcacagtaaaggggcttcggtgaagctggtggtcactccggggccgctgtctgggctgcagggccgcgggttcacgtcccacctcaggccgcatctttctttcgccaggcctcagtttcctcctatataaaaggggggtcaccattgagcctgccatggtgagctgaggagacactgggacaggctggcctagggtcctgatgcaacggagggggcgctaggggcatctttcgagcacgagggtggccagcagccgccagctgacctcaccgtccaggcggacactctccaccgcccctcagccaggctgggtggggcccacagggcctgccccaagtggcggccacacagggtgttgt

SEQ ID NO: 90516 - DNA, 1084 bp, Homo sapiens
gagccctggcaccagagacgccaagagcctgtggggtgactcggagcagcaggtgtggccccgggcgggcggcaccgcgtccagggcagcctccctccgctgagtgacacgggacaccagtgcccggccgacgcgcctttgcaggagaaatgtgcaaacctctgtggataccatttcatttccattcttgtgttgtctccaaggcccttttggagatatacttggtgttggttgtgttttttggttccttttcagagaactgtaaaccgaggctgacgtgctccactgactgtgccgaggggcgggggcaggaggacggcaagacctatttataatatttagcgaactcggtctccctcagatcccccgcgagggaggctgctggacccaccccgctgtcccccatgatagaagtctgtaaataccttggtgaccaatgcccacttcccctcctgggtcacctctgatggctgctgtccactgagaacgtgggcagtgtccaaattcctgtactgtaaagactaaaaggcgtttgctctgagactgacaaggcggaaacttccatgtgtctcctgccaggctctgtccccctacgccatcccgacacgtccccgttcccccgaaacctggctcagtgcaatactcccattgccatggggtccttcaccatggtactgtctccacagccctcagtccccaccccaggagaggcgcctgccacctcctcctcatctccggtggttcaatcgctccgcctgtccccaacccagtcccatttttatggccaaactgattctgaaacaaaatgaaactgcaaacctcgtgtgtcttaactccccccagggatgccactccattcctccgccccgtggtctggtgcgtgacaatccaaagcgccgagacgagggtgctgtgtccctcaaacccagagtggtgggcgcctctgaaaccatacagccactcctggccccaaacactggtttgcatcccaggttcctcgcccacctacccccgccacaccccgtctttttagagatctctctaataaatcgggtaataagcatccgcctgtttgcctttctgt

SEQ ID NO: 90517 - DNA, 1055 bp, Homo sapiens
gagtatagaaggctccaccaggtggggtggtgacagctcccgccttctctcacggccactgtcatctgaggtgcaccaggatgccatcgaaggcatgcagcccccaggctagggaatgaaggaagggacatagccatgcaagggccctggggcaggaccacacctgctgagggaacagcaaggagcccgtgtggccaagcagcgcggaggggaagggagggggggtggggaggggaagagagcagtggaggggaagacagcggggagggagagtggagaggggacggggccaggctgcacagggccctctgggctgtctggattctattttgagagcggtcagaagcctttgtgtgagggggaacgtcgtccttccctgccgtgtggggaggtgggagtgtctgggaggcgggcgggcactgggctgtgggttcccagggtgagccaagcctcagggagaatcgactgtgtgtttgggggctcggaggctccgcaaggtgcccacagtcctctcccctcaggccggcccgacctcctgccctgcacgccaccttctttcgaagaagccactacagcctccattgccacgactctgtcatccacatccctctccattcctgagcggtccccctcggagacgtcggagcagccgcggtacaggtgggcgaggcatccgcagtgcatgtgggcggggcatccgctgtgcgtgggggcggggcattcactgcatgtgggcggggcatccgctgtgcatgtgggtggagcatcgtatgtacggtggatgtacatacactgcatgtgggtgcgcgggggcggagcatccaatgtgtgggagggaggagcatatgtacaggtgggcagggctgccagggggcaggtaggcaggcgggtaggcaaggcaggtagactgagcaggcgggccactctctttctgggtgtcacgtgtttgctgtatctctgcaggcggcgcacacagtcgtctggacaggatggcaggtgagacccaacccccttccttccctgggtctcaccagctcctcctgcacagctcccag

SEQ ID NO: 90518 - DNA, 1079 bp, Homo sapiens
cagctccgcgcttcaggtgctgtgtggccgtcacttccccgggcttcagcgtcccgtctgtgaagtggggtgatgaccgtgtgtgctaggggctgagcctgggatgagttggcgctcgtgcttggtgattgtcgtgccggttggccacccctttccggcctctccaccatcggtgcctccaggcccctgctgaggcccatgcccgtggtttctggagtcaccgctcactgttagaagcgatggcgacaccttccagaaagctcagctacagcgggagccttgtccgacaggggccgagggaggctgcccgtttcccacggcactgccagctcccagtgtcatcgtccttggcgatttcggctgatccgatgggaggcaaagcaatgtctcgttggtgtttagaatttggttcctctaattgcctgggctcctggctcccgaggcgtggcctgaatggcgtctccatgggccgtggccgtggggcacgtgggggcggtctcgggaaggccggggcttgggatgcggctgtgcccactgtgtgggccgatggcctgtggtggagtttggtctgagctgtggcctgggcgtgtctgagcctctcccaggctgtcctgtctctgtgatgccccagaacggtcagctccatccctgcccctgccccactcccacggctgatctgtctctgtgatgccctggaaaggtcagctgcatccctgcccctgccccacttccacggctgatctggcagcaaatgatggcagcttcaccttcagaactggcccagaacccactgactccttccctgtcctctgcctctcccgggtccagcttggtcctcccgggtccagcttggtcctccctggtccagctcggtcctccccggtccagctcggtcctcctcggtccagctcggtcctcctccgtacagctcggtcctcctccgtctggctgagtactccccggtccagctcagtcctcctccgtctggctcagtcctcctctgtctggctcggtcctccccggtccagctcggtcctcctccgtccggcccagtcctcctccatccggctcggtcctct

SEQ ID NO: 90519 - DNA, 1013 bp, Homo sapiens
aggcctgagccaccgcgcccagcctggaggagctgttttgagaatggagtcagtggggcacgggagctcacgcccatggtcccagctactcaggaggctgaggcaggagaatcacttgaacccgggaggcagaggttgcagtgagcagagattgcgccacagcactccagcctggcaacagagactccttctcataaaaaagagagagagaatggagtcttctcttggggctggagtcaaggtttggggctcagcttggatttgggggctgagcctctcaggtgaagggtcaatggatacaacccatcctggagtcaacagagaagcctccactgaggctccaggctccaggctcctcgccttgatttgggaccagagtttgaaggtggggggatgtcgtgggtggcagctggggtcctggccagggccagccgcagcatccacacccaccccacagctggatggctccttggaggacaacctagacctccctcaccacggcctggccgacagctccgctgacctcagctgcgacagccgcgttaacagcgactacgagacggacggcgagggcggcgcgtacacggatggcgagggctacacagacggcgagggggggccctacacggatgtggatgatgagcccccggctccagccctggcccggtcctcggagcccgtgcaggcagatgagtcccagagcccgagggatcgtgggagaatctcggctcatcagggggcccaggtgcgtcggacatggggggcaggcctgggaagggtctccggaggggatgccagcacagagcagacacacactgggagcctgttttctaccaggacgtcaacaaacacggcttccctggtcagactggtttctgggactcagacctggggtagctgagacccacgtggcactgagtaacttgcagcattttttttttttttttttttttgagacgcagtcttgctctgtcgcctaggctggagtgcaatggcgcaatcttggctcactg

SEQ ID NO: 90520 - DNA, 1051 bp, Homo sapiens
gccaccgcgtccagcctcctataagactccaagactctcggccgactccccgaaaccttgcccgctcctgggctgtccctgccacccatgaggccccaggccccctggctgggtctttgatagcttttcccacagcccatgcgcagggagctgcctccctcatcgtccccccagcccagggctgcccctccccttccttctccccgtagattccccaagatgcggctgtctctccacctcccccaaagccccagggcagaaggctgtgtcctgggactctcaccccaggtggggacaggagggctcagctctgaggaccctggggactttggggacctggaggaggtgggtgggacaccccagggacgcgccactcctccccgcaggcccagctcatcgcccaggccattggccaggccttcgccgccgcctacagccagttcctacgggaaagcggtattgaccccagccaggtgggcgtgcacccgagcccaggcgcctgccacctccataatggggacctggaccacttctccaacagtgacaactgccgggaggtgagtgaggtgctgggcagcccccacctggtgccccccacacccgtgcacctgcaccgggccctgctgagcagcctccgcgccccctgtgtgtcccaggtgcacctcgagaagcggcgaggggagggcctgggcgtggccctggtggagtcgggctggggctccctgctgcccacagccgtcatcgccaacctgctgcacggggggcctgctgagcgctcgggggccctcagcatcggggaccgcctgaccgccatcaacgggaccagcctggtggggctgcccctggctgcgtgccaggccgctgtccgcgtgagtttcctggtgtggcagggcccccacactcccaggaaggggagctgagtcccagagaggtctcctccctggccaggtctctccagcccagccaggagggacaaagtcgaacttttaagtcctgcccactggtgtgcccttggggaaactgaggcctggagaagggaggccacttgtcc

SEQ ID NO: 90521 - DNA, 1044 bp, Homo sapiens
gcctgtccctgtcccctagggacccaagaagcctgcgggcagcccagcccccatggcagtcacagccacgctcagcccccacagcaggcgcccatagtggagtccggacagccagcgagcaccttgtcctcgggatacacctaccccacggcgacaggcgtccagcccgagtcgtcagcttccatcgtgacctcctaccccccgccctcctacaaccccacctgcaccgcctacacgggtaagaccagcgttccttgcccaggtggtctgcccgtcggtccccacttcaactcagtggaatcagcatctccccccgactcattgttttctctgctgctcagcaccaagctacccgaactatgacgcgtcggtgtactccgctgccagccctttctatcctccagcgcagcccccgcctcccccgggacccccgcagcagctgcccccgccgcccgcgcctgcaggctcaggaagcagccccagggccgactcgaagccaccgcttcccagcaagctgccgagacccaaggcggggcccaggcagctccagcttcactactgcgacatctgcaagatcagctgcgctggcccccaggtcagtcgccctcctgccatgggcaggccccagggacctctctgtccccaacgtctgaacccgaatgtgggcgccggtggggtggtcagggtcgctgcctgctgaaagaaggtctggtgttaacttgcatgttgtatgcatggcctgtgtgtgcaagcgcttgtgtgtgtgtgcaagtgtgagtgtgtatgtgtgcgtgtgtttatgcatgtgtatatgtgtgcatatgtgtgtgcaaacgtgagtgtgcatgtatgtgtgcttgcacgtatgtgtgcgcatgtgtgcctgcatgtgcctgtgtgtgcaagcgtgtgtgtatgtgtgtgcatgtgtgtgcgtgtgtgtatgtgtgcgcatgtatgcctgcatgtgtatgtgtgtgcatgcgcccgtgtgtgtgtgtgcatgcgtgcttgtgcttggcagtgcttgtttgggacatacgt

SEQ ID NO: 90522 - DNA, 1042 bp, Homo sapiens
gtgtcaccctcccagcgtcaggctgggaggcagacgctgttggggcctctcactgccgggctgttgaccttgatcctttggctaaggtgttggctcgggctccccactgcagttaccctcccctcggcgttactgagcactgggggctttcgggctctgcgtctgcacagatacttcgagtctccaaggagacttctgcctgttcatttctgctgctgtcagtggcggggtgggggggtggattttgaatgcctcttgggtggtgtctgggatcgttgcaggaaggttctaagggctcaggagtgtgagtggcccaggcacctgccgtcagcctgtcttctgtgctccgcctgtcgtgggcagccggagaggcggcgcggccgtggtgggagcccaggaccccactgagcccccacgcctgtctcgcagcctgagcggtgcatccccgttcctgggcgagaccaagcaggagacgctcaccaacatctcagccgtgaactacgacttcgacgaggagtacttcagcaacaccagcgagctggccaaggacttcattcgccggctgctcgtcaaagatcccaagtacgaggggccggcagggggcacggggtgggacatgggacacaggcccactccacccacggaggctccagaggactctcctcccagcgccacctccctgcggctggggatcagacattgcttaccccttgggctggagagagtaaactgataaactggtggcccaagctggccattgccatggtttttttttttttttttttttgagacggagtctttttttttgagacggagtcttgctctgtctcccaggctggagtgcagtgcagtggcgtgatctcggctcactgcagcctctgcctcccgggttcaggctattctcctgcgttagcctcccaagtagctgggattatagacgcccgccaccacgcctggctaatttttgtatttttagtagagacagggcttcaccatgttgcccaggcttgtcttgaactcctgacctccttggtttgtgatt

SEQ ID NO: 90523 - DNA, 1365 bp, Homo sapiens
gggagctctttgacttcctggcggagaaggagtcgctgacggaggacgaggccacccagttcctcaagcagatcctggacggcgttcactacctgcactctaagcgcatcgcacactttgacctgaaggtgagccctgtagggccctgtggggccggcctggccagtgtgggggtggggatggggcggggaagagcctggaaggcacctcctgcgcgtgggggtgaggtgtggggagcgtgggggtgaggtttggggagcgtgggggtgaggttgggggagcgtgggggtgaggttgcggggagcgtgagggtgaggtttggggagcgtgggggtgagggtgggggaggcccgtgctttccctgctgagcctcctcccaccccagccggaaaacatcatgctgctggacaagaacgtgcccaacccacgaatcaagctcatcgacttcggcatcgcgcacaagatcgaggcggggaacgagttcaagaacatcttcggcaccccggagtttgtgggtgaggccctgcccagtgggcagccccggcctggggagggtggtctggggctgcctgctgtgcgtggggtgggtcatgcccggtgctgggtgccgcgtcctcggccctgaagccacccctcttgggcccggctttgcgggaggtctgggcctccatttggtgcagccccgctgtcctacccgtcaggccctgagggccagctctgccgcattcatgcccccaagggctgcgacatgtgagaaccttgaccccatgcctgtgtcttgagcctcttccttggccagcatgtccccagtgcctgacccacatctccctgttctgcagccccagagattgtgaactatgagccgctgggcctggaggcggacatgtggtgagtgtaccacctgctcccaccgggcctccctgcattcctggagcgcaggccagtgctgcagctggggatgaagcggggccttgctgctgttggggtatggggggaccgttgccctagaacaggggcgctggacgccacggtcctgggagggtgggcggccccacgctgcgctgacccttgcctcttgtctgtccccaggagcatcggtgtcatcacctatatcctgtgagtacctggcgggggccccctcggctgtgcaacacagctggcatgggtccccggctccgtgtgtctcatgtggacgccaggggtccccagcctggctgtgacccatcgcgggtactcaggggataccgggtgaacggatgagtgattctctgtggctgctgtcacagaggcttctggagagttctgaaggcaggacactcacagagcggctgagcaggctccgggttgggggtcgtgtgtgctcct

SEQ ID NO: 90524 - DNA, 10317 bp, Homo sapiens
tcagtgattccgatgcctgcttcttataaagtttttatttagaaataattacaggtaaggagttgcaaaaacagtatagtggtcgcgagtgtcctttttccctcggcttctcccaggggtatcgtcttacgtaacaatgtccaaacagggaaattgacttgggtataatccacagactctattcaccttgtaaattggttttaatagaagtactggacaacttgtaagctaatatcgttgctatggttctcgttctcagctaaaacggcgctctttactttgtgcacctgaacactgcacaccgagggcgaccaccgcccccgagatgcccagcttctattctagagcgccgcgccggcgccgaatgggttaacgggcggggggacacgcctccgtgcgcttgcgcggcgtcccttcgccccgccttcgcagcgcagtcacatgacccgcccaaccggcgtccgcctataaaaagctgagtgttgacgtcagcgttctcttccgccgtcgtcgccgccatcctcggcgcgactcgcttctttcggttctacctgggagaatccaccgccatccgccaccatggtgagtaaccctgcctcgctggtgccccggagcggcggcggggcctccgcggggcctacgctgcctagcctgggacgctggggccccccgtgccaggaggagacgtagcggcggcggggccggaggacccggggctggggaagcggccgccgccatgtctgtgcgccgcgctgttcaccgagccctttctccgtttccgagggcgccataaccttgcccagacctggttggagctgggttgttagcggggatgggggtggggaatgatgatgtggcaggcgtagtaatggcgggcaccgcggtggaagcggggagacagggaggcgccttatgtaacccgcgggccgcgagtttgagatcgattttctgccgggggactaggggcggcagggaatggcagaacgagcaaagcgacacctgaaaggctccccttttccttccaaataccttctcctgatgctgttaatcgtcgaccttaggcacttgtccttcctatgactcccagatgtacaaagactcttattgagacacgaggtgtaggcttgtggcagttagggccgttccggctccccgttatttcctggggtgggtggccttgtctgatcccgtttgccaaggggtgaccttgcattttatgatgaagcttcttgctcggggaagtttgggtggcccggtgacaacgtggagggggctttaggagaggattcatcccttacgtgtttggccccaaatgagactttagtatttgtacctggtatcaaggaaatctgttgacactcagttttattcctgagcacttttatttctgggttgtcaatcatgaatgacacctattaacggtggttccttggagattgcggggtggctcttaaggggtgttaggctggcaagattcggtgggcttggggcaccccagcaccaaccccctcctggccttgggcatgctggttcgtttggactgaacgctccgtgccatgctgtgttcctggaaatcacgagctggtctgagcctccttgtcttgcccaggtgaacttcacggtagaccagatccgcgccatcatggacaagaaggccaacatccgcaacatgtctgtcatcgcccacgtggaccatggcaagtccacgctgacagactccctggtgtgcaaggcgggcatcatcgcctcggcccgggccggggagacacgcttcactgatacccggaaggacgagcaggagcgttgcatcaccatcaagtcaacgtgagctccctgtgccctctgtacccaggcagggaggtgctggcctggcagctggaggccactgggccagggtgcgcggggagagacttggcaacgtctctttcccctggtttcttaattcatgggagaatgagtgaggttcagtccagcgagacaggatggagaggcacagggattcggggtactgcgagctggaaggttttcttgaggagggggcttaactccgtggttctccctccctgggggacttgcccccactcctacaatatctggagaggtttggctgtcacacctgggaggggagggtgttctagtgcttgggacgctgggaagctcctgtgttgcactggatgatgttcattccatgtcagtttctggccccgatatgagtagggggagcgcagagtacggtgaccccaactgctttttgtcctgggttggtacattggtgagggactctggctaaggctcttcatttcccctggagcaggggcagaagtgaggaggggagggtcggagtctctggaggcttttgccgtcctgctgggtcttttagttgctactttgagtcaggtgtgatgaatcttgggaccaagtcggtggggcaggatgtctggtcaggagggctctgaggatctggctatggggctggtaccaggagttccctgtcatgggggtggcatgtctcggacagaggcaaaggacaagggtgggttggctcttgtgggagcctctccagggatgagtcatggagggaggagcagcctggcttctgacagcatcccagactccctgggccaggtgtgtggctcctgtccccctgacgagtccctccctccatcagtgccatctccctcttctacgagctctcggagaatgacttgaacttcatcaagcagagcaaggacggtgccggcttcctcatcaacctcattgactcccccgggcatgtcgacttctcctcggaggtgactgctgccctccgagtcaccgatggcgcattggtggtggtggactgcgtgtcaggtaagcagtgggtccccctgaggcacggcctggaaccgggggccatccttgcttgaggatgacagcgccgccctgtcccccgtgtccccaggcgtgtgcgtgcagacggagacagtgctgcggcaggccattgccgagcgcatcaagcctgtgctgatgatgaacaagatggaccgcgccctgctggagctgcagctggagcccgaggagctctaccagactttccagcgcatcgtggagaacgtgaacgtcatcatctccacctacggcgagggcgagagcggccccatgggcaacatcatggtacggccctccctagctgggtggtgggcttgccgcagcgggatctgcaggagccggtggggagtggagttgagctgagggggactggaagtgtgtttttgccaggaatgttgggtgacagagaagggggctggaatgttttcatccgacttgacccagcccttgatctttgggcagctggaagagacgagctcagggaacgctgccctgggtggtggaggggctggcccccctattcgtgatgactgatcatttcttcactttgaccagatgtctactgaagaaagcctgcgtctgaggcccatgcccaaggcgcccagcccgtagcttcaggctctgcgcaggggccctcacggctgcttctcgtttctcacacttccagatcgatcctgtcctcggtaccgtgggctttgggtctggcctccacgggtgggccttcaccctgaagcagtttgccgagatgtatgtggccaagttcgccgccaagggggagggccagttggggcctgccgagcgggccaagaaagtagaggacatgatgaagaagctgtggggtgacaggtgagccccgcgggatatggtgggggattcctgacacctgggggtagtggcagcgacgtaggggcgtggtgtgctattcacagcgtggctcaagcccaccaggtcttgcccaagcatgtccccttggcgaccaccctccccaagtcatcccctggagaccctaacttgatttggcttggcctctccttgccaggtactttgacccagccaacggcaagttcagcaagtcagccaccagccccgaagggaagaagctgccacgcaccttctgccagctgatcctggaccccatcttcaaggtgagtgagggctgcgccaggcaccccgccgatgcgactattggccctcggccctgtgggctccggccggtagcctgtcggctgactgggcccgtctccttgtggggcagatgcgagatgggaggaggcacagctcctaactgaggtggagtcagggctcctctcttaagatctggactgcatagccagagccttgggacctctcctgcattgagggggttgaataacttgtggctttggcggttcagtgcttgtaagtcagaacttgggtccttgtctgagtcagagtgggctttttcctctgctccaccacgaggtttcctccagctcccgatccgctcagctggctgggcccgtggtaggcaggccaggcctgctcctgctcccgtgctgcgtccccctgcgctgacctgagtcttccaagcaggaagcagtgccaggcttcctcctgctgttcccaaatgggctttcttgtttcttggtggggaatgtaggtgtttgatgcgatcatgaatttcaagaaagaggagacagcaaaactgatagagaaactggacatcaaactggacagcgaggacaaggacaaagaaggcaaacccctgctgaaggtgcggcctgggcccagccctcggggtggagggaacacaggctgctgtttccggatgctctgacagcccaggcctgggggctgaagtcctcagctgggcagggacagctgctgcccctttcgctttagactctgggtgctgctggagacacatcccagcagccagccccatccgggacaggtgtgggtgagggccttggcaggagtgtgcatggcctttgccgccttccagaagggactgtgctttggagaacgttagtcctgactttggcttccttggcttcaagagaggaagcgtgtacggggtggggccatcctgggctccccaggtgtctcatgcaccgctctctgcccccgcaggctgtgatgcgccgctggctgcctgccggagacgccttgttgcagatgatcaccatccacctgccctcccctgtgacggcccagaagtaccgctgcgagctcctgtacgaggggcccccggacgacgaggctgccatgggtacgtggtcccggtggccgggccctgagatgcagccggatgacttcctgttgcccaaggttgtgggttgcagggttccagaaggctgagctgcactggaataaagcttgcgggttttctctgtccctcaggcattaaaagctgtgaccccaaaggccctcttatgatgtatatttccaaaatggtgccaacctccgacaaaggtcggttctacgcctttggacgagtcttctcggggctggtctccactggcctgaaggtcaggatcatggggcccaactatacccctgggaagaaggaggacctctacctgaagccaatccagaggtgagcagctgggtgatgtgcaggccccttggcactgttgcgggccctgccctgctccaagtcttgggctcctcagtcgggagctagaagtaaggagcatagaaggaatatagggtgatacttgtgccagccacaacttttgttcttagcccagtgagggcatttctggagaagctccaagccccagggcacagcacacccctgctcatctgtgtccctgggcacaggtgggtggcggccgtcgacccatacccagggaggagggcagtgattctgaagaggatgtttcctgacagccccgacgcagcagtcagggccttgtggaagccaccagtctgccctgggacctggcaggagggccaccaactccgggagggacctgccctggccctccagggtccagcacaaccatccctgcggcctgctgccgccttctgcttcttccagaacaatcttgatgatgggccgctacgtggagcccatcgaggatgtgccttgtgggaacattgtgggcctcgtgggcgtggaccagttcctggtgaagacgggcaccatcaccaccttcgagcacgcgcacaacatgcgggtgatgaagttcagcgtcagccctgttgtcagagtggccgtggaggccaagaacccggctgacctgcccaagctggtggaggggctgaagcggctggccaagtccgaccccatggtgcaggtgggcacggagtgcacctgctgggagcagacaccctgaggggggacggcttgtgtcctgagttgtggctgtgtgggttgctgtggttggtggattggggtgactggtcatgaaaggaggggttcttggctgtggctgtaaatggagactcctgcccaggcagccaccaccctctcctaggctgctctgcgcgtgttcactgtagcttgtgggacttaacatttcttcaggagtttgtgctggtcccagtttcccagcaccttccctgaaatcttgttctggcggggtccctagctaaagggaagctgggagcctggtcccgcctgttccgagccgcctacccctttggtgctgacccgcatccctttcagtgcatcatcgaggagtcgggagagcatatcatcgcgggcgccggcgagctgcacctggagatctgcctgaaggacctggaggaggaccacgcctgcatccccatcaaggtgaggcgccagtgaccagccttccccacgccccaccccggacacctgccctctgctttaaagctgagctgagctaggctctgcagacgcctagacttgatctcggtcttggtctcagcttcttaagttcctcaagtttcttctttgcagtcttccacaggcatgtggggctgtttttgttgttgttgttgttttttttgagatagtctcgctgtgtcatccaggctggagtgcagtggcgtgatcttggctcgctagaacctccacctcccgggttcaagcgattctcttgcctcactcagcttcctgagtaactgggactacaggcgcgtgctaccacgcccggctaatttttttttgtatttttagtagaggcggggtttcactgtgttagtaagtcaagatggtctcgatctcctgacctcgtgatccccctgcctcggcctcccaaagtgctgggattacaggtgtgagccaccatgcctggcccagggctattttttttttttttttttttttttttttgagacaagagtcttgctctgttgcttaggctggagtgcaatggcgtgatcttggctcactgcaagctctgcttcccaggttcacgccattctcctgcctcagcctcctgtagctgggacttcaggcgcctgccatcatgcccggctaattttttgcatttttagtagagacggggtttcaccgtgttagccaggatggtctggatctcctgacctcgtgatccacccgcctcggcctcccaaagtgctgggattacaggcgtgagccaccacgcccggcctccggggcagtttttgagttacatcctgctgtcttctgtccacaaacaacacaaatgctctggaggggttgggacaggcctgctccagacctcgtttcttccctgttaatgcttaaaattccacaagcccgtggtttctgcgccggagagctcagtggagcccctgctccttgtccttgtctggagtgagatgcgcttggcactgcaacactgactccgcttcgttctgattgacgtggctctaccaggctgtatgaggtccgccttgctaggaaaagcttttaaggatgcgtctgtgtgtaaggtcacctctttctccaggcaagagtgggacttaacctctttttgcagaaatctgacccggtcgtctcgtaccgcgagacggtcagtgaagagtcgaacgtgctctgcctctccaagtcccccaacaagcacaaccggctgtacatgaaggcgcggcccttccccgacggcctggccgaggacatcgataaaggcgaggtgtccgcccgtcaggagctcaagcagcgggcgcgctacctggccgagaagtacgagtgggacgtggctgaggcccgcaagatctggtgctttgggcccgacggcaccggccccaacatcctcaccgacatcaccaagggtgtgcagtacctcaacgagatcaaggacagtgtggtggccggcttccagtgggccaccaaggaggtgaggcacggctcagcatgtgcagaccacacccgtttccaggctctagagggacctcatggtcctgcctcccgagacagagaccctaatggggccaaggcgggcaaggccccaggtccccctggtggagacctgcaggacttggcaggtggagggcaagcagccgaggtgtgtccggcccttgacggtggctctccccctcccccagggcgcactgtgtgaggagaacatgcggggtgtgcgcttcgacgtccacgacgtcaccctgcacgccgacgccatccaccgcggagggggccagatcatccccacagcacggcgctgcctctatgccagtgtgctgaccgcccagccacgcctcatggagcccatctaccttgtggagatccaggtgaggtctacccgcccaccgctgaccctgccaccgtcctgcccagcggccactgacaggttttctttcccttctggcagtgtccagagcaggtggtcggtggcatctacggggttttgaacaggaagcggggccacgtgttcgaggagtcccaggtggccggcacccccatgtttgtggtcaaggcctatctgcccgtcaacgagtcctttggtgagtgcctgcccggtgtggcctgcagagcctggcaggctggtttgggggacagaagcccagttaagcttagcaaggtgttaaaggaggcgtcctgatgggagcaggtgatggatggagcaggtggtccagtttctgacagcttgtggaccccctaaatcactgaattcccaggggaggggctctcctatccccagtgtgagaagggctctgggcctggagctctgaaggcctacgccctgggccggtagagcagccgagctgtagcacagggttgtcccaaacgagcagcggcatgaggcccatgagtggcctgctaggcccttcgtgaagtgctgggcaccaggccgagtgtctggtctgcagggtgactcaggctgaggaactagcctgagctcctgacaggactttccttctgccctgccaccttctcgatggcccagtgagcctctcgcttccctctgcaggcttcaccgctgacctgaggtccaacacgggcggccaggcgttcccccagtgtgtgtttgaccactggcagatcctgcccggagaccccttcgacaacagcagccgccccagccaggtggtggcggagacccgcaagcgcaagggcctgaaagaaggcatccctgccctggacaacttcctggacaaattgtaggcggcccttcctgcagcgcctgccgccccggggactcgcagcacccacagcaccacgtcctcgaattctcagacgacacctggagactgtcccgacacagcgacgctcccctgagaggtttctggggcccgctgcgtgccatcactcaaccataacacttgatgccgtttctttcaatatttatttccagagtccggaggcagcagacacgccctcttagtagggacttaatgggccggtcggggagggggaggcgggatgggacacccaacactttttccatttcttcagagggaaactcagatgtccaaactaattttaacaaacgcattaagaggtttatttgggtacatggcccgcagtggcttttgccccagaaaggggaaaggaacacgcgggtagatgatttctagcaggcaggaagtcctgtgcggtgtcaccatgagcacctccagctgtactagtgccattggaataataaatttgataaggtggtgactctgttctgcatttttcacggtgtcttcgcaggggagcggggctgcccagtactgggctccctggagcctagaaggggacccgggccctagttaggtgcagcctggggctgcctcagtgttaggtggaacgttctggaatggtgggaatgccctacccctgtgtcattcagagaagcagctgccagctgcgcgggtctgctgagcatttgaagtaggatcagtgcggcaaggaattacgagatgtcactttgaacgcatttggatggccctgtggagcgaggggctctggattgaacttcgcaggtttcagcaactttccgaattgctgacgagctcacaagttctatctgccatcaggattttctgtggtcaccccagtcctgactagtttattagaaacccatttttttt

SEQ ID NO: 90525 - DNA, 1033 bp, Homo sapiens
gggggagcgacccccggcgcgaagacctgggtgaggcaggagggccccgcccccggcctccccgccccccgccctcaccctgagaccgggggtcggggtctgggggccgggacggcgagccgcgggccggccgcgctgtggggccccggacagaaggcgcagacctcgacctgcggcccggcccccgccctctcgcccacttgccccggccggcgccgccaccgctcactcactttggcctccaccagctccgccgccatcttggtcaccagcgtcccccgcgccgggagcccccagccgtcgcgtcacgtgaccgctcaccactcgcgggcggggccgccgcccgggccaattagcacccgcgcgcgctcctcccgccgccggtgcgcgctgctgcctcctgcgcaggcgcgcgcggccaccgcccgggcctccggccaatcaggtccgtcctacaccagcgcccccccccccgctcgcggcgaccacgcctaccccggcggcgcctgactccttaaagtggtactagccctgcgcaggtggggacgggtgctcggtttcctctagggagggaaggcgagagggggcggtggcagcgacaacaatgcagctaggtgccgtggcttcctgcgcgcggcggccgccaggtgcgtctccagactcccggcggcgtcgggcaggggatggttgctccgccgcaacggccgccagtgcgtacagtgaggcgccttgcagcgcagcgcggtgcaggctccacgggcccagacaccccgcgcgctgcacatccgggtcctggtgtgcagatggggcgtgggctcggcaaccagctggctgggggcgcccggcggagaaaagcgggacccctgctcccaaattccttggagatcgtacagccctcacctctttgcaggcgccccccccatcctgcctccccacccatgggaaaccttggatctgcaccagttgggacctcttctccaaagcgctccttggctttggagctaagtggcttcgtgcccgtagaagtggattt

SEQ ID NO: 90526 - DNA, 1342 bp, Homo sapiens
gcactaaaccctcgttcctagctccgcactcagcttcgcctgtcctgcccgcccactttgccttaactacccgcccgtcctgggggccacagcctctgcatgggcccagagccgggacccccccagcccagccccgccctccccagactccgcgcaatcacatactgtatatagacgtgaatcgattttatttttattctttaaattaaggtcgtgataaagtgttgccaaagatacctgctgaattctcgcgtttcaggaaacaaacaaacaaaaaaaaatgatatttgaggagggtcgtgttgactccatatgaaaggacacagctcaaagcttttttgtttggttgtttggggttttttgtgttttctttttttggggtgttttttttttaactgcctggtacaaaaaaaaaaagagaaaaaaaaaaaagaaaaacaatgcgaaattgttatttccattctcatggtgaagttgcgtggacgcgtgtgtgcgtgtgtgcaagagagcgggagtgaggtccaggctggggttggggggcttcaggcgggggcgcccgggggccggggaggtggccgggccggagcccccgtctgcagtgccccccagcctgccgggcccaggagagagagagaagcatctttgctactagctgttgctgctacctgcctctgccccccgacgccccccgccttttgagattaaggaaaaaaaaaaaaagtcaaaaaagtttttaaaaatgaaaaaaaaaaattataaaccagtgaatgtaaaatgccggagcaggcccggcctggcatgggtgtggacctgcagccaggcaggctcgagcgggcgataccaaagtctgcccccccaccattgtggccatgcagtcctgtcactgtctttttgcttccttccgaggggggtcccccagcctcttccagggtcttcccctggaagtgggcggctgcagggaaggtgggggacaggggtctttgcacgattcagaccccggggccgtggcaggagcggtcacctcacaggtggtgacactgaggcaggggcctcggggtgccccctcccgcccggcaaccagaatggttggaggcaagacagagagaatgaaaggaaaaacagaagaaaaaaaaatattaaaaaccaacaaaaaaagcaaaaatcctattttttgagaaagaaagatatttatatttgcagttttattttaaaaagttatttaagttgaagcagccttcctggaggtgggggggggggggtggtgggtggctggcgcaggacgggtcaggggcctggaggctgggggtgccccaggagctacaacctcagagttaagactagc

SEQ ID NO: 90527 - DNA, 1038 bp, Homo sapiens
ataattacccaggctggggctcggggtgatgaaactagggatacctccgcccccaccccgcctctgcgtggccctctggcctgctgtgcagctccaggcaagtcccttcctctctctgggcctcccaggctcatctggggagtctctgcacggttctagaaaaacctagtggctgccatcccctctgtgaccccggccctgtgccagatctgggcaaggcagcccggagaccttgccgtgggctttgcagaaggtgatcagtaaaccagaggcctggaggctggtaacagacctggttaggccagggttctgttagcaagttaccacgttctgttggcttcagtggggcagcaaggctagagataaggtaggggtctggttgccaagggccaggccttgaccctcagggcaacagagccaaggaggggttaaagttagggacaccagctctgtagctggtgccagagggagggacttagggctggaggaacccagaggggagccaggtctttgggaattaggaaaggtagaggggcattcaaggtagggctttgagggatgagtaggagtttgccagtccccacactaaagaagtcttcagtctattgagtgtgagaaggaagaaacccgaggtggctcagatgtggggcacaacaggcagcagcaaggagtaggtcaggttctagccagggctcttgagacccagggctccctcctgccctccggatcccaggaaggagtacactttattactatagattggcatcactcaatgggaataggcaagacacctacttttttttttttttttttttttttttttgagacgagtcttgctctgtcgcccaggctggagtgcagtggcacgatctcagctcactgcaacctccacctcccaggttcaagcgattctcctgcctcagcttcccaagtagctgggattataggcgcccaccaccatgccggctaatttttgtatttttagtagagacggggtttcaccacgttggccaggctggtctcgaactcctgacctca

SEQ ID NO: 90528 - DNA, 1862 bp, Homo sapiens
accgcgccaggccgaggccaggggtttgagaccagcctggccaacatggtgatagcctgtctctgtattaaagacacacaaaaaagaaaagaggctggaggcagggcatgtatcgctttggtgcacagctggggaagctggggctggaaaggcgcgacatctgaccgccttcacgtgcaggtgggaatgtgaggctgggggagcagggtggaacgctgcttctcaagggcctcgggcccttgtcagtgggcacaggaacccccgcacccccactcacgagcgccctctccttccccactgctgcaggtctcggcgcggaagatggccggcggcgtggacggccccatcgggatcccgttccccgaccacagcagcgacatcctgagtgggctgaacgagcagcggacgcagggcctgctgtgcgacgtggtgatcctggtggagggccgcgagttccccacgcaccgctcggtgctggccgcctgcagccagtacttcaagaagctgttcacgtcgggcgccgtggtggaccagcagaacgtgtacgagatcgacttcgtcagcgccgaggcgctcaccgcgctcatggacttcgcctacacggccacgctcaccgtcagcacagccaacgtgggtgacatcctcagcgccgcccgcctgctggagatccccgccgtgagccacgtgtgcgccgacctcctggaccggcagatcctggcggccgacgcgggcgccgacgccgggcagctggaccttgtagatcaaattgatcagcgcaacctcctccgcgccaaggagtacctcgagttcttccagagcaaccccatgaacagcctgccccccgcggccgccgccgccgctgccagcttcccgtggtccgcctttggggcgtccgatgatgacctggatgccaccaaggaggccgtggccgccgctgtggccgccgtggccgcgggcgactgcaacggcttagacttctatgggccgggccccccggccgagcggcccccgacgggggacggggacgagggcgacagcaacccgggtctgtggccagagcgggatgaggacgcccccaccgggggtctctttccgccgccggtggccccgccggccgccacgcagaacggccactacggccgcggcggagaggaggaggccgcctcgctgtcggaggcggcccccgagccgggcgactctccgggcttcctgtcgggagcggccgagggcgaggacggggacgggcccgacgtggacgggctggcggccagcacgctgctgcagcagatgatgtcatcggtgggccgggcgggggccgcggcgggggacagcgacgaggagtcgcgggccgacgacaagggcgtcatggactactacctgaagtacttcagcggcgcccacgacggcgacgtctacccggcctggtcgcagaaggtggagaagaagatccgagccaaggccttccagaagtgccccatctgcgagaaggtcatccagggcgccggcaagctgccgcgacacatccgcacccacacgggcgagaagccctacgagtgcaacatctgcaaggtccgcttcaccaggtgagctgcccgccgcgggggaggcgccgtcctgctctctgccccagcatccgccgctcacgacccctcccgcctctctccctgcaccgcacgcacacatgcacgcagacgcacacatacacgcacgtgcacacagacacgtacacgcacagacacatgcacgtcacctacacatccacacacacgcagacacacatacacgcacttgcacatatatacgcacatgcacacacatgcacagacgcgtatgccacgtacacatgcacacacacagacgca

SEQ ID NO: 90529 - DNA, 1126 bp, Homo sapiens
ccaacctggaactgggatcttcacactggcggggacctgcaggaggtcgctgagccacctggattattttgggcccatcctccaggccccaggaaagacacctcccagccactccagagcggggaccctggtcacccgaggggaggaacggcccagcaggccagggatagccatcttggggcgttggtggcctgggtcagaggtctccccccatgctggggtgggtaggagggcccgggcccgtctgatccggagctccatctgctcacacgctccccgcggcccagggccagacggcagatggtggcagggggtggacaccaccaaaggggactcctcggaggcttcccagggccgagccttgggtggggtcgctcccctcctaccctccctgctcccagcagccacatctgagcccaccgccccaccacaggccttagagtagacgggggtgctgagcagctgggccctgggccgaggctggaaggagggaaggaaggcgggtggaggggcctggggagcgtggtggcactgagcaagctcacaaaggcctctgtgtcgcctggcagctcaggccccgcgctgagggccctgggctttgggtccggctggaccgacaccatgcctcccttgtggggcctggctcaagcccgtcggcgtcagagcctgcctgagctgctgggctgggggacaggagggtctggtggcccggaggaggccatgaaaggcccagctcaggccctctccccaggggccttgcccaggggctctggcccgagagccaccggccggcctggaggaatgtgagctgtgctgggtgactcggggccgccaggggctcccaggagagggcggaggggtggggacaggggccagagggttgcacaagctccgagtgggtggatgagtcacagccgaggggaaggcggaaaaaagggagggggagaaaggggtgggacagacacagtccccccagggcccggcgctgcccgaaacctctgcccatttgacagatagggagactgaggcccagagagggccaaggccttggctggggctgaacagctcagctggggtggctgagagttggggaggggctgccaggcagtcctgtgggcaggcagga

SEQ ID NO: 90530 - DNA, 1031 bp, Homo sapiens
acccatgggtggcgggctcggtgggcccccccacctccctgccagctgcctccggagagggcgtggggattccgtgtcagtgccccccgccccaacctcagaactggaccagggcgtaaccctgagcgtgccgctcccacactgggggtgcctccccaccaccggccgatcacttcctattggcaaactggtctgggagaggtcccggggaggccaggctggggcaggggcccaggccaggccaggcctaagcccagccctgctgctgccagggcctgagggcttcaggccgggggcgtttgtccgcgagggccacccgccatggggccccgagagcacctatcggcggggccggggcctctgtttaccaccagccatcgctgtggagacagagcttgggggagaagggggggcaggagccggccgctggaaaagcgaagtctaaggaaggaaagaagagccaaccgggacactgaaattttaattcgtgggtcagtccggggggtatttattattcagttccgattggctgcgtggcggccagtcagcacctgggcccgggcgggcagccacgcatcggcagaggcccgcgggcggccgcaggcagtggatgggtcctttgctctgtgcgggagactgaggcgcggccgaggcagagcccagcctggggcctggtcggaaaggttcctggggcgatcacaaatccctgctgggtgtttgtttgtttgtttgttttttccttttctttccttgagtccctctgacctatagctgggtccacctggtggcagatccccgttgccatatgaggaggaaaccaaggccgggaggggaggtcaaatgtgagcctggaaactccggaggttagagcaagcctcggagcaggtgccggtactaggcaggggagactgaagcgtagggggaagcagagagcggcccaaggtcactcaggtggggtcagagctgccccctgtgctccatccttccagctcggggcctgtccaaagtcccctcccactgtgtggtggccc

SEQ ID NO: 90531 - DNA, 1265 bp, Homo sapiens
ctttggctgtactgtacagttactgtaggggcagtgacgccgccgccgccgcgcgagggagcgaccagggcagcgcgacgcgggcagagcgagcgccgcggaccccggaggcgagcggccgagggagcccagtcccaacttcgggccccggccccgcgcgccccggcccggccccgcgaggtaagtcagcgcccggcgcggcccccggcacggggtgcagggcggggacgggcgggggtcgctgcggccaccgctgccccctcgggaaggggagatccggggagccggggacgttcccccaagtttcagaggaaggggtggttggcagctgcccggaggctggaggcgccctggatcccgagcgcggggagggggcgccgcccgggaaggggggattgggggctaagtgcatgagcttgtgcgccagccccccccaacccgggtgcatggcttttcggggctcccaggcgcgcggggagcgggggaggggaagcagggctgcattgagggtggggggagccggcgtggggagataggggggcgcgtcgcctgctaagtttccagctgaagacgaggggcgctctcgccccccgggggcctattcggtgctgcgtgcatacgttggagttggccaggattgagctccatgggggatgggggggagggggctgaaaaaacagggaggggggcttcggaaaggagggggaaggggtggggtgtccgggtgggcgggcagggccgcagggacctctgggcttcgtagtccctccgccgtttgcagccggcaggtggcaagcggcttggactacaagtcccagggtgccccgcgccgacagcccgccgcggcctgcgggtaggggcggtgcggaggaggggcggtgagcggcgggccggagagccaatgggcgcgggccgatcgcgcggcgcggcgcgggggcggggccagcccgccagggggcggggcctggagccgggctcccctcgccgggggccggtggcggtcccggcttccggctgcgcggcccgcgggccggccccctccccgccccggggcccctccccgcctggttgtgtaaccgtccccagcccccctcccctcggccccccgcccgtggggggggggtcaccctccccgcgctccccggggagggcggcggcccgggcggccgcgcggtgcaggcgagcccggggatgcgcggcctagcgcaggccgggcccgggcgtgggggaggcgggcgggcggacccagatccggggtaatttgc

SEQ ID NO: 90532 - DNA, 1004 bp, Homo sapiens
gcaggagaatctcttgaacccgggaggccaaggttgcagggagccgagatcgcgccactgcattccagcctgagcaacagagggagactccgtctcaaaaaaaaaagaaaaagaaaagaaaaagacggaggcttcctgggtcctttgagctgcagcttatccttgaggtcctgaggtctgctagacttgttgagacaggatcaaggcagcgtcctcagttcccggggagccgccctggattctggtcattggtgtgtctatgggggtacacagcatggatcctttccttctacaccatgaacccctcaagtgcaggaatccagtctgtgtcctcctgggggccgatgcaccacggccacatagcaaacggccagatggagtctccctaggtagctaacccctaccctggggggtctctgcagggcaaacctggtggacctgcagaagaagctggaggagctggaacttgacgagcagcagaagaagcggctggaagcctttctcacccagaaagccaaggtcggcgaactcaaagacgatgacttcgaaaggatctcagagctgggcgcgggcaacggcggggtggtcaccaaagtccagcacagaccctcgggcctcatcatggccaggaaggtgagcactgcggggtcggggaggtcggggagtggtggggaaggtccccctggaaacaggaggcaggttgggaaggcagccgggtctctgcattctgattagctccaggctctgtccctcatccccaccagggactctaggtcctgagaaagggcccagcttctgggcagatgggagccgtgccagccacaccagccacacacagctgtgccctccagtgactactttctgccctggagggcacttgaaatccatattcccagaaagctagcacgtgggggtttcagaaatgcgagtgtgttatggttctccagagaaacaagcgatgaagacgaagcgtgtgtgtgtttgcgcctatgtgtacagccacc

SEQ ID NO: 90533 - DNA, 1034 bp, Homo sapiens
tgggtgctagttctggtcacctgtccaccccccacctccctgggagaacgtcaccctagaaacagtgcgagagtcacccatgggagctcacctggtcccatcctcccccttcctccctgacacaggcagtacgtccgagacacagtcgtgggcaccatgggcctgaaggccacgggccggctctgcaccgtggctaaggcaagggggctgcgagcctgcaggtgagccacccccacccatgccctgggctccaggggaggctgcgaggcccctgaggactctcctcagcttcctcattgcaggggagagctgagggacaccatcctagactgggaggactccctgcccgaccgggacctggcactcgccgatgaggccagcaggtctgaccccccacccccagggagcccatggtggggcggggcgggacgacagcagaaacacagccagctccagcatgggacagtggctgaggctcacaggcagtgaggggaggcttcctggagcaggtgggccaggccaggggctgcacacacgcactcacacacactcgtcacctcatggctctgggtgggtgctacacaaggaaaccaaggcttccgccaggtgtctcctctatccagtgctgcccagccgggaggtgaccgagccagggtcccaccctaggtgtccaagctcttaccacactgtgatactccccggaagtgtctaagggcccgcccagatcaatgaccccgccaacggaccgcagaggagggcagggcgggatcccaaaggctgactcgggagtggggctggccttgaccgccccggtgagcacagatggcctaggtgtgaaccggcccccagggctggctcgggatgttggcaggagcagggcatcaggctcagcccacgctccccggccccaggaacgccgacctgtccatcacgctgggtacatcgctgcagatccggcccagcgggaacctgccgctggctaccaagcgccggggaggccgcctggtcatcgtcaacctgcagcccaccaagca

SEQ ID NO: 90534 - DNA, 1060 bp, Homo sapiens
tctcatgcctcagcctccagagtagctgggattacaggcatgcaccaccttgccctgcctaattttttgtatttttagtagagacagggtttctccatgttggccaggctggtcttgaatacctgacctccagtgatccacctgcctcattggagagtttgtttgcagtcatgttaagggtagggagtggaggatgcagggaggcagtgggcagatgagaagagtcttaaagtccatgccagggagttgggcatttttgcccatggagatgggaggagcactaggaagaaatctcaccagtcaaagcaataagacaagaaaaagagaaggtagtagaaccagtaaaaatcagagagaaggggccctgatctgctggtggtactttagaagattctagtgcctggggatgtaggagctgatgtctgtctatcctccctgcagacagaccctgaaaacacagactacaccatggagcatggagccacgcggaatttccaggctgagaagctcctggaggaggaggagaagagggtgcagaaggagcgggaggacgaggagctgaacaaccccatgaaggtgagtcgggggccatgtaggtgttcatgggcgctgtgtgtgtgggtgtgtgtgtgtgccaatggttgtgcccttcctgcctcaggtccccaaggaaggaagatggggtggggggcgtggttggtaaaactttaagatgtccccaggaggccaggcatagtggctcatgcctgtaatctcagcactttgggaggctgaggcgggaggatcacttgaggtcaggagtcctagaccagcctggccaatgtggcgaaaccctgttcctactaaaaattttaaaacttaacactgggcgcagtggctcacacctgtaatcccagcacttttggaggccgaagtgggtgggtcacgaggtcaggagtttgagaccagcctgaccaacatggtgaaaccccgtctctactaaaaatacaaaaattagccaggcatggtggcacgcttctggaattacagctactcaggaggctgaggcaggagaatcgct

SEQ ID NO: 90535 - DNA, 1103 bp, Homo sapiens
aaaatgcctccagaggctgggcacagtggctcacgcctgtgatcccaacactctgggaggctgaggcgggcggatcacgaggtcaggagttcgaaaccagcctggccaatatggtgaaaccccgtctctactgaaaatacaaaaattagctgggagtggtagcgtgtgcctgtagtcccagctacttgggaggctgaggcaggagaatcgcttgaacccaggaggcggaggttgcaatgagccgagattgtgccacagcactccagcctgggcgacagagcgagactccatctcaaaacaaaaagaaaagaaaattcctccagacgtgggagggagacttttaggcaacaacccttggccttcgcgcttctggctccatgttctgtcccctctaccctttgccatcttgtctctcctgttgtccttctgcttgtccatctctatatctgtctctctccgaggcttcgtcagtctcttatctctgtcttggactcttatctccttggctctttgattctctgtccctgtcttggtctgtcttggtcactctctgtctctctgtctctctctgtgtctctccgggtttccccatctctgtgactcccacgtctgcccggccccagcgttcatgttccgcctggatgcgtccacatcccaccagaacctgcgggtggatgatctctccgtggagtgggacgctatgggcgggaaggtgcaggatatcaaggctcgcgagaaagatggcaaggggcggacggcgtctcccatcaactccccagccaggtagcctgccccctcccctccctaagtctctggtggaggagatcagtctggacatggacacagagcccagtgtggtcagagttggggtggagaggggacctggggctggtggaacccagagagggaatgaagggagaggaggttttgagtggagttttgatggttaaataggagtttcccagatgacggagggcacaggcatgttctgacataaacatgaggtgctcgatatatagatagagccaaatactgccagagattgacccaacatccacggtggctggggtggactagggtagccttaccgtgggagagagaag

SEQ ID NO: 90536 - DNA, 1147 bp, Homo sapiens
tgggcaaggcgatgtagaaggtagagtcggtgcctgggggtggagccattacagggggcggggcctacctggggcggggtctttagggcctggttctccctaggcgcggtgccagaattaggggcggacctttcctagggtgttgtcagtctggcctggtccctcgctggaggtggtgccaagactagaggtggggtcttctgtgggggtgggtcggtcgggcctggtccccgctgggagcagtgctgggatcgggcagtcagtgctccgggaggtcaacggggcttaggtcctttatggggtggaaccagtcagtggcggggccttctgtgggggcggagccagtatggacctgtttctattggaggcggagcctggagttggggcggggccttccctgaggggcggtgtgggagcctgggctgagccactcactcgctttctcctggtgcaggacgcacgtggtccggcattacaaggtgaagcgggagggccccaagtacgtgatcgatgtggaacagccggtgagcgttgggccagagtccctagaagtgactttgtggggtccgcgtcccttctccagcagcctgaccgctcccccatctgcccccagttctcttgcacctccctggacgccgtggtcaactatttcgtgtcgcataccaaaaaggcgctggtgccattcctgttagacgaggactacgagaaggtgctaggtgggtgccccttcggggagttcgggggcccagtgctcacctctcccgcccccgctcggacggaccgggccgcccctggccgccgcgcttcctccaggccgccctctctgttccaggctacgtggaagccgataaggagaatggcgagaatgtgtgggtggcgccctccgctccgggcccaggtgacgcccccttcccgcgggccgaggtgggagggatcgaggaccccgcattcagccacgccccctcagtcagtttggtggctgcacctcctgcatctgatgttcccaaagttgcagggacagaaatgactcagaccctgccgtcagggtgtgtgtgtgggggagggggcgggggtcccagcttgggacagagctaaacacagacactctcatcctgtagggttgaatttggggtggaggaaaaacctg

SEQ ID NO: 90537 - DNA, 1048 bp, Homo sapiens
agccctgtattattactattactgttgtcattattgtttgatttgtgaatggtagcacattattccccttctgaatgggagtttctgaatggagcaactgctgagtgttgcatcctggagacacagcagtgatcaagacagacagaccctatccccgatcttaggggtttcttggtcatggtgggcggggtgcagatatctgccaggcagcttggtgcaggctgatcaggtttgtgggtgtggactcccaggcactgaggaggccctgcagccggcctgagaggtgttcctggaagccctgtaaagacatgcctgagggagcgtaggtctggggaggaccccccgggagagagggcatggtgggtgttggtcctgggcccagccagctgactgtcactgcaggggaagaagttcctgggcgacctgcagccagacggaaggatcatgtggcaggagaccgggcagaccttcaactcacccagcgcctgggccacccactgcaagaagctggtgaaccctgccaagaagtcgggctgtggctgggcctctgtcaagtacaaaggccagaaactggacaagtacaaggccacctggctccggctgcaccagctgcacacgcctgccacggctgctgatgaggtacgtgctgcagcctcctccaggaagccgcccaggtcactgtggaatgaggggtgcccagcctggcacagctctctccggaggaggtattagtaatatatacaaacacggatggagcccttaccacgtgacatgcctcctccatccctccagggctggggcggagagaggggacatgggagcttgggctttgagggatgagcaggagtttgtcagagcaagttgaagggaagagctttctagaaggatggaatggcatacgcaaagtcatgtagacaagaagaaagacctgctggtgtcatgggtggctgagggggctggaaatgatggcagggaccagaggggcactgggggaacttcaaatgctatgataatagatgttccctgagtgttcaccagccgggtgaac

SEQ ID NO: 90538 - DNA, 1048 bp, Homo sapiens
gcagggccctgcctcccaagccccgccctcagaaagccaagtaccttttcagctttttaactgcccccatcccaacccagggaggcctgtgtcactctggcacaagctgccaccaccagccacccacacccaccccagcacacctcacacgggaccacagccgcgctgccgagggccaagcacaaaggttccagtgagcgcatgtcccagcccctggtggccaggctccccttgctgagccgctgccacttcaccctgtgggaagtggccccagccatctcctctagaccaaggcaggcagccccgacatctgcttcctctatcgcccaatgcaaaatcgatgaaatggggagttctctgggccaggccacattcacattcccctccccctgtggtccagtgaagcctccggaccccaggctctgctctgccctgccctgcacccccctcgtcagaagtacatgaggggcgcagagatgagcacacagctttgggcacggtccagggcaaactgaaatgtacgcctgaattttgtaaacagaagtattaaatgtctctttctacagccccttgcctcgtcttggtgcaggggtgggcctgccacccaccgccttcctgaggggccggctccaaagccacacacaccccaggaggtccctccagcaccccaggtgctcctgagcccaaggtgggtgggactggccctgaggcttttgtgccagttcccaggtgcaggggctgaggggtatcctggaagttaatgccctgccctggaagtgaggaagctggggtgatggtaccagcctgggcacccagccaccctcaccccagccttggggagaccagcgtggctggctgctgcttccgtttctttattacctgagcccatccggaccctcaagacaactggagcccaccctgccctggaaggctcagctcccctgcttgaggacgccgcacacctgttccaggacgtgacacaggctctggtccttgggcgtcctgctggccaaggagatctgaaacgagggggctgggcctcaggctg

SEQ ID NO: 90539 - DNA, 1024 bp, Homo sapiens
gatccccagtggtgcagggacagtgggtcaaagccatgcgtggggcggccctctggccgctactggtgtgacccatgtcccccacgtctccagcaccacctgaagaaactggagggccgccgcctggactttgactacaagaagaagcggcagggcaagatccccgatgaggagctacgccaggcgctggagaagttcgaggagtccaaggaggtggcagaaaccagcatgcacaacctcctggagactgacgtgagtagctcggggtgtcacatcctgagaagacctatgcccttgggaggccggggtggtgcctcaagggagctggaggacagatcggcacctacctggccgctgcagcaggggaggtggagggtatgggccccagtcccctgtcccctctcagcccccttgcctcctgtggcttcacctcgggagtcagggaaggcacaggacagtggcactggcaggagcccctgagccctactgtccccacagatcgagcaggtgagtcagctctcggccctggtggatgcacagctggactaccaccggcaggccgtgcagatcctggacgagctggcggagaagctcaagcgcaggtgagcccagggccttggtctctccagagtctgggctgccatgcgccctctgccagcgcaagtgggcagcacacctcgctgtggggtgagcacatggcagagcagcatcctggattcttcctggggactgagtggaaaggcctggggggccgcgaggtcagaggagctggggctctgagaactctgagtcaacacccagccctgccccgatgcaggccccggggactccctccctggctgcacgttgctgctgccacaggaacacccaggctcccctccctgaatgcagaggccagacctgcttcaggggccttggcgtatgtggggcgccgtccgtggtggggaattgggggaggaggcaggggatgcgactgggggtgttgtaggtagatgctgtggcaggccccagctgcttggcaatc

SEQ ID NO: 90540 - DNA, 1034 bp, Homo sapiens
ccctgggctcacagcgtttcccctcttctgtcctctagctggtcagtgagaaggtcggaggggccgaggggaccaagctggatgatgacttcaaagagatggagaaggtgaggaagaaactgcgtgctctgtgtggtggtggcactgctggggcctgacctctgccgggcatagtggaggcggccaaccttgatgggcctgggtctggagtgatggggcccggcaggtgtggagagatggggtggtgtgggggcctcgtcagctggacttgacgggcaccagctctctcccctgccgtgggcaggcagctgtggggacatggctgagctgaagacatggagagggggttggggggtcctggtatgggctcttagggcaggaggcggtgcagcagcgggggtcttgtgtgccttgggcccccactggctgtggagtcttatatgctgcttctcttcacagaaggtggatgtcaccagcaaggcggtgacagaagtgctggccaggaccatcgagtacctgcagcccaacccaggtgggtgctccagccactgccagggcctgccccaggccctctggcctctgtgtcagagggaaggcaggggatgacagaaccgccaggctcatgggttgtgggcttcaggcacagctggatcccggagtgcagaggccatccttggtgctgcatgctgcctttccacctcaaccagcagctcagcccctctgttggcttcactctcatgccgactggttcctcagggccgtcccagccttcaacccctcttccagccagcagtcctggcagggagcctctcccccagcttacttgtgggatccatttgtattggccgcccctccccagtgcccctggcctggacttcacctcttgggcttgggactgggtctccctggctgagagacgggcttttccccaaggaaaacccaaatgctggctccataggaggccacggacagggggcagacgcacacccagcagtgtccactcaggccctgccaggagcagacccaagcgggca

SEQ ID NO: 90541 - DNA, 1046 bp, Homo sapiens
ccccgggctgcccggatgagggagccaggcccgacctggcccgggagggggccggggggaccgaggtggggacgttggcgcgtgtcccctgccaggtgggaagaccaagggacggacgggggcgacgaggtggcccaggccctgcccgccatgcgggctccagaagcggggacagagcccctgggaggaggggagaggcaccctgggctgcccagggacgcggacctctcccctccttctctccgctgcaaaggcggggtgcggggagagaaggggaagagaggagtcccgaggctgtcgacacaggactcttgccagataacccagagccagggaaaagttgcgtctagagcagttacgttcaaaatcctctggatgggcaaggtacaaagttgaaaaggtagaggaagaagtcagtttcccctctctgctcctcgggcagccagcccttctccccagagacaagcgactgtcatcgactccgtatgtccctttcctaagatacgtgtgtgcctttcctttaaaaacacgtaccctgtgatagcatatgccacagaatcctgtgtgctgtgtttttcattgcttggagatcacactggagcgggatttctccccctccgtcggcactgttgacatctggggctggattgttctccgtggtggggccgtcctgggcactgcggggtgctgagcagcgcccctggcctccacccactccgggccaggagcacccccaagtcgtgacaaccaaaaatatcttgagacatcaccgtgtgtccccttagaatcagtcctccttccctcccttcgttccttccttccttctttccttccttcctccctccctccttgcctctctccctccctcccttctcttctttccttcctcccttcctttcctgtcccccaggactactgctctagaccatactccacacttcttggatttttttttttttttttttttttgagagggagtcatgctctgtcgccccagctggagggcagtggtgcaatctcggctcactgcaagctccgcctcctgt

SEQ ID NO: 90542 - DNA, 2013 bp, Homo sapiens
cggcaggaacttgctttcaagcaagttgtttttggtcctgttttgttttgaaggcctgtcgtttgggaagtggggatttggtgggactgtctcatggttggactggaggcctaggcattccttgtgcatatctgaccaccgaggcctgaactgtcagtcagagagtggtctcaggccctgcatgtgtctgccagatgcctgggccatgtgggtagacacccaaccctgttaaacggctccacgatcacacattcaccagaaaattcagaggggtgttaaaagaggcctcatgggtgagttcagaaatatctgtgacgctcccaaaggagaccaggtgtgaattattccatctggaagaggggcagccagcgcatggtgtgctctgccctggccctgacactgtgggaagttttgtgcccctgtcctttcctcttgctccccagctggctggggactggttcctcaaaagagtgcccgggcataggggagcaagaaccccaaataaacttctgctttctaaaccacaaggagtgtgccgaccctgagaaccataaggtccgccagaaactgaaggccaaggagtgggacgagttcctggctaaggggaagcgctttcgcgtcctgcaacctgtgaagatcggctgcgtgtgggcggctgacagagactgcgcaggcgatgacctgaaggtactgcagcagttcgcagcctgcttcctggagaccctgccggcccaggaggagcagacgcccaaggcctccaagcgggagaggagagacgagcagagtgagtgtgggcggggccaggccacccacctgttcctgggcccagctaattccagggctgagggcaagagtcacaggctagtgggtccgtgatgcaaatgttctttccacaaataacagaggccagcccttttcctgtacatgtccgtacgttcaatgatgtccctagcagcaggacgaggcaggtcccttaattggcttgttttatcaaccaggacacaggcacagagagtgctggagtgggggctgtgctttctcaaaagccagggaggggccgggcacagtgcctcatgcctgtgatgccagcactttgggaggccaaggtgggaggatcgcttgagcctagtgcttcgacaccagcctgggcaacatggcaaaaccccatctctgcagaaaatgcaaaattacctgggtgtggtatcacgcacctgtgatcccagctactcaagaggctgaggtgggaggattgcttgagcctaggagtttcagaccacagtgagccatgatcctgccactgcactccagcctgggtgacagagcaagaccctgtctaaaaaaaaaaaaaaactcaaaaaactggggagggaccatggcacacaaggagagcagggcagtcatttgggtaggaacagcaggcatttgaagtcagccctggcaacacacgtgcccggccaaggctcacttctgggcaggtgcgtaggtgctaccctgtcttacacccgccctcatgaggccacctatccccgaagctggccatgccccaagcctcggtggcaatgagcttgtgtatgtgttttgttttttggcctgtggtgatgggtggctccccaagcctcatgcccacccatgttccctcctgccagtcctggcccagctgctgccgctcctgcacggcaatgtgaacgggagcaaggtcatcatccgggagttccaggagcactgccgccggggactgctcagcaaccacaccggcagcccgcggagcccctccaccacctacctgcacacccccacccccagcgaggatgccgccatcccctctaagtcccggctcaagcggctcatttccgagaactcagtgtatgagaagcggcctgacttcaggatgtgctggtacgtgcacccgcaggtgctacagagcttccagcaggagcacctgcccgtgccgtgccagtggagctatgtgacatcggtgccctcggcccccaaagaggacagtggcagcgtccc

SEQ ID NO: 90543 - DNA, 1032 bp, Homo sapiens
aggagaatggcgtgaatccgggaggcggagcttgcagtgagtcgagatcgcgccactgcactccagcctgggcaacagagcgagactccgtctcaaaaaaaaataaaaataaataaatacagttgtaatctgatggggccactatcaggtatgcggcctgtcactgactggaaattattctgcagttggcaatgatggctgtttttggagatctgaatccagttcatttgagggaacccccaaggttctctggttgtggcctcttgaataaacctctcacatttggacagtttgttaccaaattgggttctggatgttggtttccttccgtgttgggggtgggaggaaggtgtcacacctgtggagttccccccgctaccgcactggcaccagggtggctgctgcctgcagtgctgatggccgtgtaccctgtctgtccagattggtgctgaagacatggacggcttccaggcagacacggaggaggaggaagaggaggagggcgactgtatgatcgtggatgtcccggatgctgcgggtgagaagggctgtagatagcagaacgcactggtgaggtgggcgctggaggtaaacctcaacagagaagggatggggctgcctaagactagctccactgtgagcagccaggagggcttgcagctggaagtggctcctgccctgccacatcctcgggcgggctgggccgtgggtgctgaccatgccaggcatcgttctggccgcagagccacaagggcctatgctgggagtctcaggtggttgtgacgttagatgggggtcagggaaggctgcactgaggcagcaagggagggccaggtggatttctggagcactcgccaaagaggaagtacagaggccctgcagcaggctgcgtgggaggagtgtgcccgggtggtggggggcaggcagggtcaacctgagagcaggtgagcaggtcacctctagaagaggcacaacgccccagcctctgcctgtccccactgtcaggtggagggtcccgccctggggttgttg

SEQ ID NO: 90544 - DNA, 1091 bp, Homo sapiens
cggccttgatgtcctccagcacagccatgtcccacgagaaggtcaggagggcagagggcacctgcggtaggggtaggccgtcactctgagaccgagagtcggcccttgccgcggcagggaactcagcgggcaacctgggcgcggggatgccccggcctggaagccatctcagctggtggaggctgtggctcgcacccaggcctcctgccctctccctccgggactccaggacctaagcctaaacctactgcactagctaacgcacgtcaccgctcccatttgatggggaaactgaggcgtggagtagttatgaacttgctcgaggccctgctgccagtaagtgggaaagcaggattcaaacccagggacctgcccaggccccctgctctgagaacaaggaggctccctcctgggggtgtctgtgccggtcccaggagaacctgcagaggcatcgggtcagcggtgctcctgcgggccgacactcaccagcccgcactcgttcaaggccaggttctcgtcctcggacagcttctgccctcccgaggccagcagctcaaaaggcagccagtcgctctgcagggcctcccggacgaacccgtacaccgcccccagccgctcccgagcgtagaaagtgcctggggagtgggggagtcagagcgggtggggcccagggccccctaccaacccgagccgccctccacgggcatcgttggtgcccaccctgcaggaggcagccatcggggaggcgcacgcgcagcagcgtgtagttgtacttgcgcagcccccgctgctcctccttctcccgcatggccttggtccgcagcacgctcagccgctccaccgcctcggacctgcacacgcgggccaggtcacgagggctggccggggttcttccaccccgccccgccccactctgctccgcggacgtcaggcccacctgagcctctgctcccgcttgatctcctctgctgtgaggttgaagaagtccccaggcagttcgaactgcgaggccaggggcgagggctggaagacgcggcgctgcctgtccagcttggcgcgcacgggctccgcagccagcagctgttccttgt

SEQ ID NO: 90545 - DNA, 1031 bp, Homo sapiens
aaggtgttgaaggaatcaggggtttcccaccctggcttccttggggaacatgtggaggaggcagggtcccaccccactccccgggtctcaggatcgggggcaggcctggaggtccacgctgcccgccaacgccgagggagcaccccgcaggagccccctgctggcactgcggcccttcagctctggctctccactcttccggcactgtggcttccccaccgctgtggttaattgtgcccttccagggctggtgggacggtgaggggttccgtggggctcctgctggcaccaggggtgggctccatggggtgtccgaggtgtgccttccacccggagatggtctgctgccctcgcgtcactgggccgcttcttccctctgactagaggccaagtgtggctgagctgctgttacctggagcaggaggcacagaggggccgggtgggcagcctgggctgtgccccactcaccttctccacctaccccaggtacctggacaacatccacctgcaccccgaggaggagaagtaccggaagatcaagctgcagaacaaggtgtttcaggtgggcgtgccttctggcccccggggcccaggctgggggtgggggcagctggcctgcaggagccggtggtggcccacaccaggcggtgggctccctggaggagctagcgagagttgagccacaagcagtgaagggttcggccagtagaaggtagcaggacaagatggagagcaagacttttatgcaccggtcaccccaaatcaacaaattctgcctctcctcacctgcatccttttcctcctcttcagctgggcttgtttgggaacatgtcgactctggggaggtttctcatgcaaaccagatgtctggttcttctgggggaaagggcagggactggggtcctgggcggtgttagcctcgcatcaggccccagcagtgtctggctcctcagcctcactcttcgtgcctggttgtgactctttcctctgtgcagagctgttggagactccacagcccccaccgtagaaaa

SEQ ID NO: 90546 - DNA, 1030 bp, Homo sapiens
ggatctggctttgctcaggtggagcacctgccctggggccagctccgtccctggggtagggggagagctctctgggtggggcacagctttgcagtgaagggtacacagaagaatgcagcttcccatcgggaaggggctgctgcttcctgggttgaaggctcccctcctcccagcgtgatttgccccaagtaacttggctgatttctcggtgatttcctgggtcagtgggtaaagccaccccctcactggcctctcactgcagatcgacgacatcgcggatggcgccgtgaagcccccacccaacaagtaccccatctttttctttggcacacacgaaacgtaagtgtccccttctggggcttggttttctcctctggtgcctcccggggtggcctcactcacctgggactggcccccgtttcccttctccagagccttcctgggacccaaggacctgttcccctacgacaaatgtaaagacaagtacgggaagcccaacaagaggaaaggcttcaatgaagggctgtgggagatccagaacaacccccacgccagctacagcgcccctccggtgagtacccggggtggagagccagtgtgaagcgcgctactgatgcaagaaggggcctccagttagggtctctcccctgggcactgtggacacatggggctcgatcgttccctgtggtggggcattctgggccctgcaggtgctgagcagtgtccctggcctccacctactcagtgccaaggccacccccaccccattcatggtgatgacagatgtccccagtcattgcccagtgtcccctgggtggaggggaacgggatagaatcagccctggcgagaacccctgctgtagaatcagtccaagtttcttttttttttttttttgagacagagtctcgctctgttgtccaggatggagtgcagtggcgcgatctcggctcactgcaagctccgcctcctgtattcccgccattctcctgcctcagcctcctgagtagctgggactacaggtgcccgcca

SEQ ID NO: 90547 - DNA, 1099 bp, Homo sapiens
gaaaacttggccattaaggaagaaaagcacatccgaggtggtctgagtggagcaaggcaggaggggcccagcctttggcttttgcgagtggaggatgcagtctctttgtggttcctggtcctgtttgagaacctggggtcttgaggtggcctgtctgtgcctctcctttgtttcggcctgggctgggtggtgcttgtgagcatttgctccaggatccgcagacgtttcggtggtgacacctgccacgcacacgtgccgcactggggaccaggaacagggatgagtcaggcacagtccttgccttctgggagctcatggtccagaattgaggattcactcaacggatgtcccttgagcgccgaggatctggcagccccttctcagggggccggggcccaccgatgttgcatgctgagggtattttactttaacacccatggtgtgtctaggagactgaggtttccctggtttcatacttgctatctttcctcacgctgtgcctgtccccagcctggaaggataggtcagaaatccttcaaggtagctgtttcaggagatctttttctggccccaggtcaagttctctttggttccgtcctgagctcattacctcctggtgaatcatcacaccatttaatatttattggacacctacagcttgctaagcattatatagaggcctgtctttgaggaaaggaaattaaacaagccctgtacagatcccccaagatgagaagtagctttagttgaggccactgctgctcttagcttctctggcccatctatgcttctagatggaacgtgtgtttaagatgcagattcctggctgggcactgtggctcacacctgtaatcccagcactttgggaggctgtggctggtggatcacgaagtcaggagttcaagaccagcttggccaagatggtgaaacccagtatctactaaaaatacaaaaattagctgggcgtggtggcaggcgcctataatcccagctactcgggaggctgaggcaggagaattgcttcaacgcgggagggagaagttgcagtgagccaggattgtgccactgtactccagcctgggcaacagaacgagactct

SEQ ID NO: 90548 - DNA, 1076 bp, Homo sapiens
cctcaggtgatctgcctgctgcagcctcccaaagtgctgggattataggcgtgagcctccgcgcccggccagggcagccatttctggacctcttgacatggtctcggcactgtcttaggtgctccacctcccacttccatgctttcctggtcacaggcctctgaggtcaaaactgagccatccccattgcccagaagtggtcactgaagcacagagggttgaagtcatttgccccaggtttaaccctgaagcccgcggcccgaccctagtgcccaccatacacgaatccatctcactctcctgccttcgttcttcggctcttctgggcctcggtttccccatttgtaaagccaggagacaacacgcctgacattcaggatcccgcatgtggttgccgtcctctgggtcatagtcctgatggggaaatccacccacgactggtggtgacgcgcgttctctgccccgactcccacagccagtgagctcctccgacagcgaggcccccgaggccaaccccgccgacggcagtgacgctgacgaggacgatgaggaccggggggtcatggccgtcacagcggtaaccgccacagctgccagcgacaggatggagagcgactcagactcagacaagagtagcgacaacagtggcctgaagaggaagacgcctgcgctaaaggtaggggaggaccaaggtgggctggcccttcatccccttgccctgatgtctcgcctggcagcttgctctcctgccctttttttttttttttttttgagacaaggtcttactctgtcgcccaggctggagtgcagtggcgtgatctcgactcgctgcaacctccgcctcccaggttcaagcaattcttctgcctcagcctccctagtagctgggattacaggcacctgccaccgcacttggctaatttttgtatttttgttagagacggggattcaccaggtccccaagttggtcttgaactcctgacctcaggtgatctgcctgcctcggtctctcaaagtgctgggattacagtcttgagccactgcgcctggccacctttctttttttttttttgaga

SEQ ID NO: 90549 - DNA, 1023 bp, Homo sapiens
gtgttgtctgtgtgtggtgtgtgtgtggtgtgtgtgtggtgtctgtgtgtggcgtgtgtgtttggcagggtactcgggtggaggcggtagagcacggcagcttgtctgatgtggcctccgcacaagattttgcataaagaaaaagatgtccccactgggaaacccgggcttctgatgtacccggttcactgaggaagatgaggggaagggccagcagctgcccggcgtgcccagggccgcctgggatcccggttttcacttggggtggaggtgggttttgtgggtgggaggggattcggagccgggccctgagccgaggcccgcagagcctggcggctgcaggggtgcgggagcctcctctggcctggtgcgccccgcttctcacggtggggctcctgatgctcacgcctgtccctgcttctccccagaaggcgccatcagcctccgactccgactccaaggccgattcggacggggccaagcctgagccggtggccatggcgcggtcggcgtcctcctcctcctcttcctcctcctcctccgactccgatgtgtctgtgaagaagcctccgaggggcaggaagccaggtagggccctcgtgctcgcacatctcttggcctggcccctgccggggcgctcccaggcagtcccctggtcaccttggagccctggaagggaaggtcaccccctcctcctcttcctgtagcggagaagcctctcccgaagccgcgagggcggaaaccgaagcctgaacggcctccgtccagctccagcagtgacaggtgggtgctggggctggggtcccctctggcggctcctccatcggctgaggggcagggcgggctcctgagggaggaacggaggtccccaaccgccccctccgcctccagtgacagcgacgaggtggaccgcatcagtgagtggaagcggcgggacgaggcgcggaggcgcgagctggaggcccggcggcggcgagagcaggaggaggagctgcggcgcctgcgggagcaggagaaggagga

SEQ ID NO: 90550 - DNA, 1001 bp, Homo sapiens
ttccggcggcccctacagagaggcagctccagggctttgagctgcctgcccctggcctcctgggaaggtggcttcttgccgagcctccagggtggcccaggtaggtaggccccgagcacgggcacccggctatctgacggtgcctgtgcccatcactgtgggctgctgtctggtacaaggctcagtggagtcactcacttacccagcagctgccttgtgctatgcctggctggcgccagcgtggggaccctggagatggttgtggtctctagtggcagaagacaggcagataggagggcggcactcgagcctcaggtgccacaacgggggtacactcctcggtgcccatcccacccaaccgccctacaggcagggcaggggcgggagggcatcctcacaccgcctttgctgttcccaccagcagcgtacgggagggtcccgacctggacaggcctgggagcgaccggcaggagcgcgagagggcacggggggactcggaggccctggacgaggagagctgagccgcgggcagccaggcccagcccccgcccgagctcaggctgcccctctccttccccggctcgcaggagagcagagcagagaactgtggggaacgctgtgctgtttgtatttgttcccttgggtttttttttcctgcctaatttctgtgatttccaaccaacatgaaatgactataaatggttttttaatgaaaaaagaaatcacttttattggcttggttttctagcattgctggtgcagtgggggcctgagctggggcgcaggcggcagtgtcactgggcccgtttgggactgggttgagccatcaggccaccgtgagaagcgactaaaaggcactctgggcccagcccaaccctgaaaggccagtggcaggagagctgggcgggagcaagctcttcccaggagacaagagggacaaaccagggcatctaagctgtgctgcctgcgccctgccccgcacccacgaggctggggggttt

SEQ ID NO: 90551 - DNA, 1059 bp, Homo sapiens
atgccggtctggacagtccctttggccaacttcacagcccctgtgagcccagtggacacagcatctttagtgccagtcaggacagactttgtagtgtccaggcccccttggatggcccctttggccacattcgcagcaccggtcaccccactgcagacggtgtccttggtaccagttaggacagtcttggtggtgtccacactggtctggacagtccctttggcgacattcactgcccccatgagcccagtagtgactgtgtccttggtgccggtcagcacggtcttggccgtgtctacacctgtctgggcagcccctttggccacattcacagcactggtcaccccactgccaaaggtgttctttgtacctgtcgcgatattttgggtcgttttcagcccagtttgcacagcccccttggccacgttcacggcactggtgaccccactgtagatggtgtccttggtaccggttaggacagttttggtggtgtccatgcctgtctggacggtccctttggcgacattcactgcccccacgagcccagtagtcactgtgtccttggtgccggtcagcacggtcttggctgtgtctacacctgtctggacagcccccttggccacattcgctgcccccgtgagcccagtggacatcgtgtcttttgtacctatgaccacagacttggtggtgtccaggcccccctggacggcccctttggccacgttcacagcactggtcaccccactgcagacggtgtccttggtgccggttaggacagtcttggtggtgtctacgccggtctggacggtccctttggccacgttcacagcccctgtgagcccagtggacacagcatctttagtgccagtcaggacagactttgtagtgtccaggccgccctggacggcccctttggccacattcgcagcaccggtgaccccactgcagacagtgtccttggtaccagttagaacgatcttggtggtgtccacgcctgtctggatggttcctctggccaaattcatggcaccagtcaccccactgcagacggtgtccttt

SEQ ID NO: 90552 - DNA, 1049 bp, Homo sapiens
gacactcgctgtgtggccttaggcaagccacatgccctctctgagctaatatcctcatctggaaaatgctgattaaaacagatcctcttgccaggcgcagtggctaatgcctgtaatcccagcactttgggaggctgaggtgggtggatcacttgaggtcaggagttggagaccagcctggtgaaaccaacatggtgaaaccccgtatctactaaaaatacaaaaattagctgggcatggcggtgagcacttgtagtcccagctactcaggaggttgaggcaggagaatcgcttgaacctgggaggcagaggttgcagtgaactgagattgtgccactgcactccagcctgggtgaaacagcaaaactgcatctcaaaaaataaaagtagaagaaataaagtgcttacgctgctgtcgctttggtctcatcttgccaggcacagccctgtgtagactggaaccttacgtgattagagtggggtagcactgcacccatttcacagatgtggaaatagaggctcagaggggaagctccgcctgggatccccaggctgtctgccttccctcaggcccacagcagccccccagatagcaggaactgaaatgtcccaggagggagcagccccccagatagcaggaactgaaatgtcgcaggagggggcacccccagggctcctgccacatcagaccctgccctgcacatcctctcaccttttccgaaggttgcagctccttctccgtccatggggccgtctgctctgggtgggcagccactgtggggacaggggccggtcagggagagtgagggatgcagttagaaccatctacccggctgcccattgcacaatagccaggcacagcctaaaaggtcaggaatgtttcagctaccccgccagggacagcaggaggtgacatccacggctaccagccagacctggtcaccccccaaccccgctgggggctccccccaagcccagggccgctgttccctgaagtagggctctgtggaacttcctctgctgggtggacacccaccctgagtcccggg

SEQ ID NO: 90553 - DNA, 1031 bp, Homo sapiens
gttcaaatgctaccattaattgcggtgttatttttattatttttttaaagacagaatctctctcgcccaggctggagagcagtggcgccatcccagctcactgcaatttccgcctcccaggttcaagtgattctcctgcttcagcctcccagttagctgggattacccacgtgccaccatgctcggctaatttttgtatttttagtagaaaccgggtttcgccatgttgcccaggctggtctcaaactcctgggctcaagtgatctgcccacctcggcctcccaaagtgctgggattacaggcatgagacactgcacctggccagctgtgtgatttttggcaagcaccttcacctctctgggctgcttcctgttttgtaagatgtgggaggtccctgctacccctgcggcccctgcctgggcccagaactgcccaagcaccctagacggctggaggtggtagctgctgggtcccagtccactcacagctcatttgacagacagggcaactgaggtacgcagcaggtccatgctggtcccaaggtcacgcagccagctagagttacagggggggagctcgacctcgggcctcagacctgccgcctgcgatccctccggttgccaccccgcgtcctctgaggcctggtcctcgcccaactgggtcctgagctggggccaaccgggccaagggtcccagccacctgctctggccggtcatacccgtcccacgccgccggaccttcgcccaaccaccctatctggagctcctctcctaagcccgggggggcgctcccggacgccgccctcagggcactcacctgggcgcgagcggcttcagacaccagctgtctccgccgaccccaggctcgagtctccacacccccgccggtcccgcccgcccttcttatagctgctcgcgcagtgggggcctccggaactgaccaatggggagaggccgtgcgggggcgtgcccagggggcgtggctccaggcttccctcgccctctccttgagctggcccagtgccctacgg

SEQ ID NO: 90554 - DNA, 1050 bp, Homo sapiens
ccctggctggcagggaagagggtctaggggggttggtgagtctggcagccattggagcctctcccctcatctatttttttctttaattagagacagggttgctctgttgcccagactagagtgcagtggtgtggtcatagctcactgcagccttgacctcctgggcctaagtgatcctcccacctcagcctccagagtagctaggaccacaagcctgcaccaccatgcctggctaatttatttatttatttttagaggtggggtcttactatgttgtccaggctggtctctgaaattcctgggctcaagcaagtctcctgccccagcctcccaaactactgggattactggtgtgagccaccatgcccggccacccacaccttctgacgcatcttctatctgctttccggacaggttcatgacatcttctatcccttcccccaatcagagggagaggacgagctctgctttctccgcgccaatgaatgcaagaccggcttctgccatttgtacaaagtcaccgccgttttaaaatcccagggctacgattggagtgagcccttcagccccggggaaggtgagcagagcctgacgaatgctgtcgactcatcgcgttagtcacgtgtggttcaatatgctgtttgttcattggtcggcccccccactcagccagcacaccctgcgggagaaggaacagggatcggcaggaagccagccttccccagtgactgcatgatctggcagggcttagagcacccaactgttggcttattcaggcagcagatttactgagcacctcccctgtgccaggcccttagcacaaccaggggttggccacctacggcccacaggtcaaatccggcccaccacctgtgttcataaataaagttttattggcactgagccacagccacttgtttacagagactgtctgtggtcgcttttgtgctgcagcagcagaactgggtagtcccagcagaaactgttgtgcaaggccaagatttactgtctagccctttgtagaaacatttgccagctcctgctgtaggt

SEQ ID NO: 90555 - DNA, 1050 bp, Homo sapiens
tattctgtcgccattggcctccggagggcgcaggtctggctgtcacacgggctccctggttttgcatgggacacaccccacttgtcacgttgtcagttttactgtgatgcctcgggcttcaccgtctgctctggagctctcccaaggcagggatggcatcttcctggtatctgcggcccctacaagccccagctctcagcacagggtgtggcccgtgtttttaaatgagaaagccagatgccacatcactgttgggaatgcgatccaggcccaaagtcagaaggtccccacctgagggtgtcatgcctgttccagcaggacgatgtgcctacagacagaccgtgggacacctggcttctcctgcctcccccactccaattgtacacctctctgtggacgtcaccccacagcccaggccccccgtgccggctctcggcacacacgggtgatgcctgcctggtgttcacctcacttcggtttttgcaggcagcaagaatcccaagattgccttgaaactggctgagttccagactgacagccagggcaaggtaagggggcctgctgcataccagataatctactagatgatgcggggaagggccgggtaggcagctgggtggatgggcaggtcactcacctccctctcgggggcactccccaggccccagccctgccgcccggtccgcctagccacaggccttccctgtgtgtctctggacctgtgcctagaatgcggcgtggcgagctggcctccctgcctcacagagtgggtcctgagactggaggccacgccgcggtaaggaacaagcaccgggcaggggccctgcgaggacaggcgcggcaggtgctcccaggccacctcgggagtgggtgacgtgtggatccagagctgccctctctccaagtttccagaacagagaactccgtggggcagatggctgggggaccccaacttcggacgggctgtttcctccagcgtttcaggcagatcctcaggtccgttcaccggacccgtcagctactgtggggaggagagtgttctggatcccc

SEQ ID NO: 90556 - DNA, 1074 bp, Homo sapiens
cgccagccaggggctcccacctttctttctgccttatcaccttgtggtcggcctgaactcagaactgcagtcagcactgaatctacagttccttctaggcgtccaaatacttcccccatctccaactactcccccgcccccgctcgccaccaaagcaccagctcagacacagacatcacagagctttggagctgggcacggtggcttgcacccctctcatcccagctatttgctagaccgaggtggcaggatcgctggagcccaggagtttgagaccagcctgggcaatatagcaagaccccatctcttaaaaaaaatgaaaaatttaaaaaggagatcacagatctgccacccagccttgacagagaccatgctaggaggtctggagctgtttgctggtggtgtcacaggccgcagaggcacccagctgattggccgaaggaaggagtaggtagacttgagtaagtggcctggaatccatctctgcagctgtgtaaactcttgactcccctgagccacagcatagggtggtgctaggtggagaaagcccatcacaggctagccctcgctccctcactcttgcgccagcctctctgcaatccgggctgtgcccccgggtagaagagaggtcagcggagggccaggctccagcaccaagcctcggcctgtctggaagctcaagctaaagagtctagccacatccagaagattcctggaagtttctcgcgatgtttcatttcatttctcatctccgggatcgaatttttgcttcttgggctatcagtggtgatcagaggcaagataatttttattgttctttgcaatgaaaacaagccacgcgggtctataagtgcttccgggcaggctctcagcttatgggtggcccctttgggagctccgaaggtcacattttttctttgctgccgtgagccaggcttgaattggggcagcacagcttagaggggtgcttaggccgctcagaggagctccccgggctcagttttctgggcttgctgccagcagtgcttggggcagtgggggttcttgagtgctcaggcggtcctggtcccagcc

SEQ ID NO: 90557 - DNA, 1038 bp, Homo sapiens
gtagagacggggtttcaccatgttggttaggctggtctcgaactcctgaactcaggtgatccacccacctcaacctcccaaagtgctgggattacaggtgtgagccaccatgcccagcctacaagcactttttaagcctttgctggttccatctgctcatgtcccattggccaaagccagccacgtgtccaggctcccttgcaagcgcaggagaaattgacacaatgggaagagctacaggggatgtgcagcccttctttgcaccaaccacacagagcctgagtatgtcaatgattaaaccaaaggccccagagctcaccgtagccaggaaacccttcctccctccctccctttctcttttctagactgtcatgtaagtcagatgctggaaggattccttgggttccttctggaatcccgtctctcccaggggagcctccttccctcacttctctctcccctgccccagatggaaactgtcaagcaaggcgttgatcagaagctggtggaaggccaggagaagctgcaccagatgtggctcagctggaaccagaagcagctccagggccccgagaaggagccgcccaagccagaggtacccatgaggggactggggggtggcctagggtacttggagtcccgatgccactctctacacctctgcttcatgggcctacctgcttcgaatgatttccctagcctcacctgcttttggaagctaatgacacctccttcaggaagcctgccttgatttctcctcttgggcatgcataggtatggcttctgttttttgttttgagatggagtgttgctctgtcacccaggctggagtacaatggcatgatcttggctcactgcaacctccacctcctgggttcgagtgattctcctgcctcagcctccctagtagctgggattacaggcgctcaccaccacgcctggctaatttttttgtatttttagtagagacagggtttcaccatgttggccaggctggtcttgaactcctgacctcaagtgatccgccctgcccagcct

SEQ ID NO: 90558 - DNA, 1048 bp, Homo sapiens
tcactgcactccagcctgggcaagagagcaagaccctgtctccaaaaaaaaaaaagaaagaaagaaatgaggtacagggaggtagagtgactttcctgaagccacacagctgagaagtagctagctaggaacggagcctaggtagtctggctgcagagtatgaggtcatgcccacaactccagactcagggtcacctgggggatggcgctccctgcctcagtctccctggaagttggggtgcaggggaggggtgcccacatacagagggaagacggagatgctggggtcacccgggggatggcgctccccgcctcggtctccctggaagttggggtgcaggggaggggtgcccagatatggagggaaggcagagatgctgatgctgttgcatctcctaggtcctggcggacaccaaggagcttgtgtcgtctaaggtgtcgggggcccaagagatggtgtctagcgccaaggacacggtggccacccaattgtcggaggcggtggacgcgacccgcggtgctgtgcagagcggcgtggacaagacaaagtccgtagtgaccggcggcgtccaatcggtcatgggctcccgcttgggccagatggtgttgagtggggtcgacacggtgctggggaagtcggaggagtgggcggacaaccacctgccccttacggatgccgaactgggtaagtgtggccagcgggctgctctgggacccctccccaggccccctgaccggaagccgctgtcggcctcctggggtctgtgccgacactcactgccgcctcgtccctgccacttctcccgggcatcttggaatctcatcactaacgcagtcccctctgtcctgctcaccagctcccgccctcatccaccacagtctcctccccacagcagccaccagagggcgcctgtgaccacctgagtcagaacccgtccctctgcccacagccctccatggaccccacctcccctggggtcaaagcccaagtcctcgtcacagcccacaaggtcctgcacaacctcccctgtcctctccccgccctcct

SEQ ID NO: 90559 - DNA, 1540 bp, Homo sapiens
aggggtcccggggtccgcggatctcgggtggggtttttccctctcagtggcacttggttgagttcccccgggacttctgaagttccggcccgcgctggacttctgggattccctcttccgtaaataggaatccgaggaatgaatgaatcaatgaatgaatgaataaacgaaccaactcggccacttggcccgggcctcctttctcctctggtcgtggggaaggagggatgggttggaccttctgcttttctttcaattccctcttttcattctccttcctcctcaatcttcaacacttggctagtcgttaatgccttaagtgcttaatttgttgtgtctggtcctggccagggtctggctgtacaggaggactggaagggcatcctgggagtttcctggtgtccacaggccggacaaaagcaaccccgactccttagagcatggcatggctcagaggtgctggtaaaactgatgggggtttttgctgtccctcccctcagcgccgacaccatgtggatccaggttcggaccatggacgggaggcagacccacacggtggactcgctgtccaggctgaccaaggtggaggagctgaggcggaagatccaggagctgttccacgtggagccaggcctgcagaggctgttctacaggggcaaacaggtacacccgccgccagcacctttgttctatgcctggtccaggcctcgcgcctctgcagccaccagccgatactttctccctcccacctccccccccaacaacctcgtccggtcccacttcatctctcccggaaggagaagtccacagaaacctcaaatgcctgcgagaggaaggaacaaagggaggactcacagattgacacgctgggctggcggctggccctcgaatctatagggtctgggcttttaaacttcttttttcaaagctccgcctcaaaataatggctagagaaagaagttttggaggtggccgatggaaggctgaggaattttcgagaaagggcccaggaccatctggtagctaggacggaggggaccaggttttcttttttaaacatccaccaccaattgctctcagcctgtaccggttaagcatcagaccctgcgagtgtttgtttctaaaaatttggattagcttattcagagtctggagatggcgcttgctaatcaggaatttccgccaccctgagcctgctgtgctgcggctgctgctgacctggggcgtgtggtccccgaggggtccaccgaccctcgtctctttctctgttctgtctccagcccctcgttgcatttaaaatgtccccctttgatttcatagctgccacgtttggggcgctccctccattggcacctgggggtggaggtgctactttggttggtgtttttgtgggggactgtgggacctactgggagtggggtttcccggcaggatgagacagtgtgatcgaaggtgtaggtcccatctgctggagttggttggaccgtggggacgggcgtagactactggaactggattaaaagtcgtcagttgagctgcg

SEQ ID NO: 90560 - DNA, 1054 bp, Homo sapiens
aagacccccatgtgtgcgtggtgccccgtgatgatgttttgtgcttctgggtgcttcctgcatgcagtgccaaaagccctcgctagaggggcctgagaccctgagggaagggactggggtgccgcttgtgagcgggacagccccctggcatggcccaggtatcatggctctttactctgatgcagattgccccccccccacaagggctgggacacagtgtttggttcatcactggtgcccacagatgcccacttggcatttggtggctaaacagcgtctgcctctggtgtccctgcagatggaggacggccataccctcttcgactacgaggtccgcctgaatgacaccatccagctcctggtccgccagagcctcgtgctcccccacagcaccaaggagcgggactccgagctctccgacaccgactccggctgctgcctgggccagagtgagtcagacaagtcctccacccacggtgaggcggccgccgagactgacagcaggccagccgatgaggacatgtgggatgagacggaattggggctgtacaaggtgagcctcccctccgcagctgctctggggttggacgttctccctgccattctggtctttgcatacccagggctcacaggaggggcttcccacgcgcctctctagctctggctgggcagaaatggccaaggggtggtttcctgcacgttccttgaggggaacatggtaccctgggattcctttgtggacctctagagcagagtcctgttcggggcctgcaggtgtcttctccgtgaagcttgcagtggctgtgacgtttctgaacttgctgctaccatgtaagatcaggaaatgtcacagaaagatctgggtttccagcttttttatttttttattttttttttggcagggtctcactttgttgcccagcctggggtgcagccgtgtgatcacagctcactgtagcctcgaactcctgggctcaagtgatcctcccacctcagcctcctgagtagctgatgttataggcatgtgccaccacgcccagctaattttatttta

SEQ ID NO: 90561 - DNA, 1043 bp, Homo sapiens
aaaattagctgggcgtggtggcacatgcctataacatcagctactcaggaggctgaggtgggaggatcacttgagcccaggagttcgaggctacagtgagctgtgatcacacggctgcaccccaggctgggcaacaaagtgagaccctgccaaaaaaaaaataaaaaaataaaaaagctggaaacccagatctttctgtgacatttcctgatcttacatggtagcagcaagttcagaaacgtcacagccactgcaagcttcacggagaagacacctgcaggccccgaacaggactctgctctagaggtccacaaaggaatcccagggtaccatgttcccctcaaggaacgtgcaggaaaccaccccttggccatttctgcccagccagagctagagaggcgcgtgggaagcccctcctgtgagccctgggtatgcaaagaccagaatggcagggagaacgtccaaccccagagcagctgcggaggggaggctcaccttgtacagccccaattccgtctcatcccacatgtcctcatcggctggcctgctgtcagtctcggcggccgcctcaccgtgggtggaggacttgtctgactcactctggcccaggcagcagccggagtcggtgtcggagagctcggagtcccgctccttggtgctgtgggggagcacgaggctctggcggaccaggagctggatggtgtcattcaggcggacctcgtagtcgaagagggtatggccgtcctccatctgcagggacaccagaggcagacgctgtttagccaccaaatgccaagtgggcatctgtgggcaccagtgatgaaccaaacactgtgtcccagcccttgtggggggggggcaatctgcatcagagtaaagagccatgatacctgggccatgccagggggctgtcccgctcacaagcggcaccccagtcccttccctcagggtctcaggcccctctagcgagggcttttggcactgcatgcaggaagcacccagaagcacaaaacatcatcacggggcaccacgcacacatgggg

SEQ ID NO: 90562 - DNA, 1020 bp, Homo sapiens
cttcccgccgcagcctcccaaagtgctggaattataggtgtgagccactgcacccagtctgttttattttttagtagacacagcgtcttaccatgttgcccaggctagtcttgaattccggggctcaagcgatccacctgcctcggcctcccaaagtgctggtattccaggcgtgagccacgacgccctgcctggatttccagcttctcttgacaaatgggcagctctggtctctcagggcctcccagcagctgtggctgaagcagagccgcaggggcctttgttaagacagtccatgccccctggccccgcatccccgtcacccctgccggggctggtttctcatggtcagcggttcccagccagggaggagaaacctcgctgtgggcattcgagtttgcgccctggttccagagcatcccagtgtccgagaaccaaggtggtctcccgtcagttttcctcaccccgttgggatgccagacttccctcattcctcacaggtcaatgagtacgtcgatgctcgggacacgaacatgggggcgtggtttgaggcgcaggtggtcagggtgacgcggaaggccccctcccgggacgagccctgcagctccacgtccaggccggcgctggaggaggacgtcatttaccacgtgaaatacgacgagtgagtcatggcaggtgggcgggcctgggtattcaggctctgtgacgcgcatccttggctgcgggtgttcaggccagagcttggcactgtctcgagatggtgatcaggatctggggccccatcctcgaattcctaacagcatacgaggctgcccacttggggactagcctggggacccgaagccggctgccccctcctgtgtctccgcggagggttctgctcgatcagtggctgaaactgccaccccatcagtttttctgttttattccatcttccgggtttgtcatctctccctcatccccacccctaacgtcagtctccagtctttgcacaagtgtttactgggcacttcctacctg

SEQ ID NO: 90563 - DNA, 1039 bp, Homo sapiens
gcagtgaaccgagatcgaaccactgcactccagcctgggcaacagagcgataaaaaaaacaccatgagaaaaaggaagtttgacaactctgcctgtcagggcctgggggtcagagacagttccctgggcagaggcactcaggggcacaaggtggtcggtcttagaaagatgctcagcagtgagcaggaacagaccccagaggggaggcaggaaggccaggccggaggctaagggcctcgcacacacagcgctggctggacggcttcaaagccagtccgggggccccgggaggggaggaaaggagagaggaagggctcgccccaggacgcgaggctcaccccagcaccacgttggcgtagagttcccgcgccgtcctggtctcgcgcttcctggagatctccgcgtcgtaccagaagccccgctccttggggttgtcggggttgtagttgagcatgaccacctggcccacctccaggtcctgccacttgatgatggtgcgggcgcgcgctcggacgtccctggagttcatctggaccacgccgttctccgggtagctgggaggaaagcccgggccttagaccccgtgctaagaccaagcctccttccctcaatgggaaacgagccgaggtgggacggcccctcccgacagtgtgcagaggcccctcccaacaggcttatatgctggtgttgagaacacacaggtatattaaggcacattccaggtacaaaattgttatgggttgcccgtgtcccctgcaaaaagagatgttcaaaggctgatccccagtacccacgaataggattgtttttggaaacagggtctttgtagatagaacctttgcagatgaaatcatattaagatgagatcacactgcagtagggtgggccccaatccaacaggactggtgtctttagaacaagaggagaggccgggcaaggtggcccacgcctgtaatcccagcactttgggaggccgaagcgggaagatcacctgaggtcaggagttcaagaccagcctgaccaacacggtgaaaccctg

SEQ ID NO: 90564 - DNA, 1106 bp, Homo sapiens
acaggcgtgggccaccttgcccggcctctcctcttgttctaaagacaccagtcctgttggattggggcccaccctactgcagtgtgatctcatcttaatatgatttcatctgcaaaggttctatctacaaagaccctgtttccaaaaacaatcctattcgtgggtactggggatcagcctttgaacatctctttttgcaggggacacgggcaacccataacaattttgtacctggaatgtgccttaatatacctgtgtgttctcaacaccagcatataagcctgttgggaggggcctctgcacactgtcgggaggggccgtcccacctcggctcgtttcccattgagggaaggaggcttggtcttagcacggggtctaaggcccgggctttcctcccagctacccggagaacggcgtggtccagatgaactccagggacgtccgagcgcgcgcccgcaccatcatcaagtggcaggacctggaggtgggccaggtggtcatgctcaactacaaccccgacaaccccaaggagcggggcttctggtacgacgcggagatctccaggaagcgcgagaccaggacggcgcgggaactctacgccaacgtggtgctggggtgagcctcgcgtcctggggcgagcccttcctctctcctttcctcccctcccggggcccccggactggctttgaagccgtccagccagcgctgtgtgtgcgaggcccttagcctccggcctggccttcctgcctcccctctggggtctgttcctgctcactgctgagcatctttctaagaccgaccaccttgtgcccctgagtgcctctgcccagggaactgtctctgacccccaggccctgacaggcagagttgtcaaacttcctttttctcatggtgttttttttatcgctctgttgcccaggctggagtgcagtggttcgatctcggttcactgcaagctctgcctcctgggttcatgccattctcctgcctcagcctcccgagtagctgggactacaggcgtctaccaccacacctggctaatttttttgtatttttagtagagacggggtttcaccgttaaccaggatggtctcgatctcctgacc

SEQ ID NO: 90565 - DNA, 1124 bp, Homo sapiens
tgtattttcagtggaggcgggggttcaccatgttggccaggctggtctcgaactcctgacctcggcctcccagtgttggtattacaggcgtgagccactgcgccctgttccgtttcatgttgcttctgtgagtgcagctttgattgctagggggcgtagctgagctgttgccccaggcatcccgagaacccgtggtgttcaagtgctgtgagtagatttaggggcctcggcaggccagaatgttccagcgtcctcgttccttgcagggatgattctctgaacgactgtcggatcatcttcgtggacgaagtcttcaagattgagcggccgggtgaagggagccccatggttgacaaccccatgagacgtgagttctgagccagcctttccccatcttccgcggtgggcacggggcgggggctcttgtcccgtctctggcttggccgggccccgccggagctgaccctgccgccccgtgcccagggaagagcgggccgtcctgcaagcactgcaaggacgacgtgaacagactctgccgggtctgcgcctgccacctgtgcgggggccggcaggaccccgacaagcagctcatgtgcgatgagtgcgacatggccttccacatctactgcctggacccgcccctcagcagtgttcccagcgaggacgagtggtgagtgcggccctgcccgccgcggggagaccagagcgccccctacaaatccccagaggggcactgaggagatacaggagaggggcaggcgcgggggctcacgcctgcaatcccagtgctttgggaggccgaggcgggaggatcacttgagctcaggagttcaagagcagcctgggcaacacaagaccagcctgggggacgtagagactctgtttctttttttgtttgtttttttgagacggagtcttttttcttttctttttcttttcttttttttttgcggcggagtctcgctgtctcccaggctggagtgcagtggcgcgatctcagctcactgcaagctccgcctctcgggttcacgccattctcctgcctcagcctcccgagtagctgggactacaggcgcccgcctccacgcctggctaattttttgtatttttagtagagatggggt

SEQ ID NO: 90566 - DNA, 1017 bp, Homo sapiens
gtctcaaataaatagtaggctgggtgtggcctattttataaattatacatatataactttgaaatattaaatttttttttttttttgagacagaacctcactctgtcacccaggctggagtgcagtggcataatctcggctcactgcaacctctgcctcccagactcaagcgattctcctgcctcagcctcctgagtagctggaattacaggcacgcgccaccacgcccggctaacttttgcatttttagcagagacggggtttcaccatgttggccaggctggtctcgaactcctgacttcaggcgatctgcctacttcagcctcccaaagtgctgggattacaggcctgagccaccactcccggctcctgtgtttccttttttggggggtacatcctcacctataatgcgtggggtcctgactctccctgcagggcgctggctctcaactgctttgctcccatcaatgaccaagaaggggccgaggccaaggactggcggtcggggaagccggtcagggtggtgcgcaatgtcaagggtggcaagaatagcaagtacgcccccgctgagggcaaccgctacgatggcatctacaaggtgagtgccccttgaggaggccgggggctctgtccccgccggggctgcctctgatggagctgacgctgatgcccgctctctgcaggttgtgaaatactggcccgagaaggggaagtccgggtttctcgtgtggcgctaccttctgcggagggacgatgatgagcctggcccttggacgaaggaggggaaggaccggatcaagaagctggggctgaccatgcaggtgtgtctgggatgggggatggcactttgggaggccaaggcggatggatcacttacgttaggagttcaagaccagcctggccaacatggtgaaacctcatctctactaaaaatacaaaaattagctgggtatggtggcgggtgcctgtaatcccagctactgaggtggctgaggcaggagaattgcttgaacccag

SEQ ID NO: 90567 - DNA, 1235 bp, Homo sapiens
cttgagctgagctgtgagtgatgagagccgggggaccgagctgttaagctgcatgacctgccagggacaaaagcctggaggccgggtgagcttggaatctttgagggcccctaggggggccaggctggtgatgggcagcaggtggaaagtgagactgaaggtcagaggggcctctggacctggtgagactgtccccacagtcctgggagaggtggccaggagcaaacctgatggtgtggatggcacttctcacgcgcctgctgtgtcttacaggactgcctggacagatcctttcgggcacaggtgttcagctgccctgcctgccgctacgacctgggccgcagctatgccatgcaggtgaaccagcctctgcagaccgtcctcaaccagctcttccccggctacggcaatggccggtgatctccaagcacttctcgacaggcgttttgctgaaaacgtgtcggagggctcgttcatcggcactgattttgttcttagtgggcttaacttaaacaggtagtgtttcctccgttccctaaaaaggtttgtcttcctttttttttttatttttatttttcaaatctatacattttcaggaatttatgtattctggctaaaagttggacttctcagtattgtgtttagttctttgaaaacataaaagcctgcaatttctcgacaaaacaacacaagattttttaaagatggaatcagaaactacgtggtgtggaggctgttgatgtttctggtgtcaagttctcagaagttgctgccaccaactctttaagaaggcgacaggatcagtccttctctcgggttctggcccccaaggtcagagcaagcatcttcctgacagcattttgtcatctaaagtccagtgacatggttccccgtggtggcccgtggcagcccgtggcatggcgtggctcagctgtctgttgaagttgttgcaaggaaaagaggaaacatctcgggcctagttcaaacctttgcctcaaagccatcccccaccagactgcttagcgtctgagatccgcgtgaaaagtcctctgcccacgagagcagggagttggggccacgcagaaatggcctcaaggggactctgctccacgtggggccaggcgtgtgactgacgctgtccgacgaaggcggccacggacggacgccagcacacgaagtcacgtgcaagtgcctttgattcgttccttctttctaaagacgacagtctttgttgt

SEQ ID NO: 90568 - DNA, 1054 bp, Homo sapiens
ccaggggcgggagcgggggccccttcccgggccgggggcgcgcgggggctgggcacagacggccccggcgccccgcacaaaagatgacagcgtgggtggccccggccgggcccttttatcacccgggacaagcctcggcctattattattattatttttgaaagaaagcaagaaaaaggaaaaagaccccagcccctgggtaacccccgcctgcgtttctggccctttgggcgccaggggggctaaggggaagccccccagctggacacccagggatgccccctaaatgcctatcattgctcctgcactgcccccacctccggtcaacctgctatgccttggtagcttccaaacttgcccccctgtacgtacccgaaacccccaccccgccataagcatatgcaatctggattttagaaaaaaatcatcttgctatgcaacggcagcctccacgagtctctccgtccctcccccttccagcctgatcgccatctcgaacgaagcccctgctctagagaaatgaattgaggagttgcttccgccgagaccccttttctgtgtcccccgtggacatccccctgggagctggggacggactcgctctgaaatctgcttgacctggggtctgccagggcccaggtctgcgctcagtggtggccatgacaatcaggcaggacgggggactctgtccacctgggcacggtggaaggttttaaggggcatgttttccgcccctgggggcagtggaggcatggactgcttttgggtgcatcccatctgtttgcttgggggaggatgcttctgttttaataatttaccagcaccctgtgaggaagtgttccccgagttgtgaaactagtgagaaggtggttcagctccgtggagcctagtgatcctgtcatatgtgaagagcgtctttttccatgtgtttctggctggggcgtgtattcagcaagttcctttgggtcccaccgggtgcctgcactgtcttgggatctctggatactggactgaattcaagggatcggtgccctgccccagtcctctgcctcaa

SEQ ID NO: 90569 - DNA, 1723 bp, Homo sapiens
ctatgggcttttatcactgccgttatgggagctaatgactcccctaattctccaataatagcttccttatgagccaccaggagggtttgtcaacacacggggtcagccttctcctgcagcccctgctgaagcagtgggcatcctctctccgctttgcagtttatgttttgaaaccctgaaggtcggagcgtaaagccgtggtagagtcaacttctgtctgagccgaggatttctgggacttgccagcctcgtctccgtgtgtctgattggacacctggcaggtccgggcgctccccctccttgagccggcgacaccaggacgggtcagactgtcctggcctagaggaggtcaccgctggggaggaaaagggggtaacggagattctgccgcacagacgggtgtctgtgtacaggctgttttggtggaagcgtctactgtgtcaggagctgcgggtgcctgcgtgtgcacgtgtgtgtttagttgctgagacctgaaatatatatgtcttagtaacaatccgtttgctcgcattttctaaccctttcctctttggggagggggctgctaacaagatgttaactgctggcgcttaaaggtatagctgatcagccaccgcacagcaccccgcctggcctttgttgtacttttctgtctcgtggaagagacccttcctcagcctcctgccctgtcttcagtccctgtcccgtcctgcaggagccctctggggtggccaggggccgtcctctgtgtccttctctcccacctgaccactctgcctgtactttaattcctaatttctctgtctcctctgctggtttcctgcccgtttgtcctatgccccacccactccctgatgagccggggaggagcctcagctctggggaagccatctgtcctcggttccatctgacacctgtggggacgtgccttggggtcatgcgttcacctggtctggggctgctaggtttccagtgccgagtgccatgccgggacaggttgggaggagtccctggctcctgtgggtttagagtgtagtgggggaaagggtgagctggctgcccagggcctggtcacagctggaatggtggtgtgcagtccgctgccctcgggcccagctcagggagcaggcaggaggaggcgaggctgttgagggcctgaggtgcatttgtaggtggctttgttccctggatcggggagcggaattgggggttcagagctgggtgaccttgacccagtcacttgctcagtgacaaagcagatcgggggcactaaatctttcggagcccactgggcaggaggggacggagagcagatgaacagggtgggggctcggggcggggggagctccgcaggcctgcactggtcaccgccatgacagatcggccgtcctcatccacagcctcaccctaggctcctggctcagctccagggacctgccatgaggcagctcgatggggtcttcagatgccacagccctcccccttcctgccccaggggtctctgttcctggcttaggatgccggacagaagagcaggggcccagcctgggctccgttctcatctggtggtcttgacgacgtctctggatctctgccctctgtcccatgccccacacaggcttcagagttggagagacctggattcagatccctcctctgaggcagtcacttcccctctctgggccttgctttcttctctgtaaaatgggtgtaatgggaacac

SEQ ID NO: 90570 - DNA, 1042 bp, Homo sapiens
cctgttgctctctgaggttcacgtgccttgtggctctggcaccagagcagagcctggtctgtcctgctcacccggccttcccagccccctagtctgtcgtctgagctcagtctttgccacacagggatgacaagagcctcccagggcctctgtcccctgcccactccccctggcgtgtgttctgatgtgggtgccccgggccaggataactgaggaggggtacgtgggtttgggccactgctcgcccgtggaagtgcgctgtcccacccggaagcaggttgcgtggtaccctaggcggggcagcgggcagtcggagcagagcccctcccgcctctttcatgggtgccctgggttccaggtggctgagggtgggctgcgtagcacccaggcctcaccctgagctggttttggggtgtttgttcaccaggtactgtaccccgcggcaccaggactttgatgaccttgaacgcaaatactggaagaacctcacctttgtctccccgatctacggggctgacatcagcggctctttgtatgatgacgtaagtatgaggctccggggaagaacagggaccagcttcctggtgggtggtggtgggagggccctgaacgggactctgccttggcagatgaagcttccaggcaggcaaggttaaccccctcgcccaggctctggatgcgggcctcgccctgtggtgacgaaagaggaagccaggctttctctgatttttgcagggcccctcctgcctcaccctgcagcccccaccctgagctcaccctggccccacctctggcctcagcagccggcccacagcgtgttacaaacacgtgtactttcccagtccctgccgctcgtcttcctggcactgtggagcctcgagtcctcagcccgccaggccacctgctggattcggctccaacccggtcctgacttgggctcagggcccggagacactggggtgaggggatctcccatcccgagcctggtctgctggagcgtcctcttgtccacacagcctgggctctccatgagggcagctgg

SEQ ID NO: 90571 - DNA, 1024 bp, Homo sapiens
ccaagctggcggtgagcccttcagaaaaggtgtctgggctgggtatggcggctcatgcctgcagccccagcgcttggaggggccaaagtgggagggaccattgagcccaggagttcgagaccagcctgggcaacagagtgagacttcatctctacacagaaaaaagtaaaaattagccaggtgtggtttctcacgcctatagcctatagtcccaggtactcaggagactgaggctggaggattacctgagcctgggaggttgaggctgcagtgagctatgattctgccactgcactccagcctgggcaagaatctcacacaggttaagaccagcccctggtctgcagggtatgaccggcccctgggggggccgcagatactggggtggaggaggatgggcagcgacccctgggactctggggagaattagcctgcaccccagggctcgcaggttctgggggtggccgggcggttgccgacgctgctctgccgccccacaggacgtggcccagtggaacatcgggagcctccggaccatcctggacatggtggagcgcgagtgcggcaccatcatcgagggcgtgaacacgccctacctgtacttcggcatgtggaagaccaccttcgcctggcacaccgaggacatggacctgtacagcatcaactacctgcactttggggagcctaagtcctggtgagtgtctgcactggccctgccgccggccggaccgagagcccctcgggagggagtcaatcccgggtacacggctgggcgccgtggcaggggccccaccaggtgaggccgcaaaggtcggcctatgacggctggagatcttccggaccgcctggggtcacccaccagctttggggtgggggatgtgcacccccagagccgaagctcccaggcccctagagcttgcgctttgtaccccggagtgccccccattgagctgtgagcggccccaggtgtccccatggccaggagcgtggtcttgagcctcctgagctgcccaggctgtgctgc

SEQ ID NO: 90572 - DNA, 1048 bp, Homo sapiens
agagctcacagcagggcactatggggcggctcctgcgcatctccttccccccgacctgcaggcactggggccctgagaaccaagggcagatctgggccgtgctctgtgctcccacacgcccgctctccatgggaggaaagagccagcctgcccagagggcagcatcctcgctgaccccggccggctgtggcccaggagactgacgtctgtcttttcggccctaggcttcttccccgggagctcgcagggctgcgacgccttcctgcggcataagatgaccctcatctcgcccatcatcctgaagaagtacgggatccccttcagccgggtgcgtacgggtggggcctgcacgcctgtgggtgaagtgggtaccgggtccaagcccaggtggccgcacataccccaggagataagctgtttaaccctggagaagtttctagaacagtgattagcatgccagaggagggccgcatggctcagcagttagcctccagctcttccacggggaagcgaagatggcagagcttgaatctggcggggtgttaacctcccctcccaaaccaaaccaaaacttcctcctgggtgtggccatcagaggcccctccgcaggggctgcaggggtggaagggcaggggcaggccctgctgacctggcaggaagctgccaaagaaacagagggcagggcccctcgtcccgtgcaaggtgggaacctggttcctaccgccccaggccacaccctaagtctcaggcacccccacggcccatgtcacccggccgtggagagaactgcctgtttagaagtgacatttcgggctctcctgcaccgtgaagactgtgaactcattcagttcactgcttcaggggctgctggtggaggctgtgatggaggagacctgaggccggggggtggggcctccctacacctgatttgatggacagctggggtttggtgtcccaggagcagagcaggctgtgctcagggtccagctcagcaactgcacccactcgaggcagttccttccccatggagaagcctttgtccatggga

SEQ ID NO: 90573 - DNA, 1003 bp, Homo sapiens
cacgagcccacttcctgtgtctgggggtggcctgccctgggggttgcagaacacggggtcacatggtctgcactcacctctgtgtccccagggcacatctctgtcgccacgtggttcctctggctgagcgacaccacgtggggctcttcagtgtctgtcccagcagtcagtgacacgcagggggacgggagaggactccccgggggctgatctgtcccagcagccagtgacatgcaggggggatgggagaggactccccagaggctgagcagcaggaggctgggtcagtgggtctggagggcttggccagggaggctgcgggctctgggctgtggaggggaaccctcactgggcagagcgcagggccactcccgcgatgcctcccttgaaggctgtgccgggaggggccggggactccgttccagggtccctagggaagctcgagccccatgcccctgcctgtgtccccatccccagaaatgcgtgtactgccggaagcggatgaagaaggtgtcaggtgcctgtatccagtgctcctacgagcactgctccacgtccttccacgtgacctgcgcccacgccgcaggcgtgctcatggagccggacgactggccctatgtggtctccatcacctgcctcaagcacaagtcggggggtcacgctgtgagtgcctgcccgcctccttgcccccagcccctggctcccgcccccaccgacacccgcgctgaccgccccccacaccctccgcaccctcccaggtccaactcctgagggccgtgtccctaggccaggtggtcatcaccaagaaccgcaacgggctgtactaccgctgtcgcgtcatcggtgccgcctcgcagacctgctacgaagtgaacttcgacgatggctcctacagcgacaacctgtaccctgagagcatcacggtgagctgtggggtggggcagggggcggggggaggctgggagcacagcgacaacctgtaccctgagagcatcacggtgag

SEQ ID NO: 90574 - DNA, 1749 bp, Homo sapiens
ccatggttccccccaggcccgacaccactggccccggatgcctctgcccctcccgggcggacctcctgaggcctggacccccagtgggcagggcaggaggtggcagcggcagcagctgtgtttctgcaccatttccgaggacgacgcagcccctcgagcccccccaccggccccggccgccccagcgacctccctggcaccggccgccgccttcaaatacttggcacattcctcctttccttccaattccaaaaccagattccggggtggggggtggggggatggtgagcaaataggagtgctccccagaaccagaggagggtggggcacagaccatagacggacccctcgtcctcccccagcggtggtagggggacccggggggctcctccccgctctgcagcctggggacactgggctgggaccagaatccagctttcttttaaaactctcagtgtaactgtatcccgtgacatttcattttttttaaatagtgtatttttttttccatttttttttttaagagaaacaaacaaaagactcgccagtcaatgactttcaaagagaactaactttggcttattcatattctgttcaaagacagtctattttttcactgtagaaagcgtccttgtgtgatagttacgttcgcaaacgcgcacgccaggcccatggctgtaccttggcttttttttttttttttttttttttaatttttcctaccatcagaaagtgtgctttgctcacagaagaatgggatgtccttttttctttcttggctttttttttccccctttttgtttcatttttataaattaaattttcagacatatcaaatacagttctgagggtaaggtcatgggggagctcggacccagtggcgttgggtgcggttgagggggacgctgctgtaagaggagagagatgacagtggtcctcctctgagagcctgagctgtctccccgtctcccgcccccaaggagacagagaggatcctacttcttcggggacagtggctgtatggctgtgctgccccacatcagggaccctttccccctgggactgtggggcagtttgggagcaaaaccagaaggacaggcccccctctacccgcctaccctgagcaagcgagttgttcctctttgtacaagggcaggtctgcggttactttcaacactgtttattccagcggaagcagccgggtggttttcccacccccgtgtatgtagatatatcgactttgtattaaaggaagatcgtctgaccccggcccattgtggagtctttgttgcgcccctgcctgtccagtttcatccctggggtggaggtcggtggggtcctggagagctgatctcgtttccttgtgtgaacagtcagaggaggagttggcccagagaggtggtggtgcttgtccaagaccacacaccgctgaggcgggtggatcacaaggtcaggagtttgagaccagcctggccaacatggtgaaacccagcctggccaacatggtgaaactcaactctactaaaaatacaaaaattagccaggcgcagtggcgggcgcctgtaatcccagttactcaggaggctgaggcaggagaatcgcttgaacccaggagttagaggttgcagtgagctgagatcatgccattgcactccaacctgggtgacagagtaagactgtctcaaaaaaaaaaaaaaaaaaaaaactcaaaacaccgatgaagtggccaggccaagatttgaacccaag

SEQ ID NO: 90575 - DNA, 1568 bp, Homo sapiens
tttgtatttttagttgagacgaggtttctccatgttggtcaggctggtctcgaactcctgacctcaggtgatccgcccacctcggcctcccaaagtgctgggataacaggcatgagccaccacacccggccacttgggcatcttcagcacatgggtggcaggttgagccggagtgacaggtgacatccttgtggtccccagaatggctccagtgagaaacgcgaggtccgccagttccagtttacggcgtggccggaccatggcgtgcccgaatacccaacgcccttcctggctttcctgcggagagtcaagacctgcaacccgccagatgccggccccatcgtggttcactgcaggtacgtccaccccactctgccccatccgcttccccccggtccccgcagcccagcagcccctgaacgccacgtggctgtccctgcagtgccggtgtgggccgcacaggctgctttatcgtcatcgacgccatgcttgagcggatcaagccagagaagacagtcgatgtctatggccacgtgacgctcatgaggtcccagcgcaactacatggtgcagacggaggaccagtacagcttcatccacgaggccctgctggaggccgtgggctgtggcaacacagaagtgcccgcacgcagcctctatgcctacatccagaagctggcccaggtggagcctggcgaacacgtcactggcatggaactcgagttcaaggtgccagcggggtggaggctgctgtgggcggggtggggaggaggcccaaagagccgaaaatcaggcccgcctcgagcaatggggactagaaggtggtggcagggtgcccctacctacctatccaccattggtgctccagctgaaagcatagccttcctcatcctgatggtggcctctggcttcctcctccccacagcggctggctaactccaaggcccacacgtcacgcttcatcagtgccaatctgccttgtaacaagttcaagaaccgcctggtgaacatcatgccctatgagagcacacgggtctgtctgcaacccatccggggtgtggagggctctgactacatcaacgccagcttcattgatggctacaggtaggtgccatgcctttcccacctcagggccccagaaggagcccatctctactctcaagaggcctccagtcttgtgggagacagagctggggagatactggtagccctgagctgtttaaatacacatctttagatgtatatttaactgatggctgctgtccgtgaatctttgggtgtgtgtttaactgatggctgctgtccataatgtgattccatctgttctatcagtggttctcaattggggtaattctgacaccctgaggatatttcttattttcatgagtactactggtactgcctgggtggggaccaggcatgctgctcagcatcctacagtacacagaacagcttgtctcagagaacaatccagcgccaaatgtcaatagcactgagattgagaaatcctggcaaaggaggggagggtgttcctggcagagggtgccacatgtgcaaaggcccggggct

SEQ ID NO: 90576 - DNA, 1006 bp, Homo sapiens
gttttgctgcccaggggacatctggcaatgtccagggacatctttggttgtcacaacttgaagggaagaaatgttgctggcgtggagtgggcggaggccagggatgctgctcagcaccctgcagtgcccagaatggccccgccacagagggcgatctggccccaaatggtgatggcgctgagggggagaaactgtgaagtacacgtcccatggtcaccttggggacaatctgggagcggtcagagtgaacttccaggaagtggttggccacacagagccaaactagcaagacagcccccacagatccctggcctctcgccctggctgcaggcatcatgggcagtgattacatcaatgccaactacgtggacggctaccggtgtcagaacgcgtacattgccacgcaggggccgctgcctgagacctttggggacttctggcgtatggtgtgggagcagcggtcggcgaccatcgtcatgatgacgcggctggaggagaagtcacgggtgagccttggaccccacggccctcaagcccctgccagtcagcctgtccctgctgacacctgttctcttgcccgatacagatcaagtgtgatcagtattggcccaacagaggcacggagacctacggcttcatccaggtcacgttgctagataccatcgagctggccacattctgcgtcaggacattctctctgcacaaggtggggcccaggctggggctgggggctgagggtggaggaatgtgttggaagggaggcagagggccccagcttctacccagggagctccccatgggacagagagaaagcggagcgtgtctacccaggctgactacattctcatggaacccacttccgtggagggggaaactgaggctcagagaggacactgcttgtttccacccacggcaggagaacaaagccggcagagcccaactcagcaatgagcctgatttcttcttgcctttactcatgccccaggtcctctttgcccacttgtcc

SEQ ID NO: 90577 - DNA, 2394 bp, Homo sapiens
tgatggtgccactgcgcaagtctcgtggaggccaattcctgaccccgctgggtagcccagaggacatggatctggaagaggtgagggcctggggcccaacccgcagggcccagatgcattccagttttcacgtgctctgttgctcccagctgagctctgagccacccatgactctgttcccgcagctcatccaggacatctcacggctacagaggcgcagcctgcggcactcgcgtcagctggaggtgccccggccctatattgcagctcgcttctctgtgctgccacccacgttccatcccggcgaccagaagcagtatggcggcttcgataaccggggcctggagcccggccaccgctatgtcctcttcgtgcttgccgtgcttcagaagagcgagcctgtaagtcctgaatggtgtccgcccacatccagacacacctctgaatgaggcagaccccattccccagggccctgacctctgtggtcagtcacaggcagctccctgtggtcagagctgggcagaggggaagacttgggagcggagggatcctgaaacgaaggtttcttagaggaagagaccttggagctggggcgttgaggggtgagtaggagttcaacaaagaaaaagcatcccaggatttgcatgtgcaaaggtctggaggtacagaaaggagagtggctggagcagagaagggaatggggagagcaaagattggcagggaccaggtcacataggccaccagggtcaaggttctaggaatataggaggatctagagcgggggagaaacgtaggttcatgtttgagaaagacccatctggccactacaaggagggtggacactgatggagacccccctcctttccctgcagacctttgcagccagtcccttctcagaccccttccagctggataacccggacccccagcccatcgtggatggcgaggaggggcttatctgggtgatcgggcctgtgctggccgtggtcttcataatctgcattgtcattgctatcctgctctacaagaagtaagccccatgtcctccccgacttgacttgacagcagggagggcttcctggaaaaggagggaggagttgtctcagagaatcatcactaaaggtctctgttgtacacatggggaaaccgaagttcagagaggttaagccacttgatcaaggtcacacagcatgggaatggcagagctagggctcaaagcaggccagtggcttggcttctcctcttaacccctatcttcaactcagcaagatttggggtagaggctgcctgtgtccagttcaatgaggatagcaattgtagtggccccatggggcacatcccagggctgagataagcctccttgtggtgtcgataggcagggggacaaacaggaaatatgagcaccattttccagaggagaccaaagctcacagaggttaaggaaggcactgagagtcacagaacaagcccttgatggccggcacaccctcacctttcttctttttttcccccttctcacctgtgtctgctttcgggaacagcaaacccgacaggtaagaaccagccctcccccgtggaggcttcaggcaagaggaagaggacagggaatgggctgatagtgtgcccacaggagaggggatgcccggctgcccccacagcttgtacacgtagctgtacttggtcctggaaaccctagtcatacgggtccatggtccttttcttaccatgcattcctggggcctgaattgtgttcacacatgaacatgtgccactactaactggactgttccgcttgcttctcctaaagtaaacgcaaggactcagaaccccgcaccaaatgcctcctgaacaatgccgacctcgcccctcaccaccccaaggaccctgtggaaatgagacgcattaacttccagactccaggtatgtacttatccctggtaccagggatgccaccaacaggggagatagctggggagaagcagtagctgccaccctgggggcccctcattggccccctctgaactatgcttggtgcagccacattctggattcccaaatacctccaaccctacatggatctgggcttggaactcataggttggttctgcttacaaccaagtgaggcttttttttttttaaagttaacatttaaccaatggctgctgtcctcttcaggagcctaaagacgatgtttaaaaaatggagaaaacacaaataaacccctcatttctttgggcagaaagagctattcttctgtttatgtctctggttttaatgttcctcggtggtgggagttgaggtttgccctcagccattttccacactcccttgggatatatccctagcaaggtacagaaattatacctgcccaatgccctgtacctcttcccacca

SEQ ID NO: 90578 - DNA, 2137 bp, Homo sapiens
accaaggtaggcgcgcggcgacccctgcaccagagccggaccgggccttgcgcccacccccaccccagccccctccctctcccctgcccaggtaagtgctcacttttctgcttcctcgtggtcactcaaggcaagtccggaccccgaggctccggcgttggcaaaggtgggacgtgcctcggtggcaccaccgccccccaccactgccccctccccttgctcccctcccccctcttcctcctcctccaccttctttctgcagcctctgcacccgtgccgtctcccgaagcagggacttgggacaggacagggcagggccgggccagggccaggcaggaaggccgtgggcatgggcacagcggacgacagggagcgcctgggccgccccaccccaccccgcttcacgccacccagtgccaggcactcatggggcctctcttctgctctctccctgctcggccgcctccccggcagtctcgcccaagaacttcaaggtgaaaatgatcatgaagacatcagttctgctcagctgggagttccctgacaactacaactcacccacaccctacaaggtgcgactgcccagccagcaggcaggcaggcaggcagggtcaggggttgtagttcagcagggcttaaggctcagtttggagttggtgtgaagtgagggatcagggctcagtcagagatgggtctcagctaggattgaggcttagtcaatactgggaatcagacttggggcccagcctaggattggagatcagctggaactgaggttcagtcaatattggggatcaatgttgggctcagccttggattgtggcttagctgggattgaggttcagtctgggattaagatttagtccatattggaaatcagagttggggctcagccttagatcatggcttagctgggactgaggcataatcaggattgggactcagagttggtacttagcctgaggtcagagtttagtctggagttggtgccaagtctgggatcgggggtcagcctgggattgaggttcagtctgagatcaggaatcagtctaggatcaggtctcagaggtgggtttccacctagggtcagcgctcagctggaattcaggatcagtctgggttcagggttcagtgggattggggctcagtcgggactgggaattcagcatgggatcagggctcagtcaaagtgggcttctacctaggatcaggactcagctggaatttaggcacagtctggggtcagggttcagtgaggttggggctcagtcagagttggggactcagcctgggatcagggatcagtcagtgttagatttctgcctagggcaggattcagtgggatcagggctcagtcagggtgggggactcatcctggagctggggctcagtccatgggcatgagcccaccaggccctgctgagctagccctggtccgcagatccagtacaatgggctcacactggatgtggatggccgtaccaccaagaagctcatcacgcacctcaagccccacaccttctacaactttgtgctgaccaatcgcggcagcagcctgggcggcctccagcagacggtcaccgcctggactgccttcaacctgctcaacggcaagcccagcgtcgcccccaagcctgatgctgacggcttcatcatggtgtatcttcctgacggccagagccccgtgcctgtccagtatgctcacccccatgctccgggttccttgtcacccccatcagcctactatatggctggggcaagccacgtgccctctctgtgcctcaatttccttgcctatgaaacacagaccctatcagccctagttcatggggtcatccaagattcaatgcttctcatgggtcattgtcactaaatgtgtcctgtgtctgctcttctagcatttcctgataccccatatgcctgaccctccactgggtattactagggcccctgaaaggatttggttctgggcttcccaactagtggggaggcaaagctgagagtccccagtggggagaggagcactctgcctcagaggcagagaagatttaagggctacaaggttatgtgggcattgaagctggagctttgaaggatgtataggagtttaacaatgagcattacatgaagtaagcct

SEQ ID NO: 90579 - DNA, 1032 bp, Homo sapiens
cctccagcacaccagtgggtgtagacaggggggaaggccagtgccaaagggcctgaggcaggctgtgcctggtgcattggaggaacagcaaggagagccctttgtgagccacagggaagacttgggctttgaccccaagagaggtgggagccatggagggctgtggggagagcggggacggaccctgactccagtgctcacaggcgccctctggctgctgtggggaggacagactgtcgggggtgatggcaaggagtgaggggagcggagcagagaggaccgagttggtcctggcaagcgacaatgggctcgtccggctgggttgttgcatgtaccctctgagcatggccatgccacgtgtcgtggtctctgcatgagctcatgtgcacgtctccacccctgatccgggccctgcatcctccttgcttgttctcagcacggggagtgggggtgggtggggctgctcccagccccagccgtcgtgctgacccccagccgtgcctgcaggagatggtcatcacaaacttgcagcctgagaccgcgtactccatcacggtagccgcctacaccatgaagggcgatggcgctcgcagcaaacccaaggtggttgtgaccaagggagcaggtatgcaacccgccctcctcccacccaccaacagcccctttgcccccactggcaccagagcgtgactccagagtccttgagctcacaagggcaggcagagggtgcaccaggcagctggaacagtgagacaaaggtgtgagggctgctcaggtgggtgtccagggcccagcttggccccccccgcccctgcctcctcctttgtcactcacttcctgtccccccggctcccaccagacagaaacagttaacagccacctctgacccctttgccctctcaacctttacttgggctgttccctctgccaggataccccttcccctgctggctggctcctcttctgcctttaggtctcagctcaaggtacacctggccctggaaagccttccctgattgcctcatcccataa

SEQ ID NO: 90580 - DNA, 2688 bp, Homo sapiens
acctggcacatggtaggtagctaataattggggcttctattgctgttgcctggcacatagtgtgtgacatatagatttttttttttttttttttttttttttttttggagatggagtcttgccctgttgcccaggctggagtacagtggcacgatcttggctcactgcaacttccgcctcccaggttcaagtgattctcctgcctcagcctcccgagtagctgggattacaggctcccgccaccatgcccggctagttttttgtatcttgtagtagagacggagtttcaccatgttggctaggctggtctctctaactcctgacctcgtgatccacccacctcggcctcccaaagtgctgggattacaggagtgagccactgcgcccggccgagattcttatgctattattctatgaagcccttggcacaatgcttgacacacagtaggtacctgataagtggagcttctattgctgttccccttagcatgatgcgtggcacatactagatattcagtaaatagatgctctattattttgtgaagcccttggtgctggcacatagtaggtgcctaatggagcttctgttgccattccccttggcacagtgcctggcacatagtaggtagttaataaatggagcttctgttgctgttccctttggcatggtacctggcacgtagtaggtgcttaatggagcttctattgccattccccttggcatggtacctggcacatagtaggtgttcaataaatagatgcttttactattatttcgtgaagtgcttggcgctggcacatagtaggtgtctaatagagctctgttgctgttccccttgccacggtgcctggcacataggtgttcgacatagattattttgttaccattctatgaagccttagcacaatgcttgacacgtagtaggtgcctgataattggagcttctgttgccattccccttggcatggttcctggcacatactaggtacccaataattggagcttttgttgctgcttcccttggcgtggtgcctggcatatagtaggtgcttaataaatggagcttctgttgccgctccccttggcatggcgccaggcacatactaggtgttcaataaatggatgcttttactgttattttgtgaagcccttggcgctggcacatcgtaggtgcttaatagagctctgttgctgttccccttgccacggtgcctggcacatagtaagtgtttgacatatagattattttgctatcattctatggagtcctcagcacaatgccttaccacaattattagtaggtgcctaataattggagcttctatggctattccccttggcatggtgcctggcacacagtaggtgcctaatggggcttctgttgccattccccttggcatgatgcctggcacatagtaggtgcttaatgaatggagcttctgttgccattccccttggtatggtggcacatagtaggtgcctaataaatggagcttctgttgctgttccccttggcacggtacctggcgcataataagtgcttaataaatggagcttctattgctgttccccttggcatggtgcctggtacatagtaggtgttgagtaaatagatgctttactatttgtgaagcccttgttgctggcacataggaggtgcctaataaacagagcttctgctgccattccccttggtatggtgcctggcacataataggtgcctaataaatggagcttctgttgctgtttcccttggcacagtacctggcacataataagcctttaataaatggagcttctattgctgttccccttggcatggtgcctggcacatagtaggtgttcagtaaatagatattttactattattttgtgaagcccttggtgctggcacatagtaggtacctaataagtggagcttctgttgccgttccctttggcatggtgcctggcacatagtagatgttcaacaaatagatgcttttactattttgtgaagcccttggtgctggcacatagtaggtgcctaataaatggagctcctgttgctattccccttggcacgatgccaagcacatagtaggtgcctagtaagaagggcttcccttgctattcccccacccagtttctggcatggggaccatagctgtccaatgcctaagacctactgtgcaccacgtaggtgcagcctggtgagcacagggttcttggccagccctcccagccccatcccacctgcccgcccatccacccgcccatcccacctttggttgacacccacttcttttgggttcgacttctctttggtttggttctgttttgtttgttatcatcttcttttttattttctctttcccatcttttgtttccccgcccccctccccacccatcccacctcccttccccacccccccacgttctccccccctccaatagaaccgtcagccccccctcaagacgttaaatgtgtcagcgtgcgctccacggccattttggtaagttggcgcccgccgccgccggaaacgcacaacggggccctggtgggctacagcgtccgctaccgaccgctgggctcagaggacccggaacccaaggaggtgaacggcatccccccgaccaccactcagatcctgctggaggccttggagaagtggacccagtaccgcatcacgactgtcgctcacaca

SEQ ID NO: 90581 - DNA, 2701 bp, Homo sapiens
tcctctttccatcctggagtgggggctgattgaagggccacgttgtgcccatttcccaggcattttgagggtaccgtgaggctgtggtcacggctcgcaccccatcattctcagagcaaaggacacagagacgaacccaccttccccgtcggtcttcctcccccgggcagggagccttggctctcaagaccccaggacgaggtcccagttcccgagggtggggagggggtggaatcggagccgaggccaggtttcgtgggggcatgcaggtccccactcggggctcaaatctctggagttctctgctgtgccggcccggcctccctgtttggagcgagtcacccttcacctggcagttggctgtgggtcaccgccaccctctctccctgacttctctaaactcggagctggacaggccccttctgccgtctccccacctcacctgcctccctggctccgctcagcccagcgtggccttccctggtgtggcctccaccggcgtggtctctctgtcgtggcctccccctgcttccccctcttccctcccttcacccagtcagtcacggcgtagccaccccaggctttcttccagaatcagtcatgatggtcaaaccttcaaggcccgccctgggtgtgtgtacacaggggcatctcggatcagtcgaagggttaacatcaactccagccggggcatctgagccgctgggatcgggggggtggggcgcctcggagacacaacccccctgcccccgccggcccccttccctccttcctgctccccacaaaccaagccgagctgagcacctggcggctccaaggcgtctgggcgcgtctgtgtgaggtggagtcagtgagggtggcctgtggcttgggcagccacctgagagactggctgaggtgtcctgaaggtgagtacacgctggtctcaagcaggttcacaaaaacggcccaccccgcgtgcccccccgcctgccccagccactctgggctgaacggacagtccacggcccgaattcggccccagaaactctcccaaaccacgtgccaccaccatgccacgctgcccacgcacgcacatccacgtctttgcacacatcccttcccgagatgtcatgcaggttgggccggattgtgaaggacgtgacctacacggtcacctagaaagcggcttcggcccagccacgcgaacctccggggcggcccaggacagggagttggggagaagggactccccgcttcttgccccgagacgggtggggcccaggagaaccgacagcaaagactcagggccaggcgtatccatccccccggggactgcgggctccttaggctgaacacagggtaggtgcaggtcagaccactcagccgtgggtctccccagacaccgtgccaccttcctgcctccagcctggaacctcagcgtgcgcacgctgggggctggagcagggctgcggggccactggcatcctgagacccaccaagagttcggtctggccttgtagctcagcgctcggccgttccctctctcgtaagaaagtcttttaagttagcagttgaagagtggaaggtaggtaaccagactgggcgttttctggaaggagtctttctttcttttattaagtttttctcatcatcatcaccatcactgttgtttcttattttattatggtttcggttttattttttctccccctttctcagcaaatccattccttccgacacattccttgattgttgttttttttttttttttccccctgctccctgcctgattccccgcaccccccgggcacctttggttggtgtggctggtcaagaaatggggaagggttccctttgtctagttttggaggaggggcctctaatgttttgctttaagtgaggccggagggtctctctagttgaagtaagctgttggggtggcctctgcagtctctggtagcccagtgtctctgaggacaggattcgtctctgggtttcagatgctagcaggatagtgtccatagtaagtactcagtaaacatgtgctcagccaccaagcaagctgctctgatggtgagggtttctaatgctcttgccacgagcaaggccagtaatctctctgggcctccctccaggggacgtagattctaaaatcgtgggcacttgggagagtggcttccgccatacccaaccagcacaaggctgagatctgagctgccaacctcaaaccaagccagcctgtgaatcacggccaagtctgggttccaatcctggctctgccacctcatcactgcatgcccctggacaggtagcttgctgtttctgagcctcagtttcctcacctgtaaaatgggctcacctgtaaaatgggctgcacttctggtttttcggcaagattgagaggtgttatacaaaataatgaaaagcttccagggtggggtctggccacagtcggtacacaaccagtgactgtagaaagcccagcaggcagactttggaatctggtttccccaccgttgacgcggggtggcgggtggggagtgacagttctgaccacctgaggggttgtgagaattaaatgagataatgcatgcattaaatgagatgatacatgcgttaaatgagataatacatgaaacatgggctgagggtgctgcacctgcagtaggcgtgcagaaaatgaagtttattatcactaatgccctcagcacagcgtctg

SEQ ID NO: 90582 - DNA, 1343 bp, Homo sapiens
tgcggtggctcacacctgtaatcccagcacttcgggaggccgaggcgggcggatcacgaggtcaggagatcgagaccatcctggctaacacagtgaaacccgtctcaactgaaaatacaaaaaattagctgagtgtggtggcaggcgcctgtcgtcccagctactcgggaggctgaggcaggagaattgtgtgaacccgggagacggagcttgcagtgagccgagatcgtgccactgtgggtgacagagtgagactccatctcaaagaaaaattaaaaaaagaaaatgggtactgggtggaccctgggccatagtttgttaccccttgctgtagacgatgacaggagtcatgaggcccatgattactgctgggcaaatcaaggctcagagaaggcgactgaatggtgaaaagtcacacagccttcagggtcctcaaccaatgtgcccaatgcgtgacacagctgcctcctgcccacagctctccccaaagctcccgggactcccatggtgactgagaacacagccaccagcatcaccatcacgtgggactcgggcaacccagatcctgtgtcctattacgtcatcgaatataaatccaagagccaagacgggccgtatcagattaaagaggacatcaccaccacacgttacagcatcggcggcctgagccccaactcggagtacgagatctgggtgtcggccgtcaactccatcggccaggggccccccagcgagtccgtggtcacccgcacaggcgagcaggccccggccagcgcgccgcggaacgtgcaagcccggatgctcagcgcgaccaccatgattgtgcagtgggaggagccggtggagcccaacggcctgatccgcggctaccgcgtctactacaccatggaaccggagcaccccgtgggcaactggcagaagcacaacgtggacgacagcctgctgaccaccgtgggcagcctgctggaggacgagacctacaccgtgcgggtgctcgccttcacctccgtcggcgacgggcccctctcggaccccatccaggtcaagacgcagcagggaggtgaggcgtggggtcggcaggactcggggccccggccgtgcggcttggttctttgcatgctccctggaagccgcagagcggtttgtgggttatgcacggtgctttaagatattttcatgctagcatttaggccgggtgtggtggtttacgcctgtaatctcagtactttgggaggccaaggcgggcgggtcaccggaggtcaggagttcgagaccagcatggccaacatggtgaaaccccatctctactaaaaattagccgggcgtggtggcctgtgcttgta

SEQ ID NO: 90583 - DNA, 4008 bp, Homo sapiens
tgtttgtttatttatttatttatttggagatggagtctcgctctgtcacccaggctggagtgcggtggcacgatctcagttcactgcaacctctgcctcccgggttccggcagttctcctgcctcagcctccagagtaactgggattacaggcgcccgccgccacgcctggctaatttttgtatttttagtagagatgggattttgccatgttggccaggctggtctccaactcttgatctcaggtgatccacctgccacagcctcccaaagtgctgggatcacaggcatgagccactgcgcctgcctccatttcctttttataattcatccctgaactcccttaaggtagagaagctgtttgatcgtcccagcccctgggaggctgaaaggtaacttcaccagctccatgcctgagtttagcacctgctgtgccaggcactgcccgagtcaggttaatgcctttctcggcaggatacccaattccctccattttacagatgaggaaactgaggctccaggaggatgggggaccttcccaaggccactgggctcattcagccacatcagctcctccacgtctgcctggagaggtttactatgggattcagagaccttgaggagttcaccttgctttgtgatttcagctttgggacctccaacttgctcagccctaagagaggcagggtgtcgagaagtggactgagaggggctttagagagagagacttgagtcgggctgggttggtttgttccgaaggatttttgtccacgaggctcccacccctgtggccgccccaaacccgtggccaagactcttgggtgctggatggggaggccggatcctgtgttctgccagggggagggcgtctccctggggaagccacagtcctcctcctttcagaccccgattttcagccccacacccattccatgatttttttttttttcttcttgcttttgggtgttgtgttttgttttggagggagttttttcgtttgtttgttttttagattctctctttctttttttaaattgcttttgctttgttatttcatttgttcttcctggttttgttttggacgtcgataccgtttttctgtccttgaataattagctccccccacgctcatttccccattgtgttctgtttccatgacaactcagccttggcatcttacctgtgcctcgctgtgggtgccggcggctggcctggaccgcgtccgctggctggccggaccccattctccccccacacccccaccctccacccagccctaccagaaagccacccgccccccccatctcacggcacctcgcccctcacctccactctgtgtgcatggcccttctgtctccccatgccccgactcctcccctggagcagtaccctccactccctccatcctgtctccagtgcgacttctggacttttcgtggggcttctttttccgaagggctgccagcttccggaccccactcccacgcctgccgacgtccccccttctctttgcctcccgcccggattcaggaaggcaggggttgggatttccagctaggaaccgaggctggaagggagggagttggggccacctccctttatccccttgaacctcctcctcagcatcgtagaccagaccccctgagaccaccccctgaggctgcacctcccaatcccgtatgaaaatcagaggcaggtgttgatggggatcctaactgagcctccagtccgtcatctgtgcagttgaaacaagactccttcacccatccaaagctggggacgcacccatgtgtcttctttaggacctgagactgtcacccagggacaaccccttttcctgctagaaggatttattaggttcacccgagtccttcccacagcagttaaacagcccccgtgggccagcagtgctctttgcaagttcaggtgcccactggcctcctccccttccccctgtcctggaacccatctgacttccgaaaacggagcccccgaaatgcatcctgctgccttcatggtctttgagagaaggttgcatccacttccccgctaagaaacgcacagaacatgtccctgttctctcaacgttcaagttcattcccttgtttattattattaattattattattattattattattaatatactatttattattctgccagggctgtgatgtgacaatgtggcatgtcacattggatcacatctgctagaattaatatgcagcattgaagtgggcccccccttctttctttctttctctgcccctcccgctctctgtccctattttctattcttctctctttctccccattcattcgtctcctctctctggtgtcacgtaagtgtgcactagagatccccaaaatccagatcttccccctgcagttcctccctcctttctctctctgtctctcgctcgctctctctttctctctctctctctctctcaatctattttgcatgatgtttgtgactcagagctgcatctattgatggaaacttgtcagatctgacagaagcttttagaagggtttctatacccaaaaaccacaaaaatttcattagagtttctcatcttttcctggagggcccggtcggagggggcgggtaagtgggcagggccccaggtcactggggagtgggggactgacatctcaggctccctctgtctcctggcctcaacaagtgtcctatgaccgccacatccccagagaaccagggagggttggaagttgccccctctcctaacccactcacatcccgaaacttggcagccagaatcttccagcgctccccgaaggggatgcccccattcgggagtgatcggaggccacctgctccctgaagccactgctgtctgcaaagatgagaaaccgctgataaatttttgtgttcgtatctgtgctgtgaccagccaccctggtctatgaaaccctgttgctatgagataatgcttcatgtctattatatattgatatatctctctatatattgtttgtgaagtaccttcctttgaagttttggtttctttgtgttggaatttggttttttaatttggttcttttgttttcttttcatttgggggaaaaaaatcaacagagggaaaagaaccagccctgtttatatttaaatggttttcctttttttttctttttttctttctttccttctttctttcttccttcctgcttttctttttctcctccgcatcctgtcttcccctcccaacctcaccccacctcacccctcgcatctccctcccgccgccactgccgccccctccccagtccgccgcgtggccccgcgcttctccatcctgcccatgagccacgagatcatgccagggggcaacgtgaacatcacctgcgtggccgtgggctcgcccatgccatacgtgaagtggatgcagggggccgaggacctgacccccgaggatgacatgcccgtgggtcggaacgtgctggaactcacagatgtcaaggactcggccaactacacctgcgtggccatgtccagcctgggcgtcattgaggcggttgctcagatcacggtgaaatgtgagcagggcccatggggctcgtaggtggaggggcaggctggagtcgatccccgacttcaggcacaggtgggaggcagcgtgggagcacctccgagttaccctcttggcttcagtcattcatggctaggaaggggacggttgttctttgaacaggtattatttattggttataaatgatcctggctgggcgcagtgattcacgcctgtaatcccagcactttgggaggccaaggcaggaggtttgcttgagcccaggactttgagaccagcctgggcaacatagccaggccccttctctaccacaaaaaaatgaaacatttagccaagtgcagtggtgcatgcctttagtcccagctactcaggaggctgaggcaggaggactgcttgagcccaggagttcaaggctgcagtgagctatgatcgcactactgcagtccagcctggg

SEQ ID NO: 90584 - DNA, 1312 bp, Homo sapiens
cctgccggttgagcaatgttctaccttgaagggtctgaggatatcttcaaggttttggaagaggccgatgggactggcataatttaacgcagagtcttgagtgctaagctaagaaaccagtacctgctgcgtgacaccagcaaggcctagattgcccgattcccaggtcttctttttcagtatttgtgacctgtccccaggccttttcagatcaatccatctatgcaaatttatggggaaaaattgttttttaaattaaatttccaatacccaagccctaaaattgatggatgtgaccccaggtgttccccttacctcttggccccccaaaacagggacagacatagatggtgggctggaacacccctcacctcctgtattcccagaaagcctcgcgttgaggtgtgttggccagctccctagtttgtgcttactatacctggccacgcctccctacctaaggccgctggcttaaccctaggggcaggcagtgttagatcagacccagaccttctcatcccaccctcatcacatcggggagaggggactccaggggcgggaaggcaggcgtccctccatttggccagggtgggcggcgaggagggggtcactctgcaggaacactgagctctgaacacctctcgcctgctgcctgcctcacaccctctgcattcgctgtttcctctgttgggggagggggtttgtgaggggaatattagattacaccttgtcatttggaaagccccgtgtctccggcggccacagcgaggttgggggggtggtgagggaagtccatggattggccagaactgggggaaaaacaaaaagaaatgagagaaagagagagcgggtaccaaaaaaaaaaaaaaaagtatctagagcgcatccaaaggtccagctcaaaataccaatgacttgccaaggccgctggtcagcccgtgggccagggagccagccaggtccctccgggccttgcacgctacctcagtggcggagggagctggcggtgggggggagaggcgggagggagggaaggaggcacagcaaaatgatggagaagggtagcagaaaatacgcaggtgggctgaggggcggtgcccaccctccttgggctacaggctggagttcaaaggagaggacaagaagtgggctatggaattaggaatgtttccaacccctcccttcccccccgacaggtgtaatctaagcttaaataaaccccccggaggctgcacaatttcttggcatctctcccctgccctctccatccgcatattcattttggagtttggagaagtatctagaatcttct

SEQ ID NO: 90585 - DNA, 1724 bp, Homo sapiens
gtagtaactcagctccctgcctccaggcagccatgttggaaggaagcttaagcaggcatgttcccatccttctacctcagaatgagactgcctcctgcgctcccaaataagcccaaacccaggcatttgaagtactgctgaatgtgcactagcattttgagttcttattcattttagtgacatatccaaacatggattatggtcagttttaaatgaggggagaggacaataacagcaccattttcacaggaccatgcatactcggtgtgtaattggcactcaaaatggcagctgctgtgatgactgtatgcattctggctgggtaccaatccagaagtgcccattaggaaatgtagcctgacagactttggaagaaagacttggccaattatctgacctggaacactatgcctctgcctcccaggcagcactggctgcttcccccatcccctctcagactctgagcccggtcacaggcgtcttttgtccagcaacacagcatggtcactttctgagtacctgagcatcagagctgtggaattctggaaaaagcccaggggaaccttggacacagcctctcccctgctctctctgcctccccaactctccctctgcttctctttctctttttcaactctctttctctctgtgtgtctctcactcttgcaaatcttcagagatgcacacccccatcttctgctcccctccccaagaaaaggcacgcccttgagagtcttactccaacccccaataaaaaacaccccccaataaaatatccgtgtagatttttaaccaccaaccccagctgactaccccgtttagacgatgttgaggacagaagccagactttggaatcaccttttccccctcttgtccctcactcaccttctccaaacttaccaattattaaatcctggaccaagttggcaagaggactttagatgcagtaagatttgcttattaacccagcatgcgagctgccaggctgaccctcagagcagtgccaaaagatggcagaaaggggtctcccagcccctccaccaaagctaggtgctggtgcattggaactgagtgaacagagggtctctgaagaccacttggactttctgggcagtacagcccagaaagtgatgagagcataggctctggactctggcagacctggattccagttttgtctgtgcccctccctggctacgtgaccttgaactagtcatttgaccacttggagtccccacttcctcatctgaacagtagagatcataaatgaaccttgatcacagggtaggtgaaaggatttcattgaactaagtgctctgtgtaacaagcattcccagtaggattgttgtaaataaaggattcaagcaaatgatctgggcaagtcacttcccttctttgtgggtcttagtttccctgttatgtacttcacatgtccactgtttgaataagatggcatatgggaaacttttaaaaataattgtagggcagaagctaattcatttgctcagacctcatttttcgctagtgctttcctgagctcatctcatgatctcattttctcctggctccagccccatccccatgagatcagcggactacccagagccatagctctcattttccccactgtcatttcctaggaagttctgtggccacagaaagggacaacaaaggcccatattaagtacaaggctacccttgcagataagtaccagcccaccaga

SEQ ID NO: 90586 - DNA, 2020 bp, Homo sapiens
gaggaaaccgaccagggcaaatatgagtgtgtggccaccaacagcgccggcgtgcgctactcctcacctgccaacctctacgtgcgaggtagggaacgccgcgtccaggtcaaaggcagggacccgccccgtcccatccccctccctcctcgggctcaccgcctccgggctcccccgtcccctgcacacccaagcaggaaggcccctccccggtcgcggtgggaccttggccgaggcggcgtccctctctgggccttagtttccttgcctgtagaatgggggcagcttaaattcccttcctcgtgccttgcgagagatgccccgtgggcagcaggctctggggaggcagtgatggtggggtaggaaggcgtggggcagggtgagggggtcagtcttgggcctacagggccaggggagcctgcaggcctctgccccgccccaccccacctgcctgcccacccgagttggcttctgtggtgtgtcgtgccttcccgtgctgtgtgctggctttgcttctcccaactttgtggcctcgtagctccccgcttcactgccccccctaatccagggccctcaatctagaagttgaggaggggtcttcgaggctgcccctcccaccccccaccagctggtccggagcccggcgccttctgcctcttcctaatgactctccgagaagggcagtccaggccgatgggaggctggagccacagcgggcacaggcacccggggggctcggtagttgcaccgagctggggcaggcacggcacccagcgaagcttgttactctcagtttccaattcccactcagtcatgcccagcagcgtgggggcctcgccccagcacctccccgctcccctgccccaaggaagcttacttccttgtgggtcccttggtgctgcctcaaaggtgccagggggctcccttgcccccagatgcctccgttggcctcctcttatctcgtgtgttggctcttgggtcttttcagaagttgtagtcttcctcctcctcctccctttcacctcctagtcgctgtttctgatcagatttgtggtagaaacagcttctgccaggatgccagggcgcccttcaatccctagggctgccccagttagcgctgtgtaattgactcaatcacatccttctctgggcctcagtttcccccatgcgaagtaccaagccctagttgttctccatccaggaggccgtgtggctcatcccttacccacagaccctcactcaccaccttcgtccctaccatccacagcacccgctggccctgaagtgattccttggtcctggacctggggttttgcattttgtctctgaggaggaggtcgcatggagggggaggggatggggatgtgggtgtatggacgggtggtgggtaggggcacgtctgatccactgtcacggcacctctggtgagttgtaatgcgttcgtgactccaactgactggtcttcacctaacctgcttatttctctgccaacacctgggatgggggtttgtaaatccagcagggctcaaaagagtgtggacagcgggtgtggggcagggagccgggtggggcctttagtgagggtgcaagaagggaggggggcttctgtgtcctcatcccccagaggtggggtccccagcatgagcctccatcctcttggggacagttgagggggtgaggttctgtttccccatctttgcctgggtcttagatgctccagaatcaagcttagaaaagaatggagaaaggcaaatgtagtagatcttgtatgttgagggcagagtggagagaagacaaaaaggtcattgctgttctttttattttttaattttaatttttttttttggtttaaagaaaaaaaaaacaacaaactattgcagcttttagccttgggaagtcctctttttactctctgtatctcccctattttttctcttcttcccatgtcattgtgttctgcatcaaaccccctttacatccctcagagcttcgagaaggttggtgtgtttttttctttttt

SEQ ID NO: 90587 - DNA, 2291 bp, Homo sapiens
ccaaccaggtgcagtggctcatgcctgcaatcccagtgctttgggaggcagaagtgggaggattgcttggggccaggagtttgagacccgcctggacaacacagcgagaccccctctctacaaaaattttaaaaattagccaggcgtggtggcgcatgcttgtagtcccggctactcaggaggctgaggcaggaggatcacttgagcccaggttgttgagactgcggtgagctatgatcgagccactgtactccagcctgggcaacagagcaagaccctgtctcaaaaaaagagagagaactggctgtaaaggatggcacccatggctgaggtcacgcagccagggaggagctggacccgtggccaggcagtccctgagccccaggctcaggagtggctgtgcagtgctcagaaccatgcccatttctctcacgtctctgccctcagaggaccagctgccctctggcttccccaacatcgacatgggcccacagttgaaggtggtggagcggacacggacagccaccatgctctgtgcagccagcggcaaccctgaccctgagatcacctggttcaaggacttcctgcctgtggatcctagtgccagcaatggacgcatcaaacagctgcgatcaggtgagtgagggtggctgacaggacgtgggagccttggagggcagcagggggtggggagcatctccagggcccaagttctggggactactggaggacagacagagacagtgtgtggccgtggcaggcgttggctctgggggagtgggggcaaatgtcttcaaagccgcacactgaggatattagggggcacagatgggcatgagtactggagagctatagagggtggtagaagaatagtgcttcaacacctggccaatgaagatataatggatgcagacatgcacaaggatggggagttatatagggccatgggcggggagagtgtctcccatgctcaggcagtgagatcacagctgtcacccacagacagttgtgggtgataggaagccactgagggggctgggcgcagtggcttatgcctgtaatccgagctctttgggaggccaaggcagaaggcttgcttgaggccaggagtttgagaccagcatgggcaatgtagcaagacgctcatctctgaaaagaaagaaagccgccaaggatggtgggtatcggcagtgcccaagcaatgggagacagacaggcagaagtgtcagtgagccatggagggtgacaaggggagaccagcttcaatgggtatgtaatagggagctatggaaggtggcagagagcatcctctacagaagcattaggcacgtccagtgagaatacagtggggcccagacaggcaggagtagtggaagctgtgtaaggcaatggcaggtgtccagaggtgacaagtaaggtgatggggagccatagaaaactacagggagagagtctctccaaggctgagcagtaagaggtgatggcggggcttcaggtctgtaagggggcacagacgggcagtccagcctgtctgttcaggccctggctgggctagggagaccttgggacagagccttggagacgggtggttccaccattgtgtctccacaaagcacccacatggcccatctgtgggtccatctgtctggggggctgtgtctgcgtgtgtgttgtccccccgcttcacgacatgtccacgtgtgcatgtctgggctccctgtgccggcctggcctgcctcccgcctgtgggcacaggtgtgcaggcctggctgctgtcacacacgggcctcccttcccccgcccggagcaaagtgtccgcctgcatctcggccacacgtgcacccacattgcagtcactcccgtgcctgtgcacacagggcagtgatccgcgcacgcgcctctcagcctgcacctccctagtgctcgtgcgtggggacacacgtggtggggatgtgtctccatacattgggagcacacgtgtggctgcacatgcgtgtttgtctgtgtcacggatttactgttttcagttgtgccgggcttgacgccctgccttcgttcaggtcactgttgagatcaccctgcacctccacacacccctctttttgctttctctctccccttcctccgaggatcccgccacggagccccctttgcagcagtacctccccgaatcatccccagcgcccctcactcactgcccatcgttgccccccaccaaagagcctacctacctgttctccgctttctgctcctcctccttagtgaaaaccaagccccaaaaagatcagacg

SEQ ID NO: 90588 - DNA, 1800 bp, Homo sapiens
agaccaagttattctggcaagtgctttcagggccctccagggtttggctggtcaccatggagggggggttcaggtgctgaatttagggaccccagcatctcacaggtttccccttccatctttcccagtggcactgtgtctgagcaggtgtgcccaggtgaggttgtatccactgtgtctgagcaggtgtgcccaggtgaggttgtatccactgtgtgtgagcaggtgtggctgttgcaggtggaagtggggatatgtgggcacctgggtgcccatgggtgccgtggtggggggcgaggtgggagggtgtttgttgtcatccttgctttcctcctcctctcttcattggccacatggcacttccgtgggcagggcatggaatgcaggttttcgtggctccttggtatcctagccagatgcctggacccatcagcgcccccccttctttccactgtatccccagagccccccaggtttatcaaagaacccaaggaccagatcggcgtgtcggggggtgtggcctctttcgtgtgtcaggccacgggtgaccccaagccacgagtgacctggaacaagaagggcaagaaggtcaactctcagcgctttgaggtgagttggggtagggggaggcagcctggggtcaatgctcccccaaggcagggccacagcacctcagccacagtggacttcgtggacacgttccccaggtggagcatcatctgtggccaagcaagcatggctgcgcagcctccagccagggccctgcccgccttacttgctctaccagctccatgctgtgtggcctcaagcaaagccctgccctctctgagtcttcttcacagtgcagtgtacacagcaccactgcacacagaaggaactttacaactctcaatacacgcccatgatcacacgtgcacattgacacattccgcatgtcttcacatgcctttgcatgcctgtcacatgggcttgcagacatttgtcaccctcacacatgcacacaacaccctgttcttatatgtacccaaatctggtccctgtctgcggcgcatttatactggacaccgacacacgtgcacattcagcctgcagcaattctcccagtcacccccaggatcatggggctgactgccattcccctacagcccagcctagcccagcctagacaggaaccttcctgggaccccagcctcactctgttcttttttcccctgcccatggcagacgattgagtttgatgagagtgcaggggcagtgctgaggatccagccgctgaggacaccgcgggatgaaaacgtgtacgagtgtgtggcccagaactcggttggggagatcacagtccatgccaagcttactgtcctccgaggtattgggctcctcagggcgggcggaggataaactgggccctgggctttggggacaagcacaaaaggaatacatgaaagttaccccaaaccctcctgctttgtgttttttgggaggaccttgatctcccttatccaaccagtaacagtctcagggcccagcgcctactggtggggatttattgtgcctttgcaagaaagaaaggaattgagagactagaatcatcctaatttataatcttcatcatgtgcttctgatgacaaaaggctgatccaactcagatgggttcaagcgagaaaggtaattgatgtgcagaattaaaattccatggagtggctggcttcaggttcagctggatccaggggctcattgaattttctcagagctcactctctgtctcttggctttgtttccttctgtattgatgatatcctt

SEQ ID NO: 90589 - DNA, 1105 bp, Homo sapiens
tattgacagtgtttgtttttctgtgggtgtccatcccccctgcaactagtctgtgccccccaacaggggcaggagtgctggttccatcatgcttaccactgtgtcctcagcacagcacacagtaggtgctcagcacatgtacagggaaagaatgaatgagaacggccgcatgaaacagtttctctctaggcgagggatggattgtgggtaacttttattttcttctttatgctgattttacctaattttctgctgcacgcgcctattttataattagaagaaaagttattttgaaaaaaattaccccccaacgtcccagctgtgggagctgacgtgatccagccccgtgttcctccccaagggcagccgcctcctgggtgtatacagaggacatatcaatggaacgtttttggaggggtccaggggtcagcccccaagggcacggagtaggcggggcaatcagggagggcttcctggaggtggccacccttaacctttagggtgctcaggccaaaaacccagaagtcatccttgagtcccctcttttctgtacatccccaaatgagccgtttagaaaattctattgggtctgcctagaatgtgcctttctccctcatcctctacccagtccagccccagcctagtcatcccccacagtctgccctccccacagcagctgagcatgtctgtgagtacctgagtcagggccttcctctacccacagccctccatggctcccaccttcctcagggtcaaagcccaattcctcctggaggcctctgaggccgtgcgcatcttgtccccattccttccctcccctccctcccctcccctcctctttgtctccccttcctcactctgctccagcaacactggcctcctcgccattcctccaacacgccaggtgcagtgctgccccggggcctttgcatggactgagctctctgcctggaatcctctttcactttctctcaccttctcctggtctttgttcgcatgtcacctcccctctctcctatcctgtgtttattttattttacatttttttagagatagagtctcgctctgtcgcccaggctggactgcagtggcaccatcctagctc

SEQ ID NO: 90590 - DNA, 1062 bp, Homo sapiens
tcccagcactctgggaggccgaggcgggcggatcacgaggtcaggagatcgagaccatcctggctaacacggtgaaaccctgtctctgctaaaagtacaaaaaattagggccaggcgcggtagctcacgcctgtaatctcagcactctgggaggccaaggcaggcagatcacgaggtcaggagattgagaccatcctggctaacatggtgaaaccccgtctctgctaaaaaaaaatagctgggcgtggtggcgggcgcctgtagtcccagctacttggggggctgaggcaggagaatggcctgaacccgggaggcggagcctgcagcgagccgagatcgcgccactgcactccagcctgggcaacagagtgagactctgtctcaaaaaacaaaacaaaacaaaataaattataaaaaaaaaaaaaaaatgggtgaaattccaccatggcgtaccgtggccagggccagaaagtgcagaaggttatggtgcagcccatcagcctcatcttcagatacttacaaaatagatcgcggattcaggtgtggctctatgagcaagtgaatatgcggatagaaggctgtatcattggttttgatgagtatatgaaccttgtattagatgatgcagaagagattcattctaaaacaaagtcaagaaaacaactgggtcggatcatgctaaaaggaggtaatattactctgctgcaaagtgtctccaactagaaatgatcaatgaagtgagaaattgttgagaaggatacagtttgtttttagatgtcctttgtccaatgtgaagatttattcatattgttttgattaccgttgtgttactacaagatggcaataaatactatgggattgtttgtgttaaaaaaaatgggcttgatattagcatctatctcatagcattgctatgaggtgagttgaggtttataaaaccttgaacactcctggagcatgctaaagactcaatgtgataaattatctcaggctgggtgtgatggctcacgcctggaatcccagcactttgagaggccaaggtgggcagattagttttgagcc

SEQ ID NO: 90591 - DNA, 1018 bp, Homo sapiens
gcatagcaagtggttgtggttctttgaatttttttagcaagagacaggtctaaaccagggcttcccactccttgcccaacagaaatccctcccctctgccctttaagaaattaagtgtggcccatagacttagggaaggggaatcgctgggctcgatttctactgcagctgtaatctataatgttgcattacagtttttaaaacaagaggcccctctttggcctctcaaatgctgcacgctgtggagttaagtgctggaagccactgatggtgtctctcggcttcttccagtcttggaatcatagccacctcgtgccaacgagctgtgaaactactggggtgccccgtgtacccagccacagaaaacgcatatcaggcctcgcggggagctcgtaaaaggcactgaagcttcccctgcgtgtatgctgccggccacagcagaccaaatatttacagactcagctgaaatgaaacccagcagggtggatctcacaggtggtccgggaaaggtccccattgctggggaaacagtgcacagagcaggaaggaaacccacttggccaaggccccctgccaagcaagtcaagatgaaatccaggctcaagagctgggctctgagtcctttgttttcttgcttatttagcttagcaaatgcttcttgggtacttactgcgagcagggctccatggcagagatgcagccatgactgagacaagcctgcaggttcctgttgtctgggggtggaatgagactggcttcttggaggaggggactggacagacctaagccatgaggagtgaaggagccccagaagggctttccagaagaagaaacagggtgtgcagaagcccccaggaaggaaaggacacgcctcccacccttttttttgtttttcggagcgatgggatcttgctctgttgcccaggctggagtacaacggcgcgatcatagctcactgcaaccttgagctcctggaagtaatcctcatgccccagcctcctgagcagctgggactcca

SEQ ID NO: 90592 - DNA, 1017 bp, Homo sapiens
gccatgttttcatttctggcaggtaggaatgggtttgctgggtcatggtaattctgcgcttaactttttgaagaaccaccaaacttttccacagtggccacaccattttacatttccaccagcagtggacaagggttcttccctttcctcgcaccctccacggtgtgtgttattgtgtgattctagcatcccagccagggggaggtagcatctcggtgtggctcggattggcatttctgggtggcgttgagcaccttctcacgtgcttactagcacatctgtctttggggaaatgtcccttcccttgatttgcccacttgacatgcagcccttgttgtgtggcatgacccaccatgcagctgaggtcagggtgggtgcgcctgctgccgacacaaccctggaggctcattagatggctgcatgtctttttcttttggcaaaggggtggccgtgactggggagagcacaaccagcggctagaggagcaccaggcacgcgcctggcagggtgccatggacgcaggcgcggctagccgggagcacgccaggtggcaaggtacggggctggctccagggacgagggtggctgtggcccccacatgtgtccaggggcttccccaggaacggagtgtttgcagacccttcttctcttctaggtggcgagaggggcctgtctgggccctcggggccggggcacatggcaagccgcggtggagtggcggggtaaggtgtgtcgtccgtggaggacggtggttcactcctgctcctcacttcctctcccttttttgcatgtttgatcagctggctgggttggatgttatgaaaacaaagcaaaaagcagctctttgcaatttatgcaaataacgctcttgagttacctggaatacaatgtgcgatgatgatttttctcacctggaaaaaaaacccaagcgctctaaaggctgcgggaccgttactgaacccatgttacgatgaaaacgctgagcacttcaaggggaaaaaaattgtctgactttgt

SEQ ID NO: 90593 - DNA, 1008 bp, Homo sapiens
ggaattgtggccctgccagagcacaggggggctgacccacccgagggccctcctgttatcggaaaggaggcggcgcccaacttctcagggaagacagggtttggtgacgtcttagtggatcttgagcagagctgttgagggcagtaatgccagggtgccctggctcctggggcagctcaggtggggcagtgatgcagctgtaggggtgcgaggaggggagccagggagcagagggtcagtgaagcagggcccagcagggctgagactgcacccttcagtcctctctcagctccgccccacctgccaccctggggcctgcagtggacaggccttccggaaggtgggcctatgtgggtgacatggtcagtgtcaccctgttcctctcctgccttccagcactatggagatgaccgccatggccacggaggacccccagagcgccacggccgggactcccgtgatggctgggggggctacggctccgacaagaggctgagtgaaggccgggggctgccccctccccccaggttagtgggtgagccccagccgggtggggagcatctgtcctaacctgggaaaaggttggtgcctggccaggcacgtccccaaggtttgattcagctaggggagctttaggatgggctaccaggggtcctgccatttgaaacccctgactcagaaagtccaggttctcaagaagaaagcatagaacaggctttcagggatggagctgtccaggtcgcccagaatggcccatccccattcttgagctgggggtcgcctgcagttgtgaatgtctcgatcatgggctgcgtacacactgggagagacagcgctgaagctcttagtcctgccccgtccgtggtagagcagcctcgcccctgcctccacgttgcctcttgacacgtgtcttcctcgggttttttctctgacccccagttggtctggggtggatcttctcaaccctatcctgcctattagaatcacttaggaggaccctccacccag

SEQ ID NO: 90594 - DNA, 1103 bp, Homo sapiens
ccgtgagcctagttttctggtaaaaatcaggaagaagataattggatgccgtccagagctgtgtgtagttcactatcaccccatctaattctctttgcttttgcaagaaactcagagggagattcaggctcccgtggaaggcagggaaagtaaaagtgtggcaactcgaatgctattccagaagaatcaaatatttcttttcagttgctcatgaggggggatcaaggtaataacagcctcacgagacaatgagctcacagcagtgctccttttgggactgttggatgagaacacaagtgtgcctctcggctgttaatggcggttttaatttatcagatcaaagcaatgatgatcgaatgtttagagattagccctgcaggacattttaaacgatactgggtctggggagagagctcccctccccacctccacctcctccttttttcctcctcctctctcattaatggaatttgtattcttttaaaataaaaaccaacagacgagatgatgcctattggccagaaggaaagcgtgtggcaatggaggaccgatatcgtgcagactttccccggccagaccaccgctttcacgacttcgatcatcgagaccggggccagtaccaggaccacgccatcgacaggtcagtggtcttgtcccctcctttagctacagtcattgtgggcaccggggcatccagctgacctcgttctcagcccagtgcaggggttcctgtgtgctctgaagcctcgtttacttctgagatccacagtggatgactctggccttgcacagaacttgagcgagttgctggaatccccagcttacctcagaggaaggcatctcagagctcattccatccaccgactcttttcataggtgggccaggaggggcctgagtgcaggccatctacactgagctctcttgtgaggcagcagtgtttgtcagcacaacctggttgtgcccaagagctaccagagaattgatggaggacgtgcaaaatttctcatgaggcctgttttgtatttcgagggtctgggtgggttttttagccttttaaaatgaggaatacatctagtttattaaaaaggcagcccttggtttt

SEQ ID NO: 90595 - DNA, 1046 bp, Homo sapiens
gcccggcgttctcttgtcacttttcctcaaatattgctcagtaaagcaaaagctgtgctcacagcatttggaaaatgttctcgagcaaacctagaaatgttgccagctgtgctgcctttgcttttcttaaggtagctttgttaagtaaggtaaccccctgcacgcgcagctttagggaagcccggtgagcttttggatccattttttttttctgcttccaatacacacccagttttgggcaccgggctttctccttggaggctcacgcagggagttcagggcagcctcacctgtccccgcagggagcgcgagcagcgggagcgggagcaacgcctcgaggccttccatgagcggaaggagaaggcccggctacagcgggaacgcctgcagctcgagtgccagcgccagcggctggagcgggagcgcatggagcgggagcggctggagcgcgagcgcatgcgcgtggagcgtgagcgcaggaaggagcaggagcgcatccaccgcgagcgcgaggagctgcggcgccagcaggagcagctgcgttacgagcaggagcggcggcccgggcggaggccctacgacctggaccggtgagtcccgcccagagcgtgggcaggacggagaccagcgtggcagcggtgttcacccttccagcagaacagcggcttcccttccgtccctgtcggtggggagaatgaaatttgatatggagcatgcgccttggggaccccccgccgatctcactgcgctgctgcaggtttattagttcgctgtcctcaccggaggctgtgtagcatcttcctgaacttgagttattctgggaaacttgatggctgccacttgctgaagggtttgtgatgcttttcctctccacttacccgtggagcatagctgttctctgtcttgcgagacaaccgaacgcccgttaggcccaagttggccaccgctgactctgccggtctcatgtgtccttgtagacagagaggcagagcaggcgctgtggaaaaggaaattgcctctgatttagaaagtaggtttattggtct

SEQ ID NO: 90596 - DNA, 1015 bp, Homo sapiens
tgctggagatgaatggagggaagcccacccgtctggcaaggcactccctcagagtggcagtgtgattcctagcacaggctggatactgcggagcttcacagaatgtcagggaggagtgacagcatagaccagctccggagctgtgtgggtttagagtggagggtcacggagggctctgcaggatggccgtgcttgtgtgcgtgctgcaggtttaagctgtaggttgggaacaggtccctctagttgtgtaaagagctgtgagggtacccccatgatgctgtgcccgtgttaccgtgttgctcacaatagatgagaattagaggctcccaaggctagtgtcagtcacttgactcacgccttgtgtgttcaaaagcccagggtccatcagagtgctgtttactgcgggaagttggggcgtccacaggttttgatagtttgttgtgttttttcctgaaggaagcagaggaatggagcggacggtcgtgatggataaatcgaaaggagagcccgtcattagcgtgaaaaccacaagcaggtccaaagagagagtgagtattgcctctgccatctcagggccagctgtttctcacgatggctccacggcccgtttgatccgcattatgaaaacagcactgttttgcctttaaaattgaagtttgtaggaggcgcgataattgtgtagattgcggatacagacacacacatgaatcctggtgctttctgcagagcagtgcccatccgtgtttgcttcccttactggctcctgaccgggatgtgccgccttcagacagagcattggttcacacggcagctcaccatagggtgggatgggccagacccaggcttttcgagccggaaggcaggtcctactctttggttgacttaatagcaggctactttcttccattggttttttagtctcctattaaattaaccaaaaaggtagagaccaacctaggacagagagctggtcatgttatcagatcaagagctgtacctctcgagttgtgcacac

SEQ ID NO: 90597 - DNA, 1020 bp, Homo sapiens
gtgcctccatcccgttgaggctgtattgggaagaaatgcttttccctataaagcttataaacaatgttccacacatacatgatgaaacattaaactttttagaagtgttcttatgtagttggcgtgtttctcatgtccacctgcacaccactcttgcgtgctagcctgtctgacattttggaaacgcatccccaggaatttcattgtgcatatccctcaattcagcacatactagaagtgggaatacagcctgtatctaaagaggagtattgttattactatgggttccaaataatttttcccacctaattgctgccggggtgatttgttttgtgtggacgtctgagtatgtgtgagtcgaggctctgggtgagccgttcctgttacagagtcttgtgaactcaaatttgataaccatgtctttaaatagaactgtaattaagaaggaagagaagattgagaagaaggaggaaaaaaagcctgaagacattaagaaggaagaaaaagaccaggatgagctgaaacccggacctacaaatcggtctagagtcaccaaatcaggtgaggagagccttttaagagctgtggaaggggaaggcctggcacgggtggggagtgggggttccgagggaaggtgaggacagcaagctctggtgacatggctgtttcgctgttcatatggcagtgttaaagaaacaagagtctgttgatgaaatggcttaaaggagtgtccatacaacatcgggaatccagaagtgcctgggactcagggcttatgtgtattgctgaactcagctgcctgagtttgggctttttcagggcctttggctgattgtagtgtgggatttgcaagagtgagttgtccgagtttcttgtaactaacctgatgctattttgcaggtgtgcagtaaagttttcccacattatgttaaagctggaggtagtaaaaacacagagaaaaatgaaacctccaagcatctgttgaagtggttctgtttggacgatgccacttctgttgtc

SEQ ID NO: 90598 - DNA, 1109 bp, Homo sapiens
ccaggaggcggaggtcgcggtgagccgagatcgcgacactgcactccagcctgggtgacagagcgaaactgtctcaaaaaaaaaaaaagcaattgtatttggataggtcaggattaattagaaccaattcagtaactaaaatggaaaactaccatatggggagaggtgacaaatagtgaaaatgattctgattgccaggtaataactttagcaagttgtgtggtcatttgtatgagagagtaagagtgccctttttcatgaaggttgtcggggccaaagtggtaacgaacgcccgcagcccgggggctcgatgctatggattcgtcaccatgtcgacatctgacgaggcgaccaagtgcatcagccatctccacagaactgagctgcatggacgaatgatctccgtagagaaggtgaggcagttctcgtctatggtaactcgcaaatggagtttgcaagtgagaagctctgggccacacatcatttctgtctattatattttaggccaaaaatgagcctgctgggaaaaagctttccgacagaaaagagtgcgaagtgaagaaggaaaaattatcgagtgtcgacagacatcattctgtggagatcaaaattgaaaagtaaagtgaattttcaaacctcctcttggaatccctgggaggagggcacgggcagccaccatgggccttgaaaaacacgcatctgtccccacctgtacccacgcagccttgccagcttcctgctggagtctcagctgatttttgtgttctgctgccactttaatattcagcttttatttatttattttttggagacagggactcactctgttgcctaggctggagtgcagtggcactgcagcctccaccttccgggttcaagtgattctcctacttcagcctcccaagtaactgggactactgcaggcgtacaccacccagccaggctactttttatagagacgcggtttcgccatgttaccaaggctggtctcaaactcctgagttcacatgatttgcccgccttggcctctcaaagtgctaggattacaggtgtgagccaccacgccctgccagtcttcagctttctgtgtaaagctatttaacgaagta

SEQ ID NO: 90599 - DNA, 1995 bp, Homo sapiens
agcgtggggccagacagaaagcttgcggaggaagaggacctatttgacagcgcccatccggaagagggtgatttagatttggccagcgagtcaacagcacacgctcagtcgagcaaggcagacagcctgttagcggtagtgaaaagggagcccgcggagcagccaggcgatggcgagaggacggactgtgagcctgtagggctagagccggcagttgagcagagtagtgcggcctccgagctcgcggaggcctctagcgaggagctcgcagaagcacccacggaagccccaagcccagaagccagagatagcaaagaagacgggaggaagtttgattttgacgcttgtaatgaagtccctccggctcctaaagagtcctcaaccagtgagggcgctgatcagaaaatgaggtttgttttttctcagttttagaccagacgctatctccttttcattggtcatgtaatgacacacataagctgtttttttctgcaattggccagccagactgacgaaattgtagttttgcttctaaagaatgtttcgtttctctttgtgtgtttttaatgggtgattcaattccttttctttttctcaacctaccatggttgtgttcttaaattgttaattgttatcttcagctaaatcgaattgacttttacaaatctgacattgtatttttggggtcagattttccaatataagcttgcagaggtgtctgttaaaattttatttcagactaattttctggtaggtattcagttttagcacataatcatatttttagttttgttctctttcgtttttttcctgtatgagtaacattaacttttgtctctagctcttttaaggaagaaaaagatataaagccaatcattaaagatgaaaaaggtatgatttaatttaacgtggtagggagccaggtatggttcccttattttgggaggaggggcctggagatatacacactttggattcagtaatttgttttgttatgggttaccggaatcaaccacctaatggtttcttgagagactagttttagaagttcgcaagcacctgcattttatgtttctcttgtggttgtcatctatgggatggtgaaaagcacattacaagaaaggaataattctgctcattgaagactgtttcaaggattttagagactgccgtcttggatgagatctgatcatcaaaagacatttcagttcataactgacatgggcatgattattccttgagtaaggaaactcagtttttgctgtccagattttcagccttctgtgtgttggcatgtgtgtgtgcgttaaattcttaagtcagcagttgggattgggcgtcgttagggtttttaaagagggctgcggtcttaagaatggttgtgcttcctgttaggccttggggtgatgcctaagaatctccctctcgtgccaggtcgggtcggcagcggttctggtcggaacctgtgggtcagcgggctgtcctccacaacacgcgctacggatctcaagaaccttttcagcaagtatgggaaggtatgccttcccttgcctcataccatccactgtgattcagagttaaaaaggaagctctgctgggcacggtggttcacgtctataatcccagcagtttgggaggctgaggcaggaggattgcttgagcccaggagttcaagaccagcctgggcaacatagcaagatgttgtgtttactaaaaaatggaacgacagcagcgaagctcgcccagtcttgtgcagtgcaccttgtttcctgactcacagtaactagggtgcggagcagggcaggtggttggtcatatcacaacagtgctcagaacagctgtataaacagcttctctctcaatgttcttggggttctttctaactggtctcaaagagactggtggtcttttgtcttgtgcaaaacttaaagcttacatgatgagatttttcccttaagaataatttgggaggccgaggcgggcgtatcacctaaa

SEQ ID NO: 90600 - DNA, 1026 bp, Homo sapiens
aaaaaaaaaaaaaaagaaaacaaattgagacaaaattacgtgtgacaggagaggggagacttatagtttatcttgtaatgtgttctgttctaagattgaaatctattctgcataaactaattatgaggtagaacttgagtgttatctgattgaacaattattctgtaattaggactgaagatggaggaggaaggcacagaagataatggcctggaagacgattccagagacgggcaggtaagtgatgtcagggtagagatgacaagcagcagctccctgtcctggtccaggtggtcgttaacgattcttcttcctctttacaggaggacatggaagcaagtctggagaacctgcagaatatgggcatgatggacatgagtgtgctagacgaaactgaagtggcgaatagcagtgctccagattttggggaggatggcacggacggccttctcgattccttttgtgatagtaaagaatacgtggctgcacagctgagacagctcccggctcagcccccagagcatgctgtaggtaacttggagacacggcaggatgtgcccatagccccgaggcacctggtgctcgcgtgctgctcgtgtgagggagaacacagctaaaccgccatgaacacacagttctgcttctacaccctggtgttaaaccatgtccatttaaacgctgtgtagctcagggatttactcatagatagcttttctgtagcactggggagtgtttttataattcgaagcatgtggtgagtcataaaatagaaagctctgacataaaagatttttcttttctgagatgaggtctcaactgttacccaggccggtcttgaactcttgggctccagcgatcctcctgactacctgggcttattggcacaggccacagtgcccatttagttttttccttttaaaatacagttttaagaagcaaagatggtttatttatttagagacagggtcttgctctgttgtgcaggctggagtgcagtggggtcatcataattcactgcagcctcag

SEQ ID NO: 90601 - DNA, 1228 bp, Homo sapiens
gtgatccgcccgcctaggcctcccaaagtgctgggattacaggcgtaagccatcgcatccggcccttcttttttctttttaagcattaaaaatgtgcatactcgggcatgcgcagtttctgtgggaaaacatgttccttaactaaaaggcagcacatttgcaacaaataatttttccctcaaacaaggacacttgggataggaagaagggcagagctgaggacaggtctgatcctgttcaactttactaagaacctgttttctgcacttctacttccacagctcagacaagaacagaacctcttctgcttgggggtggggcagggctgtcttgtgcggaatggcctcattcctggattaggaagtgttcctaagtagtgaggtgtctcagatgtttataaagtgaccacttgtgtagtgctcagggcattgttgcttctgtaaagtgcgtatcatttgatctcatgctgtaaatgattctgtcttcagggcgcaaaccagaagaagagggtgtggaagataacgggctggaggaaaactctggggatggacaggtatgtgcagccttgcgagtgagtagcgtggtggatggaccagtggcggtcacatgatggttcggtctggttgtgtcacaggaggatgttgagaccagtctggagaacttgcaggacatcgacatcatggatatcagtgtgttggatgaagcagaaattgataatggaagcgttgcagattgtgtcgaagacgatgatgctgataacctccaggagtccctgtcggatagtagagagctagtcgagggggaaatgaaagagcttccggagcagcttcaggaacatgctgtaggtaaccggcaatgtctctagaatgtgccctgaatgtatcagttccacaattaaaataggtgatcagtttcatattgggaagtaagttgttctgtaatgccagttcagtagaataagggtcagttggttcagatgattctgaaccaatttgttttgttgaaaggtgatgtcttataacatttcatatgtacttgctatccatttgcggcatacagtatgagacattttgaggacaaccattcagactcttcctgttgccggacttgatctgtggtgttatggcctaggtaccttgaaagcattgaactaggaagaggttagaagttggtgttttcctgttaagaagcaattgttgagctgggtgccttgatgcactcatgtaat

SEQ ID NO: 90602 - DNA, 1008 bp, Homo sapiens
tgtcctcaccctcatgctgggagatgctgttccattgagggaggtacctaccccaggggcagcaggtcccacatcctcagcatccaggctgggcgagcagcggtggctgaaggctccacttcagcaggactctagccattgctcctggaagaacagccctcaccctgtgctcagatccacttagaggctgtgcactcattttcatctcttttctgtttgacttagactttttttctttcttttgcatcttaaaacctacatagctaccatattagtagatttcctagtctatgtgcaggtggacatttacatacaacttttttttcagtttagctgcaattatactataatagtgttttgatttctgccctgggtttaaaattttgttgtgaattattttcatagctgttcacttttcattgtacagatgtaccattatgttacgttattgttggtgtgatgaactgtattttctccatttattttacagatagaggacaaagaaactataaacaatttagatacttcatcatctgacttcactatattacaggtaaactgttgtatgtctcagtacttttagaatgaaaggtcagaccacaatttctggaatccatttcagacaccatatgccagttccagctaataatcaccacaagggttgtttcctttgtcaggatcgttaatgggtgtttgctttctgctttcctccaaatataatgtacgcattgccagggacttaactctaggcttcgacgagtggcctccaagcgctgtggcttaccagcagtcattagagtcatgttttgtggcattcttaatttcattgcttgtggcaggggaaggcagcctgtctcatctaccctgggtggcatcccctgcagaaagatgatttgatgagacagcaagagggcatggctacctgggaaagatgagtagggcccagatggggattgagggttgacagagccctgttggggaaggtggggtctcaggggttctggtctt

SEQ ID NO: 90603 - DNA, 1239 bp, Homo sapiens
cctgagtggacagggcttcctgggaagagtctgaatgacttctagaactggcctggtgggaacactgattggaagaggagatgaaggagggagggtatttacaaagtttttcatgctggcaccaccatgccaagtaagagcaggagtcataccacctgggcccatattccctcagtctttcgaatatcagaaagttgtcgtagcttcattgagtgaaaaagtgactgttaatgtgccatgcattcctctagatgctaacagtagaaaaatgaaaacactgctctccttgaatttgagagttcaatctagagggtcaggcgtgcttatgatgagtgcctcaccatgaagtgagaccagttccaggctcctgcaggggagactgaatggagggtgggctgagtgaagtggatgccagtcttatggagccattcctagaacaagcaggttctccacctcttgagtttgtgagtttccctccctggatttttaaaattccctctttagttattctgggttttcatttaaataaactgtaggtgtcattcatctggcacagtcttatttacgttttttcttgcaggaaattgaagagccatccctggagccaggtactgttaaatgaaaaacttaccagcgggggtttggaaccattctagttttccaccttctctaatttgaattctttgatttttaaaagttaccttactatagtatacattgttctaaaggtttacaatccaaaacctaccaggatcatagagattggaaacccagccatatcaccagatctgtgaaagtggctcacttctcattttacaaaatgtattggtgagatgaaagtatctcatgcctttttgaatatcaacagcattgaatcatacatagagaaagagttccagatgcctctcttgagagctaatacctctgcacccacaaaacagatcttgtgatattgggcagtagcttaattttgttgtttttaattgaggcagctcaggtagtggtagggagatacattttaaaacataaatttgagacataactggattccagaagaggaaagagtgtcttcatgagaattccaaacactgttcactttctggactgcaaatatctcagagcacggatggaagagattctggttttcatgttggactgttctgttaaaagaaattcaaagaaatttggaaattgagctgttcagtgaatggtgatacattcagttaagcaacttggact

SEQ ID NO: 90604 - DNA, 1101 bp, Homo sapiens
tggagtgcagtggcgcgatctcagctcactgcaacctctgactcccgggttctagagattctcctgcctcagcctcctgagtagctgggattataagcgcccgccaccacacccagctgattttttgtatttttagtagacatggggtttcaccatgttggccaggctggtctcgaactcttgacctcgtgattcgcccacctcagcctcccaaagtgctgggattacaggcgtgagccaccacacccggcccgcaattgctaactttcttaggaaacctcacattgtcccaatagccccactcagtattgtgacgggccctgtggtagtgctgctgggcctggtgttgcactggaggctcttggtgaggatagtggtcaggcccacagccccatttggcttttagtgctgccactgcctcaggaaaaatgggaaccatgtctcttttggaaaggttgtctctaagactcaagatcttgtgggtatttgggtttttactagaattttcttttgaaataggtcgcagcagttgtggtagaaatttctgggttagtggactctcttctacaaccagagctacagatttgaagaatcttttcagcaaatatgggaaggtaagtgccagagcttttctggagaagatactttgaaaccagcgttgtgtggcctttacatggaggtcctctcccctcagtgagttctttgagagataccaaggagcttacacttgctaatggctggggagggtctgcccgtccacaggtagaggtgagagtggtgtggaagcttccagagcccacatcaccactgtatttccctcccttctctgcgagcttgcccccttccctgtgatggctcgtggatccatttctgtgtcctcaggacgtcgcactcaggctgggctgccagggttggctggtggggtgctggtcagcatgtctgggagacagcagtgttcttagaacagtgttcgtgatgctggaactcagaactcagaacagggaccctggagtctgatgataggggtcctcaccacgggtgtcttgggtccattgactgaacctcacctcagcagctgggggctctcaaagttgctgcctc

SEQ ID NO: 90605 - DNA, 1303 bp, Homo sapiens
cagtagagatggggtttcaccatattggccaggctggtcttgaactcctgaccttgtgatccgcctgcctcggcctcccaaagtgctcggattacaggcgtgagccaccatgcctggccggggcagggtgttttaaacagaatctcactctgttgcccaggctggtgtgcagtggcaagatctcttttcattgaacctccacctccctggctcaaccaattctcatgcctcagcctcccgatttgcttggattatagccatgcccatttgtggttttagtagagatggggtttcaccatgttggccaggctggtctcgaactcccggtctcatgtgatccgcccgcctcatccccccaaagtgctgggaatacaggcatgagccaccacgcccagccaacatgtctgttttttatagatctacaaaccttaagagggatgataaatgtgacagaaaagatgatgctaagaagggtgacgacggaagtggagaaaagagtaaggaccaagatgatcagaaacctggcccctcagagcgatctcgagccacaaagtcaggtgggcagctcatgagcccaggagattctgtcttgtttctgtgcctagtggagtttgttagtttgctgtgattagctggcaacggaaactggattcatgttgcagagggtttttctcatctgggtattcttggttttccacttacactttccccgtcttttctgtaggaagtcgagggaccgaacggactgtagtaatggataaatccaaaggggtgcctgtgattagtgtaaaaacgtccgggtccaaagagagagtgagtattaattttctaactagggtattttgctcttcttttcagtttgtatttctgtgtgcgtcttagggaattactaagcttcatttgaaaaaagcttttgtcggccgtttcgaaaatgtagaaatctcaaactattttttttgagacaggttctcactctgttgcccagactagagtgcagtggtgcgatcttggctcactccaacctccgcctcccaggctcaagcgattctcctgcctcagcctcccgagtagctgggattacaggcgcacaccattatctttttagtagaaacaaggtttcaccatgttggccaggctggcctcgaactcctcacctcaggtgatccgcccgcctcggcctcccaaaagtgctgggattacaggcatgagccactgcgcccagcctcaaattattttaagaaatgcagaaagctttcctttatccttacttttgctctgataactgttaacttattttctaaag

SEQ ID NO: 90606 - DNA, 1032 bp, Homo sapiens
gtctcgatctcttgacctcatgatccacccacctcagcctcccaaagtgctggcattacagatgtgagccaccgcgcccggcctgttgcttatttttgactggctgtttcctgaaatcacttgtcaagctccaggaaatgttggagaaaggaggcccagttctgatcacacacacacagcctgggcctcactcctgagatcttcctgggctgctcctgtgggcccgagaagccttcttcccgctggagtgtacggttctgcagaccacgtagtggacgcacagccctggagtctgtgcgacccagcgtcttacttaaagtcagccctgggacctggctgggggtgtctaggtccccttctgcagctctactgttgtgcagcagggtgcgtgaacgcagtgaacgcgaacaacgcatgcaggcgcagtgggagcgcgaggagcgtgagcggctggagattgcccgagagaggctggccttccagcgccagcggctggagcgggagcgcatggagcgggaacggctggagcgcgaacgcatgcacgtggagcacgagcgcaggcgcgagcaggagcgcatccaccgtgagcgcgaggagctgaggcgccagcaggaactgcgctatgagcaggagcggcggcccgcggtgcggcggccctacgacctggaccggtaagcagatccatgctgcccttagcacgtggcgttcagaatcgtgttagggacctcacagtccagttagcttgagatttttttttttttttttgagacggagtcttgctttgtcgcggaggctggagtgcagtgacccgatcttggctcactgcaagctctgcctcccgggttcacaccattctcctgcctcagcctcccgagtagctgggactacaggcgtttgccacctctcccggctaatttttttgtattttcagtagagacggggtttcactgtgttagccaggatggtctctatctcctgacctcgtgatccacctgcctcggcctcccaaaatgctgggattacagctgtgag

SEQ ID NO: 90607 - DNA, 1731 bp, Homo sapiens
cacgtgagggggccgcagcgctcgaacaatcccgccctctcgttgccgtgacaaccgccttgtaggcacactcttcttaaatccgggcccttggtcccccgcgcgggcgcgggtggatctctcgggctctgacttgttttcgggtcaccttcaggcttcagccaggcacctgacgcctctttcccctcacggtgccagggccgggccgaactacatttcccaggaggctccgcggccaggtgcaaacagcgccgtgctgactacatttcccagacagccttgcggcggcccgggccttaaagcgtccatttcccagcggccctccgctgcgagaccgcagcccttctctggagtctcagagccgcaagacaccacgactcccagaggaccttgcgtcgggcaagaaagactacaccttccagaggcctctgcggcgccgcgacaggaagcggcgggcgagccgagtgtccttgcgcgtggatccgagcgaccatggtggcccgggtgtggtcgctgatgaggtgcgtgggggcgccggaggggacccgagtccccgaaaaagtccatttttgtgggcatccctgtctccagtctggtcccgatctgctcttcgcttcccttagagtcacttccccttcgttccccgcctatgggccagatagggaaactgaggcttcagaggggcggggcttcccgaggtcgccaatcccctccctcctgcttcccagcgagcccttggcgttcagttcgcggtgtcagcctccgcctccgagcctcagttgtcttctctgtgaggtgggaatgccggtgaatcctgccgctggcgtggatgagaagtgaatgcgtgctcggagctgcgagtgacagcgggcaggaggcgcccagggacacttggtttctccagggctggaaggcttctagaaggtcaagatcttacgtcttcactgcccctgctcactgtgggactttgagtgacccactctccccctctgggtttcagttcatcagttcaagtggcgtccagccgccctgccttgcacgttgtaaaacgagtgctgtatataataggggtctgggtcgacggtgctgcactacagagtgtcaccctgtggacggtgagccctcaggagggtctcactctccccgtgggccttggcccctgagggtggctgtcagtgtccgctgagcttctgctcctcccgtccctgcccgcaggttcctcatcaagggaagtgtggctgggggcgccgtctacctggtgtacgaccaggagctgctggggcccagcgacaagagccaggcagccctacagaaggctggggaggtggtcccccccgccatgtaccagttcagccagtacgtgtgtcagcagacaggcctgcagataccccaggtactacgggccgggaacgaggccagggtttggcgggtggtcagctctgggaggtccctccagccctgcacgatgttgtcctccatattgatgctgacctgattctccggcctgtcctcctccctccgcctctggggatgggctgctgagccttttcaccagttctttctgcccatctctttttcccagctcccagcccctccaaagatttactttcccatccgtgactcctggaatgcaggtaaggcacccagtttctttgcttggagggagacaccccagtctagcccctctccccacttcctggccattcctttctgtccatcctccttcctgcc

SEQ ID NO: 90608 - DNA, 1029 bp, Homo sapiens
gactccaggtgcgtcctgccagtgttgcggagactgggacttagggaggatgggagctgctccgggcgcggcgaaaagcgctaggcgttaataccttggttctcacagctacccacagaggggaggaagtagccagggaaatcgcggcagcgcgagagaagctgcttaactagaatgcagggatccccctaccctgacggccgcccctttcccccctagcgtctgaccaaacacaccaagttcgtgcgggacatgattcgggaggtgtgtggctttgccccgtacgagcggcgcgccatggagttactgaaggtctccaaggacaaacgggccctcaaatttatcaagaaaagggtaggtgggcgctgccggccgaggggcggggtgggatgggagtcagggccgggctgacggcggcctcgtccctggcaggtggggacgcacatccgcgccaagaggaagcgggaggagctgagcaacgtactggccgccatgaggaaagctgctgccaagaaagactgagcccctcccctgccctctccctgaaataaagaacagcttgacagaagccctggctctcctgctgtccgtgggtgggtgtgggtgtgtcgggggcccgcagtcccctgtctggtgcccgctctgagccacaccctctccgggtgctgcctggtcgtgaatcaaaagccgtggcccgcccacccttcccggggcagcaggtgaggaagccgccgtactgcaaatgactttaatcattaaatagcttctatgccacactctgattaagccgactgaggtccctgggatctgggtcactggaccgagctgctcgctcggtggctccactgccaggtccgggcgcgctccccacagcgctcagttctggcccagacagggcctgacatccgccgcctgcagtcccggggtggccgtcaccgttccacggccagcgcctctgcctgctcgtccgggaaggcgatgtcgaagatctcccggtagtgttccacgaagtgcacctccaggccctcg

SEQ ID NO: 90609 - DNA, 1022 bp, Homo sapiens
tcacaggaaccctgttcaggccccagacactgcctgacctctggatgtgaggccgtgggtgtgtggctcatccagagccctgagactgctcccaccgcacggccagacttcctagataagggggtggggaggccctggctcctgctctcaggctgttggagccaaggccagtggttttgccttgagcctgtttccccgtgggagacggggaccctggtgggttttgggacttactgcttagaacccggcatcactgtgtatcgccggtccccaggaagccctttcgttcctggaggttagcacacctgctgccctcccacaggcccaggcagggctgaccctgactctgcccccaggccaagcgcgcaggggtgacgtgcatcgtcctgccagccgagaacaagaaggacttctacgacctggcagccttcatcaccgagggcctggaggtgcacttcgtggaacactaccgggagatcttcgacatcgccttcccggacgagcaggcagaggcgctggccgtggaacggtgacggccaccccgggactgcaggcggcggatgtcaggccctgtctgggccagaactgagcgctgtggggagcgcgcccggacctggcagtggagccaccgagcgagcagctcggtccagtgacccagatcccagggacctcagtcggcttaatcagagtgtggcatagaagctatttaatgattaaagtcatttgcagtacggcggcttcctcacctgctgccccgggaagggtgggcgggccacggcttttgattcacgaccaggcagcacccggagagggtgtggctcagagcgggcaccagacaggggactgcgggcccccgacacacccacacccacccacggacagcaggagagccagggcttctgtcaagctgttctttatttcagggagagggcaggggaggggctcagtctttcttggcagcagctttcctcatggcggccagtacgttgctcagctcctcccgcttcctcttggcgcggatg

SEQ ID NO: 90610 - DNA, 1035 bp, Homo sapiens
caacgctggcctctacgtttgctgcgttgcgggttcctggctctgtacgccccacagggcagcccccagcagctgccagccacagaggacacgcccagggctacaaggcccagctgccgctgccctgcagacagacacaagcccttctccagcccctcccgcaccatcccctttgccctctcgcctcctttgtgcgtggtggccccaaggcccatctggatgagcttgtccttacctgtaagcctatcaaagtggcacccaaatccataaggcccatggtgtgctgccacccccatgtgtcacagccttcccctccctcagcccagaccccctgggctcccagcacaccaccccccgccagaggccgttcagagccacctgaggcccactgcacaggtgtacaaggtgggacctgcttgttctcgggtagaaatgggaatggctttggggtcttctcccgccaccacgctcacccattgcggtccaggccagccccatgaccacgccgggcggtgtcacgtcatacatgcgctccacggtgaacacgggcttccccacgaagtcctgcaggttctcgggcgtcacctccacggactcggcctcgccgctgacaatcttgtaggccgatttccgtaacacctgggcggtcagggcaacacaatgggcacgggaaggtggggtgacaggtgcggggtggtggggtgacgggcacagaaaggtgtgacgggcgcggggtggtggggtgatgggcgcaggaaagtgggatgatgggcatggaaaggtggggtgatcagcgtgggatggtgaggtgggcggcaggtgccaggagggcgggctggccgctcaccttctccacttgcttctgcaggttgcggacaccgctctcgcggcagtactgcttgatgagcagcgtcagcacgtccgatgacagcttggccttgctctcatccaagccacacagggcgcgagcctggggcaccaggtagcgctgcaagggcaaccgtcagggttgggtctggagggaccttgcccacc

SEQ ID NO: 90611 - DNA, 1050 bp, Homo sapiens
gtgtccaggccctggtttcaccatcagggacctcgttcccaggccagggtctgggggccatgggagaggcattggctcccaggttctagactgagctggtgggcaaggtccctccagacccaaccctgacggttgcccttgcagcgctacctggtgccccaggctcgcgccctgtgtggcttggatgagagcaaggccaagctgtcatcggacgtgctgacgctgctcatcaagcagtactgccgcgagagcggtgtccgcaacctgcagaagcaagtggagaaggtgagcggccagcccgccctcctggcacctgccgcccacctcaccatcccacgctgatcaccccacctttccatgcccatcatcccactttcctgcgcccatcaccccaccaccccgcgcccgtcacacctttctgtgcccgtcaccccaccaccccgcacctgtcaccccaccttcccgtgcccattgtgttgccctgaccgcccaggtgttacggaaatcggcctacaagattgtcagcggcgaggccgagtccgtggaggtgacgcccgagaacctgcaggacttcgtggggaagcccgtgttcaccgtggagcgcatgtatgacgtgacaccgcccggcgtggtcatggggctggcctggaccgcaatgggtgagcgtggtggcgggagaagaccccaaagccattcccatttctacccgagaacaagcaggtcccaccttgtacacctgtgcagtgggcctcaggtggctctgaacggcctctggcggggggtggtgtgctgggagcccagggggtctgggctgagggaggggaaggctgtgacacatgggggtggcagcacaccatgggccttatggatttgggtgccactttgataggcttacaggtaaggacaagctcatccagatgggccttggggccaccacgcacaaaggaggcgagagggcaaaggggatggtgcgggaggggctggagaagggcttgtgtctgtctgcagggcagcggcagctgggccttgtagccctgggcgtgtcctctg

SEQ ID NO: 90612 - DNA, 1317 bp, Homo sapiens
atcttgtggggctccaggtggcctctcccctgtggccctggagggtgcatggtgtcgttgtggccgagccaggctaccaagtgacctctgaccccgctgtgcacccacaggcggacctacgtgggcgccatgcccgggaagatcatccagtgtttgaagaagaccaagacggagaaccccctgatcctcatcgacgaggtgcgtgcggagaggcccggagaccccctaacccggcaatgccgtgtgcaagatgaagccgagccttccgggtcctaggatccccgagccaactcaggggccatcgccgtgatgctggccctgatggcacggacgggtccctcccacccacagccacgcccagcaggctgcccgtccaaggcagggtgtgggtgccgctctcactcggggtctccccagccctgaccctggggtctccccactgggcgggctggccaggggcacggcgaggggcaccacctgctgtctgctgccccaggtggacaagatcggccgaggctaccagggggacccgtcgtcggcactgctggagctgctggacccagagcagaatgccaacttcctggaccactacctggacgtgcccgtggacttgtccaaggtggggggcctgtctggggcctgggcttgctggggagggtaagcggccagtcccccagcaccttgccgccgcccccaggtgctgttcatctgcacggccaacgtcacggacaccatccccgagccgctgcgagaccgtatggagatgatcaacgtgtcgggctacgtggcccaggagaagctggccattgcggaggtaagcccagcccctccccactgctgtccccttcccagagcagggggcgccccccagagcctgcagaggccgtgcctctgggagctcctgggcccgggagagacaggtgggacctgcggccgaggagcagatggggccgtgagagacacaccagacgcttgcgagcagctgcaggtggcgcgagtgggcgcagggtttagggcctgggactgtccaaaacaccgcccaccaccgtcaggccacacactctgtctcccggggcctccaggctgccccatggtggggcccccacctggcccagagtgtagggaaggtttctggcagccggaagcagtggggcctgtggctcccacccagaatgaggcttggaggagaagtggtttcagtgaggagcatgcaggggcccatatttctcatgtgtttttttttctgcaaaggtgctgagtgcatttctcccctaggagccctttgacagccagtggtgggcactggtccctgccctt

SEQ ID NO: 90613 - DNA, 1021 bp, Homo sapiens
gagaccgtggaaaggggagaggcagagggcagaggcagaggcagaagcattttttgtatttttagtagagacagggtttcaccgtgctagccaggatggtctcgatctcctgaccttgtgatccgcctgcctcggcctcccaaaattctgggattacaggcgtgagccactgtgcctggcctgtaaattgttttatagagatggggtcttgctgagttgctcaggctggtcttgaactcctgggctcaagtgatcctcccacctgggcctcccaaagagctgggattacaggcgtgagccaccgcgctcagccccacacatgggtttcaagccccttgcaaccacccagccaagtccagcagagagacaggcagctcgtgagctccactcagcatctctccatctgtcccctggcagtgtcacccgcaactacctagactggctcacgtccatcccttggggcaagtacagcaacgagaacctggacctggcgcgggcacaggcagtgctggaggaagaccactacggcatggaggacgtcaagaaacgcatcctggtgagcccagtgtctggcctgttgtggatttgcatgtgggtgcccgggcccaggactcttgtgtgctgtgggttgagatttcaaaggagccccctggtgaattcgtaggcctgggggtgctggtcggggggatcccggcggaggtagcatcctgccctgcccccgagggctcgaggatttcccaggtggactgaagtcatgcctgacgggccgggcatggtggggctgcttgtagtcccagttactcaggaggctgaggcgggaggatcacttgagcccaggaagttgaggctgtggtgagctgtgatcatgccactgcacatcaggttgggtgacagagtgagacccccatctctacaaaaaattttaaaattgcggctgggcgctgtggctcatgcctgtaatcccagcactttgggaggctgaggcatgcagatcacctgaggtcgggagttgaagaccagc

SEQ ID NO: 90614 - DNA, 1077 bp, Homo sapiens
acaccggctaatttttgtattttagtagagacagggtttcaccatgttggccaggctggtcttgaactcctggcctcaagtgatccgcccgcttcagcctcccaaagtgctaggattacaggcgtgagccaccgcgcctggccccatctctacaaaaaattttaaaattagagccaggtgtggcaggtgcctgtggtcccagttactcaggaggctaaggcaggaggatcgcttgagcccaggaggtggaggctacggtgagctatgatggtgcctttgcactccagcctgggtaacacaggtagaccctgtctcaaaaacaaaagaagatggaaggaaccaaaggcttcgtgctctgggtttcgtttcttttctctctgagtcctgggggagcagagggtcccccttcgtctggggacgcacccacccacccagcttcccggagccagggcctgatggcagcacctcaccccacaggtggaggagaagatcaagcagacccaccgtaagtacctgctgcaggagcagctaaagatcatcaagaaggagctgggcctggagaaggacgacaaggatgccatcgaggagaagttccgggagcgcctgaaggagctcgtggtccccaagcacgtcatggatgttgtggacgaggagctgagcaagctgggcctgctggacaaccactcctcggagttcaagtgagtgccaggcccggggcggcccagccctcaggtgacccctcctcagcccccatcttaggcaggccaggggacccagcggggagccccgtggcaccttcttggtgtggcaggtgcgggctgggaggcatccagcgagtatcagccctgttctgggcaggacacatcatcaccatctccattctacaaggaaatcgaggctcggggctgttgagctggtggccagggcctgtgaattggcaggtggtgccacggatttgagcccagggacgcctggctctaagccagggctgcttttttttttttttttttttgaaatggagtctcgctcagttgtccagactggagtgcagtggcacaatcttggctcactgcaact

SEQ ID NO: 90615 - DNA, 1049 bp, Homo sapiens
agccaagattgtgccactgcactccagtctggacaactgagcgagactccatttcaaaaaaaaaaaaaaaaaaaagcagccctggcttagagccaggcgtccctgggctcaaatccgtggcaccacctgccaattcacaggccctggccaccagctcaacagccccgagcctcgatttccttgtagaatggagatggtgatgatgtgtcctgcccagaacagggctgatactcgctggatgcctcccagcccgcacctgccacaccaagaaggtgccacggggctccccgctgggtcccctggcctgcctaagatgggggctgaggaggggtcacctgagggctgggccgccccgggcctggcactcacttgaactccgaggagtggttgtccagcaggcccagcttgctcagctcctcgtccacaacatccatgacgtgcttggggaccacgagctccttcaggcgctcccggaacttctcctcgatggcatccttgtcgtccttctccaggcccagctccttcttgatgatctttagctgctcctgcagcaggtacttacggtgggtctgcttgatcttctcctccacctgtggggtgaggtgctgccatcaggccctggctccgggaagctgggtgggtgggtgcgtccccagacgaagggggaccctctgctcccccaggactcagagagaaaagaaacgaaacccagagcacgaagcctttggttccttccatcttcttttgtttttgagacagggtctacctgtgttacccaggctggagtgcaaaggcaccatcatagctcaccgtagcctccacctcctgggctcaagcgatcctcctgccttagcctcctgagtaactgggaccacaggcacctgccacacctggctctaattttaaaattttttgtagagatggggccaggcgcggtggctcacgcctgtaatcctagcactttgggaggctgaagcgggcggatcacttgaggccaggagttcaagaccagcctggccaacatggtgaaaccctgtctctactaaaat

SEQ ID NO: 90616 - DNA, 1026 bp, Homo sapiens
ctgtgcgggcagctggccaggcgggggcatctctgcagctctttctgcagctgggtgggtagggggcttcctcagcgtcctcctgggaggaaaccttgcctgccccaaggagtggcctgtgtggaggagcccgttgcccactggggcatggggcaggtgggaggcccggggccgactcagcaggcccagtttctttgtccccttctgctgaggccggaagctgttggtggcattggctgggggagtggggagcagactgctgaggtgaggtcactgcacggctcccgtggtggctgcacgtgaggatgctgcatgcctttccagcccaggacgggtgggccctgaactctggagaacaagcagcagagctggctcccagcgagcacccctagaccgtgcccatagctacaggggacagggaccctgaggaccgggtccccgtttgggggctgcactgcagcagagcgtgaggccctggccaccgaggcagctccctttgtcccccagggagtcagtgctgcagatgatgcaggctggccagcgggtggtggacaaccccatctacctgagcgacatgggcgccgcgctcaccggggccgagtcccatgagctgcaggacgtcctggaagagaccaatgtgagtgctcgtcacctccacagccccccacgcctggctgcaccccacctccactatgctccgcccacgcccggctgcccccgttcctcctcagctcccccatgcctggctgcccttgtccctccaccgtgcaccatccacacccagctgtgtgtccctggctctgtttttgagatgatttcccgctgcgtgtcttggtccacatccatccgcctttcggtggcttcatagccttcggttgggagtcaccgttgcgggttcagtgggatcctctgggccgtgtacccggggcgttgccagtcttttgctgttgtgagcagcactcctgagcgcgtccccatgcacgcagctggagggcctgtgaagtatccgtaggatgcgtttccagc

SEQ ID NO: 90617 - DNA, 1049 bp, Homo sapiens
ggacagtctttgcgatggtgtccttgaaatcgagacctgaacaacaggaaggagctgctatgagctgagtccagggcacagagtcttggagaccagcctgtgcccggccaggctgacaccgttttcgacaggaggccctggggcttgtcactgcagcttatccacgatacttaggatggggacagtgatgcattggcgtgggatgcagggaatgcctgaatctggctggagtctaaggggtggaggggacactggttgggaggccccgagaaagcggctcacgtctccagcttgaggaccctgtagccaccctgtggctccagaggtctgggctcagcgggacccttggaccacctgtgccaccagggaggcctcagccgggtccagctcccagcctcagcggctgattcacacctgccttgctcccgtgtcagagtccatatcagcagacagctggaggtggagcccgaggagccggaggcggagaacaagcacaagccccgcaggaagtcaaagcggggcaagaaggaggcggaggacgagctgagcgccaggcacccggcggagctggcgatggagcccacccctgagctcccggctgaggtgctcatggtggaggtagagaacgttgtccacgaggacttccaggtcacggaggaggtgaaagtgagtccgtgcgtcacgcagggcggccacagctgcctcccccacgggctcccttgagccgttcctgcggcctctccgaagagtcatctcccaccctgagccccttaggaagggtctggcctgtctggaactcaattctaatggaacatagagggtgcttttcctcccagaggtcttcggaagactctgggatgggagaggcacaggaaattcgctggagcctgtagctgctcaggaaggagacagggttggaacccaggtccagccccagcccgtgtcccctgtgccaaagcctccagcggttaccaagacaccttccagccctggcttcttcccaccaagcctgggaggttggtaccagtggttgcaggacaggaaacagc

SEQ ID NO: 90618 - DNA, 1050 bp, Homo sapiens
ctgaggcagagaattgcttgatcccgggaggcggaggttgcagtgagctgagatcatgccactgcactccagcctgggtgacagagcgagactccgtctcagaaaaaaaaaaaaaaaagaaaagctaccctgtgctgcgtttggtggctcacgcctataatcccggcattttgggaggctgaggtgggtggatcacctgaggtcaggagttcgagaccaacctggccaatatggtgaaaccccatctctactaaaaataaaaaaattagccaggtgtggtggtgcatgcctgtaatcccagctactcaggaggctgaggcaggagaatcccttgaactcagtgggggtggaggttgcagtgagctgagatcacgccattacattccagccagggcaacagaatgagactctgtctcaaaaaaaaaatctactctgcatttcactttggggtcattgtcatgctaggttaaaaataagaagttggttgagctgctgagaaggaaagttcgtctcgcccagccttatgtcggcgtctttctaaagagagatgacaggtaagtgtgatttttccttcattcccttgttgacggtgccctagagtccagctcaccacaagtcctactctgtactttgcacctttgacccctgaccccgaggaaaccagggaagacctccagaataaaggccagaagccacgcaggctaccttttcagcctgggctgagaactcagcttgtagtactaaacttcatgcattgttaagatacgggggaaattaacttcagggactcttagtgatgaaatgctccatgaggctacctgaaagtcgagctagctgctcggagatgtggctccatgtagaaatgagttccatgggccgggcgtggggtcgcacacctgtaatcccagcactttgggaggctgaggcatgtggatcacctgaggtcaggagttccaaagcagtctggctgacatgatgaaacctcgtctttactaaaaatacaaaacattagccaggcgtggtggcaggtacctgtaatcccagctactc

SEQ ID NO: 90619 - DNA, 1025 bp, Homo sapiens
tgcacaggctgctcatgagttcctaaacgttgcgtttgcaacactaccagtgttttgtacgggcgctggcgcctgctcacagccttccacgtgaccggaaaaggccttcagcgcataaagtgggagaccggaagaggcggagacgatccgatgctcgaactccgccccctcttctccgcgtaggcccagctccctgaagcggctgtttcgagccacgcgcccatcgggtaccgaggcacgcgccgggcgtcacgtgcgtttcgcggcgagcggaaatgacgcgagttgtgtgagccgccagtatggccgggctatggcggcgagcactggctacgtgcgactgtggggagcggcgcggtgctgggtgctgcggcggccgatgctggccgccgccggggggcgggttcccactgcagcaggagcgtggttgctccgaggccagcggacctgcgacgcctctcctccttgggcactgtggggccgaggcccggcaattgggggccaatggcgggggttttgggaagcgagcagccgcggcggaggcgcattctcggggggcgaggacgcctccgagggcggcgcggaggaaggagccggcggcgcggggggcagcgcgggcgccggggaaggcccggtcataacggcgctcacgcccatgacgatccccgatgtgtttccgcacctgccgctcatcgccatcacccgcaacccggtgttcccgcgctttatcaagattatcgaggtaatgggagtccccgcctcggcctcaggtttcccacctgtgcaagcagcgggctgaaccgtgggatcacttgagcgcccttgtgtttcgcaactttttcagacatgaagtttctcgaagggtgcagttcgaatccttgtctgctcaccactagcttgggaaccttgagccaaagtcctctccctttcggatttcttaggatccgttagatgagaggagttgaacccgatgagcctaggattatccactttagaacgccggtcatagaaatccggggccggga

SEQ ID NO: 90620 - DNA, 1707 bp, Homo sapiens
tgcaagcgcttcggggcggatgtgacatgtggagagatggccgtctgcaccaacctgctgcagggccagatgtccgagtgggccctactcaaacgccaccagtgtgaggacatctttggcgtccaggtcagtgcccaccccgagggagggagagtggaggggccctcggccgtcctgtctcagagccaggttccaggtctgccctggttgcctccctgaccccctggcctcagctgtggagtgggggtgatgccctgatccacctctgggggctgatggccgtggccggggaccggtgcctcgcagacagaccttggctccttccggggaggccccgagagaggaggccactggctcagggccccccagtggggagggaacggccaagtggggacagttcggactctcccctcaccctcctgttctgccactacccacctacagctggagggcgccttccccgacaccatgaccaagtgtgccgagctgctgagccgcaccgtggaggtggactttgtggacatcaacgtcggctgccccatcgacctcgtgtacaagaaggtagcggccctggacgtgtgcctcggtttccccatctgggcagggaggcactgacccagccggcgatgtctcggtggagggtcaggggtttgggctcaagtgtggccctggagtccctgcctttcctgcaggtcggcgtctcctggtgggggcctccgggcagcaggggtgaggggtcttgggtcagcccacgtcctgccctccctccacccgcctgtctcttccagggtgggggctgtgccctcatgaatcgctccaccaagttccagcagatcgtccgtggcatgaaccaggtacggccagccacatcctcgcactggctcccaaacaactcccccgggccctgtctcccaccacctcccaccgtctcccaccacctcccaccatctcccaccacctcccaccaccgtcctgtaggtgctggatgtgccgctgactgtgaagatccgcacaggcgtccaggagcgtgtgaacctggcgcaccgcctgctgcccgagctgcgggactggggcgtggcactcgtcacggtgggtcttgggacgcctcgggcattggggcctcgcggtcgaccccgcgtcccttcctaatggctcctctcctcccatccctccctcttcacctccacacctccctctgtctccgcctgtgtctctctctgtctctctcagcctggctctcttggtctcttcctctctgcgtctcactctctgcctcctaccctgcgtggcggcttctcccccagctccacggccgctctcgggagcagcgctacaccaagctagccgactggcagtacatcgaggagtgcgtgcaggccgccagccccatgcccctgttcggtgggtgttccgggaagccacctccctctcccctaccacccttggtcactcacacctctgggctgttcgccttcccacttgggaccccctcgtaccaccctgatgggagccactgggtcagccaaaactcctgaagggctggtgagcagaactccagggtcccacctgcccatgtctccctgagaccccagcctctgtctcctcaggaaatggggacatcttgtcatttgaggatgccaaccgcgccatgcagactggtgtcaccgggatcatgattgcccggtaagtgcccagggatgttagaga

SEQ ID NO: 90621 - DNA, 1023 bp, Homo sapiens
gtttcctcgcaggagtcggctgctaagtgtttcttcggtgatcgctgccgctttctgcacgacgtggggcgctacctggagaccaagccggccgacctgggcccccgctgcgtgctcttcgagaccttcggccggtgcccctacggcgtgacctgccgcttcgctggggcccacctgaggcccgagggacagaacctggtgcaggaggagttggcggcccgcgggacccagcccccgtccatccgcaacggcctggacaaagccctgcagcagcagctgcggaagcgcgaggtccgcttcgagcgagctgagcaggccctgcgccggttcagccagggccccacacccgctgccgctgtccccgagggcacggcagccgagggcgctcccaggcaggaaaactgtggtgcccagcaggtccccgcagggccgggcactagcacccctcccagcagccccgtgcggacctgcgggcccctgacggatgaggacgtggtcaggctgcggccctgtgagaagaagcgggtacgtgttgaggacaacgtcagtagcagatctgtccatctggtgtgcgtctattaaataccagctgtgtccacgttcctgttctagctgcctgggagtcagaggctgtgtgccttgagggagctcctggctgagtctccctctctgtgctctgtcctgggcccagccctcaggaggtggggacagaaagagctggacagggccgggggcggtggctcacgcctgtaatcccagcactttgggaggctgaggcaggcagatcatttgaagtcgggagttcaaaaccagcctagccatcatggtgaaaccctatctctactaaaaatacaaaaattagccgggcctggtggcgggcacctgtaattccagccactcaggaggctgaggcaggagaatcacttgaacccaggaggcggatgttgcagtgagccaagattgtgccaccgcactccagcctgggcaacagagcaagactctatctcaaaaaaaaaaaaaaaa

SEQ ID NO: 90622 - DNA, 1112 bp, Homo sapiens
agtgcctgtctgggaaaaggtcactggacctggaagggtccccagggtcccctgactcccgtctccatctgtcacgtggttcaccatcatcaggcaccaggcgcaaactgcttcccgctgttggccatcccttccccagccacaggtgtccctgcccccaggacagtccagggccaggggcttctgtgagaggcagagggggaccctcaccaaatcttggtggaagagcccaggggctggtcccagaacaggcagtctcacaagcacgcagcacactggagtggacgcctgtgcccacccgagcctggagcatggccaagagccagcttgcaccacccacctgggaggccgaggaggaggtcccctgggcacagggcctctttgggacttcagaggaaatctcccagtcccactctcggagggttaagagaaggcctcctgcagctgtgccgtccacacctctaggtcgccagagccctggcccccagcccccagcaagcctgagcccgggaagaaccagaggccctcccgagagacccagtcacacgtctctgctttaagccttagccagctagtgacgagtacaacgagataacgcccatgtgttttggaacatttatgtaagattgtcatatgaaatgtatttgggaactacattaaacttttaactaaaaccctggcctctgcatgccccaggggcctcaggaagcccctgaccaggaacggcctccacctccccgggcgaggacctccagcagcctggggcctcatgctcccacccagcgtgtcaccagtgctggggtccagccacagccctgttctctccaccaccacccgcactttacccccacccctgctgcaaggccccgccggtctgcccccgcccagagctcccagcctcgggccgctcaccagaatgtagatactgggcccgctggacatgttacctgctatttttattccccatttgccatcttctgattgggggttgatgttttacagatttttttttcaaaggctttatttcagtttctgaggttaggatgcccctgtgcccctcgctccacacctgggcaggtctaaacttccttccaggatggcctccacacaca

SEQ ID NO: 90623 - DNA, 2194 bp, Homo sapiens
atgtctcacacacacagaaagcgcatgcaccttgagtgtcagcccctgcctcccgcagcccaccccgtactcctctctaatccccccttctccaagggaactgccatcctggtgcccacctgtgtggaccaaacacaacctcccacaagctgcatgtggcctctggtcactgatctgcagcaccagcctgtgcagccacctgcagttgtggccttcagtggtccaggcttggggaggaggagccccgccccgggagcaggtgtgccagggctggcctcagggagaagtcttgctctgtgggtgggtcctgggaggatcatgggcttttgcgcggtgatgtcgctttccatctggactgtgttggctcttggagctggctgtttgtgagggggccggtgtgggggccagggctgagtggccttgttggttgtagtgatgcggacccaggggagcctgcgactgatcctcaacaccaagctgtgggcccagatgcagatcgacaaggccagcgagaagagcattcgcatcacagccatggacaccgaggaccagggcgtgaaggtcttcctgatctcggtgagccagccacgcgggtgcatctgggacccctcatcctgccagccctgtgggggttcctgggcacacagatcaggcaggacggtggggaggggaggggggaggggcttcagttgcttcctgggacacaagaagcactatgggacccgccagtcccagccttcaggaatagagatcatggtccttgtcctcttctcaacccagagaagccgctggggtttggctgaggggttgtgatgtgttcagggctaacagccctgtggggcggtcacctctctcctatgtcatggtgtcacagtcgagtccaccaaccctgacctctgggatattcccagccacctgggagtggtggcatcctttcggggagaggccggcaggcccagggccaatggcctccccacaaggccttgtggcagtgtcacctctgaaccttgggacttggcacttgtgttctgcagaaggcaggagggggtaggactggggtccgggggtctcataccctcctcccttcccaggccagctccaaggacacaggtcagttgtatgcagccctgcaccaccgcatcctggccctgcgcagccgcgtggagcaggagcaggaggccaagatgcccgcgcctgagcctggggcagccccatccaacgaggaggacgacagcgacgatgacgatgtcctggctccttcaggggccaccgcagctggtgagtcgggtggtccctaccctgggggggatagaaagagctgcccgccatccttgatccagtgctgatctcctggcgggggtggccagacctgggaagtgcgggctccatcctgatgcggggctgctgcttccctgcaggtgctggtgacgaaggggacgggcagacgaccgggagcacatagcggccgggagcccggctgcacaccaggctgctgctttgtccgtctatccacccgcccacccgcccccaccccaccggcagcgtccaggtgcggggccgggaaccacacaccccactgggccggccacagtctggacccgcacgtcctgttcaaaagcagactcgggaactgcctgaatgtggtttgggacacgagacctcatcatattgatgagcgaacaaacaagaacatttcctccctcccctcctttgaattgaaatggcacattaagacttgtcacggcttctcactgggactggagacctcgttccttcaccccgcgtgtcgccagcctctgggtccagccagagcccctggcttctccgccacccacacccttcccaccctgctgtggggccctgcctttgtggggagcagccagccctctgcccctgcccagggctccccaactataggcctgggacccccgcccagcttggggggctgctcgtacgagtgtagacactgggcccattggacgtgctgttaactactatcttcatttcccacttcccctctctgattgggggtgtatattttacatctttttttctttttattttcgaaggctttgttttggtttcttaggttaagatgctctcgagcgttgagcaggcacagctctgtcgaggtccctgtcccccacctgtggttctggcctctgaggttgggggactacttgtttcccacccc

SEQ ID NO: 90624 - DNA, 1069 bp, Homo sapiens
ctctgcttccttgttggtcaaacagggtccctaacatccccctcccaggcctcgtgaggattaaagcagatcgtgcatttgacagactcagcatagcagctggtaggaaagaggccctcaagaaattctgcttctatcatgttcatagtaaaccccccaaaacgtcagctttgtaacgttgtgttattggtatgaagcattgaccgagaggccagcttaggcgtggttttataacaaggcgtggttttgtaacaaggtggaaaaggctccttggagcttcatgagctctctttccatcctaactgttaaagcaaaaggtgatggagttgattatagccctgccccccagcacatgcacgcgcacacacacaggcgggtacaggagagggttcatggctccgagcagctccatgcagctcagggggtctgcagacactgagctgtggaactccaggcacccccccacccccgattactgagcgctccgtctcattcccagctgataaatgagagcgtggacgaagccgacatggagaatgctggacaccccagcgcagacacgccaaccgcaacgaactatttcctccagtatatcagttccaggtgtgtgtctcggtgtcagcggccagcctggcatggcgatgcaggtggccgcgagggcttctgccagagaggggtctgtggtccccgtgcccgactcaggcccagaatccaggttgctctcaggcccctctctctcattccccactctgggcacaaccttgggtgggccagggtggtgggccttgtcctgggattcactggacgcctgagacaggaccagagttctgtggggttgtccaggggcccatggaggctacagcccagcccttggagtgtgccctctgtcttgtggacctcatgcccagagcagaacagagcaggccagaggcgactcaggcgcccccttattctgggtttgggcacctggggcaaagacctcatcatgtccttgactgacatggctgggggtaatgctacccacggaccagctgcccctccaggtgtctcagaagaaagcgtgtcccga

SEQ ID NO: 90625 - DNA, 1080 bp, Homo sapiens
attcacccccctgcccagctgatttttatgtggttgggttttttataaagacagagtctcaccatgtttcccaggctggtctcaaactcctgggctcaagcgatccttctgcctcagcttcccaaagtgctgggattacaggcatgagccactgcacccagtccattttaagtccttttgttttttttttttttttttttgagacagagtctcgctgtgtcgcccaggctggagtgcagtggtgtgatctcggctcactgcaagctccgcctaccgggctcaagcgattcttgtgcctcagcctgtagctgagattacaggcgtgcaccaccacgcccagctacttttttttgtatttttagtggagacagggtttcaccatgttggtcaggctggtcatgagcccattttaagtcttggttgctggttgttcacactctaaagctaaagtttgtggaatagggaattcttcaggagccttccctcagcctgtgactgggctttgtctttgatggttctgttctaaacacttcgcaagtgggctttggtccaaaacatccaagctcttgcttgctctgggaataacagccgaccctgagacaagcatgtgcatggtagaatgttccagggcaaggaagggaaatcgctcctatccggtgtgatgtgaccattttacacaagtccgctgccctcaagggtggagagggtcgcttttcagctcttggcagaatgaacgggggccagatgaggttcggctgtgtttgagtttaggggtggcaggccagttagcgtaacctgtggagaaacaagaaactgatctgggtgctgcggatgctttcccagccactgagaggattccttggcatgtgtttgtgaagctgggtgcagaggttcatcggggggatgtttgagctttaggctaaaatcctggctctcattcgggtgctgggctctgggaactagctgcccgtggtgcatgttgggatatttgttacggccccgagagttgctcggctgccgtgagcctgatgccctctgaccccggctgtgtgctccttgtttcagaggtcagctggcggc

SEQ ID NO: 90626 - DNA, 1054 bp, Homo sapiens
gtcacgagcattataatcatctgctcccagcgtgcagggcactgggctgagcaccttacctgccctgcctgtcacctcacgcatccctgttttccaggtgaggagaccgaaggctgggcaaggtaaggtttcacccgtagaaaatggcagagccggaatacactgagttcttccggccttcaagaggcagcagggaccaggcagcctctgcacccctcgtgcttttggcctggccggagttggtactgactctagggcctggctgcttgatggcattgcgttttggactcagtggtattttcacaattgccccagtgactaatagaacccactgttgtgttacaaggattttgtgtttcccacacactttgatgatgtcatctcgtggggatagtgataatcagccctcactcgtacagtcccttgggagcatttccaaagccccctcagaacacgggcctcaagcaagaagcccaggcttgcttttcccacacaaacccatgttgtcagctcacacgggaggagaaagtccagggtagctttttttctgaccgtcgtgaacgagctatgtgacttcaagtcaacttcctaccttctctgggctctcactgccacaagctccaggcctgggcctgtaagctaagatgatgtttacatttttaaaggattataaaagcaaaaacaagaatatatgacagagaccaaatgtggcccacaaagccagcagtaccgacagtctggccctttatgggaaaatgcatcgccctgacttgaggggggtctgccttggctcctgtgctcctcagttttatttattgcagtttgctttcccaggccactctgcagtttgcaaagcactttcacatgcatcacctcccctaagccccagcagctcgtcgaggcaggcgggcctcatttggctaaacttgacctctgaggagcattttagaaaataagaaaattggcttttctgcttgctcttgcagggagcgcgccaggaggagcggccctcactcatcggtgcgctttgggctgctaaattctgagacaggac

SEQ ID NO: 90627 - DNA, 1047 bp, Homo sapiens
tgcgtacttctcacagaggcccatgttggagtgtctggaggggcctcacctcgtccacatgttcatctctttggcctggccagcccaggtagatctcagcatcctgattctcatggactttgggtctgaggctctgatcctgagaaattcaagcagtcccccacactggcaggtggaaggtgaagctgtatggcagggagccttgggatgagcttgtgggcaccgtgggagagccaggattggaggctgcatagagcagtatgtaaatgttccaatgtagctctggtggccatgtgcataacatgcaccttgtagttttagcactcgtaacttttggacacccactttcaggagccccaggagagccattgtcaagccccttgtgacagctctgagctgaccagggctcttccctcaggctgtctgcagagaacaccctgactggttgctaagggctcctgttaattggctttctctactaatcgggcctgctcagagcaaagtaaactttattttaggttagttaggccatagatcaagtcagatggaacccgatgccaactgcttcttggcctgagcctttttcgtgtgtgtgaactcagaccgttttcgtttgcatcagaagaaatttgggtctcactctgtatcacactggtgttcaggaaaccacccccatgttacccggcaggtctcatccgtcacatctagtctgttcactttattccatggtccctggggggaatataaagctgagagttcttgatgataaacagtggtgcgctgaattgttacttgtaaagggcccttaccatcttttagtctcgtcagaaccctggccatggaagagtcagtaccaggaaaaagtctctatatatcagacttcctggctttcagaagacagtctgaagaagaccaaaccacatcccgattaagttctctgtttgatgtggagaaagcaggcagctctgggcactcactgcgagcctggtggaattgtactggactgaagctccctgccaaggacctgccgagcttcagatatgttta

SEQ ID NO: 90628 - DNA, 1521 bp, Homo sapiens
gatttcaccggctccaccaaattagtgcctcttagatgatgtgatgtttactttgactcaagcgggggctcccggggtcagtgttcaagaaggaaagcagttgttgaagctacagaagcccaggccagggctcccactggctgtagctgtgctctgggtccccaggtccctgcgcagccaccagggccccaccagaccatgggttccttattctggacaaaccctcctctgctggaaccctggactttggccccagtccctttaagagctgaaagggctgtgctgagagcactggcctctgcactcaactggaaccaattttcaccatgattttaaaaattaaaaaaacctggcagagcccgactagaaagggacggcctctcccctcctacctgccaccgctggggaggcacagagctcgccagcgtccctggagtcccctcaggaatggaaagtggagtgcccttgtctggtagcaccatgtgggagggacccagctgggcgcagcgccctgtggccttttagatccagacctccctgccggatgccccgaggcgggaggccggctgtgctgcaggaacccatctccagatgccaaaggacttgaggggcagctgacaatcgctgtgtcccggcagatccgcagctcgaaaaagaacaagccacagaaacgggctcgctcgtgccaggacacagcagtgtctttcaaaaaatcaaaaccagaagttttatcagcagcaggaaggatgtgggactctgtccaagttcaccgtcaccatcaagccactggctgtggaaggagtttgtccaacagggtcagtgtcacagccacaacttcagaaagcagccatcccgcgtgtcgtccaaacagcagtgcctgcgtcccgctccacggagtcttccagaacacctccctctgaactaatcccggagcaccccacccccagcgagtcccacctggacctcttcaaagtcaaaactcttctctcgggacaaacaaatattcgggactttcgaagccctgaacttgagacaccaagtttgtctccatggaaacacgtagccgctgcagttggacagctgcgtgctggagttctgtccccaaaccaactgcagagaagaaagacgagcctcggcccaggacgcgatttctaacgaaatgcaatagttttctctttttggaaaaatgtttataccaatagttttgtgcgctaattgttattagaacgtttcttatgaatgtgtacattgcagtatattcagtcccaaatgttttgttctcattcacacagaaggtactaatgtcagctcacgtggcctttaaaaacctacttccccgcccgcaggagctcagagcatcgctgggcctgcgccagagtgaggggtgcaggaagacaaagacgcgtgctcactttagaaacgaaaagctgggaataatcacactgtttgtctggtcgtatagcccaaaccttagttgaaatcagacagaaagaatgtctttaaaatatacatctcctctcc

SEQ ID NO: 90629 - DNA, 1381 bp, Homo sapiens
ggctggagtacagtgtggcgcgaccctagctcactgcagcctcaacctcctgggctcaagcaatcctcccacctcagcctcccaagtagctatgtcctgccttttgacttagacacaaaaccgtgcatataagcatttgtgtattttactgaatttccatttgtacctccctcaataagggatctcagtacatgttagctcactgctcactacagaacacagggctgtggggcccccgagtcttcttcaatcttcctgttcagcaacagaatttctctccattcctgtatgttggggagcgatttggtgttaaagcctgtgtggtgtgtgggtatttcatttaagggactgaagacagaagctaatagttcctgatcacacccagatgtttacaaattaagtccaggaacctgaaaaccaggctaaacatgaaagaatcaataagcaaaagaaaatgagggattcattaatctgcttagagaactcaaatcagtgaccataaagatggatttctggccaggcacggtggctcacgcctgtaatcccagcactttgggaggctgaggcaggcggatcacctgaggtcagtagtttgagaccagcctgggcaacatggtgaaaccccgtctctactaaaaatacaaaaactagccagatgtggtgtcggacacctgtaatcccagctacctgggaggctgagggaggaaaattgcttgaacccaggagacagaggctgcagtgagccgagattgcgccactgtactccagactgggtgacagagcaagactccgcctcaaaaagaaagaaaagatggatttcctcatcccatttggtaacacagggaacgcaagtaattctcttaatgagtccacgttggcatgttagcgttcctcaggcttctgacaaacgcagacgtgtctttctttttacagctccagtggctgttggataattatgaaacagcggaaggtgtgagtctccccagaagttctctttacaaccactaccttcggcactgccaggagcacaagctagacccagtgaacgccgcctccttcgggaaactgatccgttctgtgtttatggggctgagaacgcggcggctgggcaccaggtgggtagacgatccccagcccacctgttcttcctcttcctttcccaagaaatggagcttttgggaaaatgcgaggcttcctcctcctttccaggtggcctgattcgcagccacctctggagtgcttgcagttactttcaattggcggcagccttggctgtggccaggtgtagcccacggtgtcggctttagaagccggtgataggacgtggggatcactctggttttctctctccttttgaaatttcccaaacaatacttttctt

SEQ ID NO: 90630 - DNA, 1036 bp, Homo sapiens
ccggaggggctgtcgtctgctctgggcccaggcggccccacgatggagtcgggccagcctcagacgggccacgcaaccataggcaggcctgcagagttctttgaacttcagttggccattggtataaagaggaggacaagccatgcgtcatgggctgttgtgaaaagggaatgagtcaagcatctctccactggtggatgctgcagcctcctttgctcttattattgttatcgttgttactatcaagcttttagaggcgtggatcaatccatccatgagacacctggactgaatcaagcaggggaagtttccctgcagcctctgccgagttctcgctgccatgccccgatgcaaaataacgacttatctgcttttccagagtctctacatttaaaactcgattacccgtgtttacttttcatttattttccttcttaaattaacacaaagtaaaatcaactttttggtgtacagccttgtgagttttgacatgggtagatttgtgtataatcaggtcacagaacagtgcattgccctgaaaaccccctcgtggtatttcttggcagtcacaacctcccccatccccagcccttggcaactgctgatctgttccctattgctgtagtttcatctttactagcgtggtgtataaatggaatcgtacagattgtgaccttttcagacaggcttcttttactcattctggtgcctttgagattcagtcaagttgctgcatgaatccgagttgcttttttttgttactgagtaatattctattacactacagtttgtttattcattcactagttgagggccatttggatggtttccagtttggggtgattatgaataaagaagctctaagtttcacatgcaggcttttgtaaggacatatgttttctttcttttggatatatacctacaagtggaattgctgctggctcatacagaaagtgtatgtttaactttatcagaaaccaccagtttcccaagtggttgcaccattttgcattcccaccagcaacatacaagagtt

SEQ ID NO: 90631 - DNA, 1010 bp, Homo sapiens
ttatactgcagaagcgaggggcgccacagagtgctctcccacgcagtggtgcggatggctatccagagggccccagcagtcccctctgtactagggacgatcagtgtcaccttgctgcagactacagacccacagaggcaaagctgcctgggcgggtgaaggtgcatgtgcttccgtgtatgtgtgtgtgcatacgtgtgtgtgtgcccacaattcgtgcatatgtgtggtgcatgggctgagtgtatgtgcacacttgtgtatgtatgtgcattgtttgtgtgcctgcacgtacctgccgtgtgtctgcccaggtcggtgtgagtgtgcaagtctgaccatcaccccgccgtcgcctctgatcagtcctgcctatgttttaataaaaagcacatgaacagacaaacagcatcttacattctgtgtgtatcctcagcactgacctctgacaagtctaactggccttctctcccttcccttttagagggtgttggtccaggcagccagctccaatcccaaaggggcccagatgcagccgatctccctccccagagttcagcaggtaccccagcaggtaatgacaagcaccgcagcaccgtgcaaaccggggcgcagttagcactcagcaatccagaacaatctctgaaggatgcatccttttctgtggctgctgttccttgttgtaagcttcagtttcttagccaaaagacttttccagaagctgtgcaattttaaaaaaatcatttactgcagatagttttgcagaaagccaagaaagctggtgatctttcgttcattcagaaattcagcaagcatttggggaaccagtgagcaccccgcacctgctgggtggagctcaggtagaaatgcagacagaaacaaagggctctggactggaggaaccatctgctagtgagtgccataccctcagatgcgggcacaacagaggaaatgcttcttatgatttcaattatctaagaacaaagtttgaaagcacggctgaccagcca

SEQ ID NO: 90632 - DNA, 1233 bp, Homo sapiens
ctagatgtttctacagggcacagagggcagacaaagtggggaggccagctgtccctggagctgaggaaaggtctgaaaagaggatgtggatctgaactgcatcttgagaatagtgttctgcaggcagcagatgggggagaggggtgtggccatgttttcaggactgggcggcccatgttttcatgtccccgtgaatgtgatgactatacactatataagtggaatcatagagtatttgtgtttccgtgactggattatttcacttagcacaatgtcttcaaggcttatccatgctgtagcatgcatcagaatttccttcctttttaaggctaaagaatattccattgcatggatatgccacattgtgtttccccattcatccatggatgaacacttgggtggtttccaccttacagctattgtgaaccatgctaagcagagatctcaaagggactcttaggtagagggagaacctggacagaggctcaaaaggcaaaggaggaaataacttcaagaactgagcaccatgaagagtgagatccaatggcaaccagaaagattagacttgcccaagtcccatgtgaaaaaggattgggtccccacagaaaggcagaaggcttgactcatgaacgcctgtctcctggaaaactgttgaaattataccaatgatatagaagtccattcctaaagctgcaacagcacttaattatacttttttaaaaatgcaaactgtttatcttttagaaactgtgccatgtttccaaggatacatttctgtccaaaaggtgatctgtggggaaaggccttagaagcagtttccaaaaaaattaccagcccacaaaaatgtatgcgggctccacccaggccagtggaaacccaaagaaaataacacgaaggcctttttcccacctctcctgtccttctcagaatacatacagacagatgtagcctgccttgagaaaaaatatatttggaattccagacccactgaaaacagactaaaagatgtgcttctgattttaaaaggaattattcgttttcttgaagaattcaccctactagggacttcagtgaggagctctctggggtctccatccatttctttagaaaatatttgtgggcctgaaatatcaaacatctgaggagcttataattagttaagcatttacgtgtattaatatatcgtcatgtggacagttgagaggggagaaggcactagacaaatttaaaatt

SEQ ID NO: 90633 - DNA, 1015 bp, Homo sapiens
ctgggggtccgtgaaaaacaggcggcgagcgagagtttgctgacccctgatcagactgttcccacatgtcccacactcctcctgtggggtaaacggagtcccttgggtcccctaaaactggactttcccaaaacgcgccaccaacccacggcgccgcgcgcgcgaccggttcgccaaccctctgagccgcgcgcgcctcccgccaagacccgcccctcttcgcggccattggccgagtctcgcactctttttcaagggggaacgcctcctccttccgacagactctgcagacagccaatggaacgccgtagggtctcgcgccccgccctcttgggggcccgttggaggcgagcgtgggcgggccgttaggaaggtggggcgcggagcctggtaaccgttgccggtaacaacgccccgccccgtcgggcgggcgggctgcgcgaggctggctggcggcgggagccggaggaggagcggccgccgccgccaccgccgccgccatagagactgtagccgtggagactgttacttaccaacggggaccaacacgcagcagccgctgccgccgccgcgggagccgctgcccgaactcccggcccgaactccaggtgaccgatgcgaccgccccgggcccagcccggccggggagtgtggggggcggcggggaccccgttcgggggccggggggcgggcagcacgtccccgccgctcaccccaaacgtccgggtggtgcgcccgcgggacccgcctccgccaccccgtccgcgcgcgcggcggagtttggggggaccctggcgacgtccccactttccttattgactgaacgcgggggaggtgcggtgccgtcgcctcactttttacaaaacttcctgaggttggggcgtccggggacccctttctcacgcttaccttcaaactcgctgagttgggggcgccccgggaacgtctctcaaactcctcaaactccctgaattgggggcgcttggggaccctcttctcaccttaaccccctaga

SEQ ID NO: 90634 - DNA, 1079 bp, Homo sapiens
ccaccctggacctcagaaggccctgcctgtgtgtctgcgtcgtcctccgtgtagacctagcgccggctcctccccggctcgcgctgcgctggggtctgtgctgtatagttctctctattatatatgtgtgtgcactgtctggtcaagagcagtgtccatgtgcgtttctgtggcagcagtgcacgtggggtgggtggggggtgcgtacggtggggcttgtaggttaagatgtctctgcggtggtgtggggctggaggccgagccaggcacggcagctggccctctccaggcgcatggaggaattctccctttgccgttccaaggatgccgccgcctcctaccggggctcccgggggggtcagccaacactacaaagggcagcgagtcctcagggcgcccgggagccaccagtctgctctcgggctctactcagactagcgccaacagtctccgcggacagactcgcatcagccgccctggggctcggcctcctcccataggctcctcttcctctctttcattcaagtcttcaaactttgaaaaaaatatgagcttttgccaaataagacgggatagtttatggagttttctgaggcgcattgaactctggtcagcccctcgagcgtgggctcggccatcagcaggcccggtgggttggccgggctggccctcccaggctgcctttctctctggtcgcggcctggcccgccccggcctccaccgccgcaattcatgctggtgccgcgcccgcagccccactcctggtatgcctgagattctccaggggccaagccggtcctccttcccggcccactcttccagggccaggacgctcccgcggagccagcccatcgtggctgggggtcccaggggctggaggcctgcctggttagcctctgtttcccagacattgactcgaggcgcctccagtcctctcaaccccctgactttcaagtcctttcaagtccttgtgccctgaccaagttatgaggaaaagagggctgagggcctggaggtgggctcgcaccccctcgaacccacctagatgtctcctcctccccagcctatgagttcagact

SEQ ID NO: 90635 - DNA, 1198 bp, Homo sapiens
gtggggccttcggggctggggagggtgtgggccacagctcagcagagacctgggttccctgcaggtgtcaggccggaggagccccgagtcctgcagcaagcctgagaagatcctcaagaagggcacctacgacaaggtgggggggcacctacgacaaggcggggaggctacggaggggtgggtggtgggagttgcagccagtggaggaccccagagccccccaacaccccacagttggactcttcctgggcaggagcagggacagtccttcctcccctcccggtgtggccttggagctgaggggctgcccctgcagccttgggccttccttggtttggatgtggctacctctgtcctgtgctgggatggactgggtcatgggtggggctgggcatgggagcaggaagggtccagggcccccacacgctgctgagacctgccccccctccccaggcctacacggatgagctggtggagctacaccggaggctgatggcgctgcgggagcgcaacgtgctgcagcaggtatcgcccccctgagggtcctgcccggcagaggtcggggtgcctgtgaggagtgtgggctgcgggggcccctggtgctgccccaggagcccctacctctgttagggaacagggcaaccccacccttggccccctgcccctgaagccacctgccaccaccttacagattgtgaatctgatcgaggagactggccacttcaatgtcaccaacaccaccttcgacttcgacctcttctccctggacgagaccaccgtgcgcaaactgcagagctgcctggaggccgtggccacatgaccctgggccgcgtgccgggcccccaccgccggggtcctgggaggctgcagccaggcctcgcctgccctcctctcccgtctcgcctgcccgcagcactgccttagcgacagccctgtcctcgcccgcacagcccgctgcactttcctcggcggctccctgcccactctccccgctccatcgccaggagccctggggccgggctgggccacacgggagccgccccccgggctctctgggctcccctcagagagcggctggtgttgaaggcagctctgggcagagacagggccgggggcccctcgcccagccttgggaccagcccccactgctcggcgggctgtgcggcgtcgctgccccagcctttctgagcagcggatc

SEQ ID NO: 90636 - DNA, 1165 bp, Homo sapiens
gtcaggggtggcggagcagggcgccccgcaatgccacgtgaccttgtctctccccttgccctccctgctcttggccttgcaggacgccaacaaggagagcagcaagacctccaagccacacaaggtgaccaaggagcaccgggagcggccccgcaaagactccgagagcaagagctcctccaaggagctggagcgtgagcaggccaaaagctccaaggacacctcgcggaagctgggcgagggccggctgcccaaggaggagaaggcgccaccgcccaaggctgccttcaaggaacccaagatggccctgaaagagaccaagctggaaagcacgtcccccaagggtgggcccccacccccacccccacccccaccccgggcttccagcaagcggccggccaccgccgactcgccaaagcccagcgccaagaagcagaagaagagcagctcgaaggggtcccggagtgctccaggcacctcgccccgcacctcctcctcctcctccttctcggacaagaagccggccaaggacaagagcagcaccagaggggagaaggtgaaggccgagagtgagccccgggaggccaaaaaggccctggaggtggaggagtccaactcagaggacgaggcctccttcaagtccgaggtgagtgagtgctgggggcagggcagccaggtgcaggcagtgtggtgggacccgcctcccttctggaacagcggaaggaggtgggatctgagccaggacctcaggtctcaccagctgctcctcccactggcttcttgtaacctggggcctccacgcctcactaggcttcggtttccctgtctgtcaggtgataaagtctgcctcgtgaggagtccctcctcgcctcctcggtggcatttgtgggtggctctggtaaagcatgatggtgtggtcctgaggttctgagctcccctcctccagcagccccctgcatgggcccgggtcttggccgctctggtgccagtgggcaagcgtgtctcatggttgctctgaccatggcgtggtcagcccggcctggagctctgccaatagggcatctgggagactcacccttgtctggaggttaatgatgagggcttcagacagcccctagccatgaggagcaacaggtccgtgcccggctccctatttaggtggctg

SEQ ID NO: 90637 - DNA, 1113 bp, Homo sapiens
gcacaggtcgtctgccttggtctcggcctcagcctgggtgctcttgccctgttcgggtccgctgcagtcaccgcacaccaaggacggctcattctccgggcacgtgggacccactggagttgcacccatgtgcaccccgggaagttgctgcctgcctttcgcaggcatctggctggcctctcacacttctgagctgttccccctaaacctaagcgcgtaggtcaggcttcggccgcagctgccttctcatgattctcagtgtgctccgcaagtcttcttgggccagccctccggtccactgttcccggaaggccgcgtggccccacctggtcccagccatcctgggaccctgggcttttcttcgctccccacccatgcctgcttcttctgcgtgctcagcacccagtccccagcagggaagcacctgggattctttcgggaaagcgctcaggctctcccttctcccctcctgcagagggaagccccaccaccttcagcccggcccgtgtgggccccctgccccctgcccatcgataatgactgtctcttctctgtcactaggtgatggtaatgcccgaaggagcagacacggtgtccaggcccagtcccgactaccccatgttacccacaattccactctctgccttctctgaccccaagaagaccaaaccatcccacggctccaaggttagtgaggcggaaggcccagtcgcgtgggagcgccggggcccagctgtggtgggtctggccccggcgccctccctccactgggctgggccttccgcacctgctcgctcccttggcgtcttcctctttgagctctctgcacacccctcgctgcgcactgccgcttccctaggatttcaggaataagcccgtgatcatgggctctttgccctgttcatcttgaggccagagaccctgcctagtcctctcccgttctgccaagtgatggcagggccccaggactgctcggcctgaagccctgagaccttcgccgaaggctgttggggcggccgctgggtagagtgtctctgtctaggctgcagctacccacctcttcaaccctcctgagggcagctggggctacttctgcccttggctatgccaggc

SEQ ID NO: 90638 - DNA, 1103 bp, Homo sapiens
acaaaattaaccgggtgcagtggtgtgcatctgtaatcccagctactggggcagctgagccaggagaatggcttgaacccagaaggcagaggttgcagtgacccaacatcgtgccaccgcactccagcctgggtgacagagcaagactccgtctcaaaaaaaaaaaaaaaagaagacgaattggtcggtaaggggactcgaactggagactctaaaacttctccagccctgcccactcaatttacttcattggctcctccctttcaggctccgtccctatccccgcctcacccttaatggcgcccgcccagactcctggaagtgagcggcctagcgagcgagctcccaggcgcaaagcacgccggaagctgtagttccgccatcggacggaagccgaccggggcgtgcggagggatgtggcccggaatattggtagggggggcccgggtggcgtcatgcaggtaccccgcgctggggcctcgcctcgccgctcactttccagcgcagcggccgccgcagcggacactccagaacggcctggccctgcagcggtgcctgcacgcgacggcgacccgggctctcccgctcattcccatcgtggtggagcagacggtacggcggccgggcggggacacggttcgggggctccgggctgggtggggatcggctggctgccccggcccctcacctccatctttctacccccagggtcgcggcgagcgcgcctatgacatctactcgcggctgctgcgggagcgcatcgtgtgcgtcatgggcccggtgagcgccccgcgccgggaccctccccaggactctcccaagcgcctgccgacactccctgcgcccctccttccctggccccagactttccctcaggctccgctccccttctaacccccttccctccccttctgactcccctcctggctcccggtcccccaacccgctcctcaccccttctctgctcctcggctcttaatctccgacttccttcctgacacctggcaccgctcccctcattcctacgctcaagactctccccagccattctcaccccttcctttcctgtgtccctagccccctgactccccccttcctgtgct

SEQ ID NO: 90639 - DNA, 1111 bp, Homo sapiens
ccgccttctcgctgtgtcttcacatggtggagagagagcaagtgcactggtgtctcctcttataaggccactaatcccatcaaggggcccctgaccccatctctcctaatgacttcccaaggaccccatctccaaatcccatcccactaggggatggggcttcaacatatgaacttggggtggtgggcacaaacattcaggccaaaacaggacccagacctggccctgggtctctgctcttaccctaatgtgtctcacctcctgcttccccaccagagtccgccatggagagggaccgctacatgagccccatggaggcccaggagtttggcatcttagacaaggttctggtccaccctccccaggacggtgaggatgagcccacgctggtgcagaaggagcctgtagaagcagcgccggcagcagaacctgtcccagctagcacctgagagctgggcctcctctccagaatcatgtggaggggccagaggcctgccagacccccagctgggccctgctcaccccttgttgctgggcttggaggggcctcttgaggaacttttaatttgcaggggtgcccgctatggacggggcattccagctgagacactgtgattttaaattaaatctttgtggtctttgctctgcgtctgggacaccctcccttctgcaccatgacagcgtgtacacatctgtgtttcacaggccccttctgcttttgtcctgaccccaagaggcaagccatgtcttccttcaacagattctcctgatcatatcctatattccaggcagtgttcttttgtgaagaagacacaagaaaccctcctcaaaagagctccattcttgtggcagtagacagttactaaaaaaaacaaaacaggccaggcgcgctggctcacgcctgtaatcccagcactttgggagcccgaggcaggcggatcatgaggtcaggagatcgagaacatcctggctaacatggtgaaaccccatttctactaaaaatacaaaaattagccgagcgtggtgcacctgtaatcccagctactccggaggctgaggcagaagaattgcttgaacttaggaggtggaggttgcagtgagcaggatcacg

SEQ ID NO: 90640 - DNA, 1061 bp, Homo sapiens
aaataagtcagccgagctcccccagcactgcagcttctgggtgccaggccgggcaccctcagccaccacagccgcaggcagccgccgagagctggggcagccgctgccagcggtggcggtcatcgaggaaggccacgtcggtgtagcgagtgggccggcagcagggcccgccgtgggctcggccctggccctgcagccgggccagcgccaggccatgctgggtgcgggcaccacgggggcagctgccggcgcagtagcggaagatgaccttctcctctgaggcgtagcccaggcctagctctgccacggacagggtcaggctccacagctggcatggaccagacagggctcggcgcaggcgggcaagggggcggtgggtgcctgtgggagggaagggcgctgacagtgagcagggtcagggctggggaaagttgggaagtcacagagggtccctggaagtccttacccagccaggtccctccagcctttgccacctgttcagacgagaactctccatcggccacgggaaccccacgggcatcggggccccagccctgtcccagctgcagggacaggagcagcagggagcccagcaggaacttccctacggccattgtgacgggcaggtcctgagagtgggagctgtgccccaaatttatgccctgcctgggctgggagctaacctcttcactgccggcccctgcagccaggaggccccacgtctgcaccagcccatctcctgcaccctcgaatccaggcatctgctccttctgccccacaccccacccttctaagagttaagggctcacccccagcctaccccaccccgacattccacacagccatttccgacgccccagacaccccctgatttacgagtgctgtgctggcggccagggcaggcaactggtgttcccccgacctgctgcctggagtggaagtcagggggcttcatgggaccccggtggggtccctccccactaagtcagggtgctggggctcaggagcccccacgtgtatcatgtgccaggtggagcatatgtgagtgctgggaaaggtgg

SEQ ID NO: 90641 - DNA, 2029 bp, Homo sapiens
ggcctcccgtagtgctgggattacaggcgtgagccaccgtgcccagcctacttatttattttgagacagggtctcactccgttgcccaggctggagtgcagtggtgcgatcgtagctcactgcaggctccaactcctgggctcgagatcttcccacctcagcatcctgagtagctgggactataggcacgccccaccatgcctggctaatttttgtatttttggtagagatggggtcttgctgcgttgctcaagctggtcttgaactcctggggtcaagtgatcctcctaccttggtctcccaaagtgctgggattataggtatgagccactgcccaggccctggggttgtgtttttgaagacagttcactgagttggtgcttgtgcctggctctgaggcagctctgagtgccacaatgcaggaagcttaggtggccagccctgggagctcatgacacttgagatgacctctcagagggggcagactgagggcagaacaggaggggtccaggttaggttgatgaagggtgctccaggcacagcagttgggtgatagtgacagacacaggcagctcacacagggcagtgggtgccaggatgtgctgggtccagcggagccttggaaagctgtaggcagggaagaggcactcacccagactgtccggaactttggggtagaaaagaatgaggtagaggcctcaaggaggctgggcagttgtttaggcttgaggaaatggtggcccgggccaggtgtccacttcagatttggccatgccatggctgggcgcggtggctcacgcctgtaatcctagccctttgggaggcagaggcgggcggattacgtggggtcaggggttcgaaactagcctggccaacatggtgaaaccctgtctctactaaaactacaaaaattagctgggtgtggtggcagacacctgtaatcccagctactcgggaggctgaggcatgagaattgcttgaacccgggaggtggaggttgcagtgagctgagatggtgccactgcactccagcctgggtgccagagcgagactccatctcaaaaaaaaaaatttggccatgccttcccgccccatcttctcacttggctcctcagtttcccgggtgtggcccacagatagcagagctggaggcaaatgtagacagtttgactgcagggttgggctctcctgagataatctcacacagtctttccagaaatgatcccgatgtgcacacgcccagcactttgcagggtaggtgcgccggccctgttccccagatgtggaaattgacgaggcccaggtggttgaagggcctgcccaggcctcatgggcatttcttggtcttcctcctatggcaagtgccataaaggaggcaggccccggggggacacgggggggctggggctggtccctatgggccaggccatgaccgtggctccctgcaggttcaagggcatcaagaagggaggcgtaacagagaacacgtcctactacatcttcacccagtgccccgacggggccttcgaggccttccccgtgcacaactggtacaatttcacaccgctggcccggcatcgcacgctcactgccgaggaggccgaggaggagtgggagaggtgagtgggctgggtggtggctggggacagaagtgagggaaatggggtgccttgccatggatatatcaccaggccctgtgctgggagctggggactcaggggtaaccagggcagaccccactcggccgtctcagagctgtcagttcaggaggaaacagataggaggccttagggccacaatggggcaccccagagggtgctgccagagccagagtctgtgacccggagctcaaattggcagagcagggtggggtctaactgcccccttggctttccgcaggctgcaggtcacacagcctgatccactgcagggcagcagctccaggcagggcacccgaggagggtttctctagcagtgacatcggcctcagaggtggggcgggtgcagttaagggctgtggagggacaca

SEQ ID NO: 90642 - DNA, 1600 bp, Homo sapiens
ggccggaggtctccgggagtccccacgcaccgccagggaagcattcgctgggtccagaggttaaacgaagaggcctccctgcgccggctgcttgttcctgtgtgccgctgtcgtgatgctggggagcgctgagactcgcaggcgggacttctgaactgctggggagtcggggggcaggcagacagcgcggacggtgggcaccggcccggccgccaccacctcgctcacaatctggccacttgggaagaaaacgtctattttttccccttctctgcatcacttttttggtttttgttctttttattcttttattttttaaacccatgatcttttttcctgtgtccaagtgactgtgttgcaggcggcctggctctggcagggactggtggggacgcggggagcggcccaggcccctgccccgccgggctcagcctcccatgcgctcgcgcttgcctgtgtcccgggcttgtctgtgaagtgggcgtgaagatcgttgccaccttccaacctacctcacaggggtgttgtggggacaccatgatctctggattgttcatgtcgtcgtgctgcgccgggagccaccgccctccggagacagggcagctcccctacgaccctagcgcctccgccctccgcggcccctctcctctcttcctgctctgtccctccttctccatcagggagcagcgtgacttcagcgagtcccgcgagcacctggctagacagttaacaagcacgtccttccagcctgagccagcgcaggtttgggagggggcttcctggccccccccacggtgttccagcccctcctctcttccgccccctagtctcccacccttccctccccgtagtgaccaattcctatctcttccctctccgcaggctcaatgaatcgaatgaatgtgaacttcttcatctgtgaaaaatcttttttttttccattttgttctgtttgggggcttctgttttgtttggcgagagagcgatggctgccgtggggagtactggggagccctcgcggcaagcagggtgggggggacttgggggcatgccgggccctcactctctcgcctgttctgtgtctcacatgctttttctttcaaaattgggatccttccatgttgagccagccagagaagatagcgagatctaaatctctgccaaaaaaaaaaaaaaacttaaaaattaaaaacacaaagagcaaagcagaacttataaaattatatatatatatattaaaaagtctctattcttcaccccccagccttcctgaacctgcctctctgaggataaagcaattcattttctcccaccctcggccctcttgtttttaaaataaacttttaaaaaggaaaaaaaaaagtcactcttgctatttcttttttttagttagaggtggaacattccttggaccaggtgttgtattgcaggaccccttcccccagcagccaagccccctcttctctccctcccgccctggctcagctcccgcggccccgcccgtcccccctcccaggactggtctgttgtcttttcatctgttcaagaggagattgaaactgaaaacaaaatgagaacaacaaaaaaaattgtatggcag

SEQ ID NO: 90643 - DNA, 1184 bp, Homo sapiens
ggcccttcaatcctgggcccttcaaccaggggccacccggggctcccccacagtgagtatcctctgcctcctgggttttgaggccgggggcttactgagctggcaagaagaatagcagaccccatttccctttccctagaagtgcaggcggggggcctcatccagcccatttttgtggataccatcaacaggccctctcctgtctactggtagagcatgtgcctttcagcatccctctgtgcacgtgcaagtttcgcggcttctttcatgtcctcaagctgacgctgcgcgtccttcgagttgcttcttgtctaggcctttcccaggcgccccgttgagcctggtggtctgggtctctggcgcctccccactgaaaaacatccccaccccaggtggtccggctgcggccacccccgcaccactgctcaagcatccctttcttctctcctgcagtgccggggggccccctcctcaccagtacccaccccagggctggggcaatacctacccccagtggcagccgcctgctcctcatgacccaagtaagtgatgggccacctggcggagggcaggccctgttctgtccccccgtctcacccgaggtatctcctgcaggcaaagcagctgcagcggccgcggaccccaacgccgcgtgggccgcctactactcacactactaccagcagcccccgggccccgtccccggccccgcaccggcccctgcggccccaccggctcagggtgagccccctcagcccccacccaccggccagtcggactacactaaggcctgggaagagtattacaaaaagatcggtgagtctgcagggtggcgggggggctccagccctgccgggggagtggtttctgacctgtctcggcgcccgcacaggccagcagccccagcagcccggagcacccccacagcaggactacacgaaggcttgggaggagtactacaagaagcaaggtgagtggccaccatgcggggacaggggcaggggcagccctcacccacagcctctcacctgcctttgtccacccacagcgcaagtggccaccggagggggtccaggagctcccccaggctcccagccagactacagtgccgcctgggcggaatattacagacagcaggccgcttactacggacagaccccaggtcctggcggcccccagccgcc

SEQ ID NO: 90644 - DNA, 1811 bp, Homo sapiens
ctgactcccagctttgtgtgtgtgaggcaccggcctcacctctgaccttctgcttttttatctggaaacggggctgctggtagtgcctccccattaaagtggcaggtagagagctcagtagggtgctgtgctgggctcacccagggttcgtgggtccttagttgaggcccgcacccccgaggaggtgggggggtgtggggcagcagggctcacccatgggggctgcttcctgtgtgtttgcagcaagcctgtgagatggtgatggacatcctccgggaacgtgaccaaggcggctttggggaccggaatgagtacggatctcggattggcggaggcatcgatgtgagtgtgggccctgccttcacccccctctcccccgccagtggagggaggggccggggtgagtggctccttgtggccagtgggcagcagagggcagcagagctgcgggccgagctgacgctgctgcctccctccccaggtgccagtgcccaggcattctgttggcgtggtcattggccggagtggagagatgatcaagaagatccagaatgatgctggcgtgcggatacagttcaagcaaggtcagggcctggcccaccctgcccctggccagtgcacccccaccctctttgggaggcaggctctgagggagctgggcaccgtggtcagccaggtggcctccatagcacctcacggctcttagtccagccgtcagaacatggccagtcccttctcttctctgggacagacacatgagggctttccacatccagggggaacgtgtgttcctatccctatcagatctcctcttcctccccctacgatggagcctatcctgacaggacagccctgggtgccccgcaggctggatcagggcactccacctcagctctgggctcttgccagtcctcaggcagtctctgagctgcctgccgtggggagaagggcccctctggcttttcagagatttattgttctgtaaaatctctcagtgctgggggtgctgtgtgctggaagaagcttgagccacctcctggcttggccgtgggtttccttctctgggaatgtgggccgcctccccctcaatccctgagcgagtggaggctgggagcggcgcagcgcgtctgagatctcaggccggcgtggtgtctgcgctggaggcggcgttgcagggctctggggtgggctcttcttttaaacttgtgtctctgctctctcggtgctggcctcagatgacgggacagggcccgagaagattgctcatataatggggcccccagacaggtgcgagcacgcagcccggatcatcaacgacctcctccagagcctcagggtaggtggccccgggtgctgaaggggctggcagggcctccaggggagtgcaagaccagaccggcttccagggttcatcatcctcctcctcctcttgtcttgcagagtggtcccccaggtcctccagggggtccaggcatgcccccggggggccgaggccgaggaagaggccaaggcaattggggtccccctggcggggagatgaccttctccatccccactcacaagtgtgggctggtcatcggccgaggtgagtgtggccccctgcaccctatcccttgccccctcttccctgggccatcactgcaggccaccttcaccttctgcgtttctgcaggtggcgagaatgtgaaagccataaaccagcagacgggagccttcgtagagatctcccggcagctgccacccaacggggaccccaacttcaagttgttcatcatccggggttcaccccagcagattgaccacgccaagca

SEQ ID NO: 90645 - DNA, 1189 bp, Homo sapiens
attttggttttgggggccaaaagagacagttggaagatggaggtaactccctgctgctgcctttagcttaggaggaagggctgggggcctaaagaggtgcttttgtttgagtgtggttcagagggggtgggtgtcactgttgtttggtcttttaaaacctcagcaatcccggccttgttaattcttcttgttccgtctgccatcctgaggtatcaggtggcagagaggagggcagattgattgtgactgggtcgaagttgtaagttcccaagatgattcctccctttctgggaggctgaggcaacctggagcagttactgaggcttgatgtgaagttggcccagctctggggtgcgtagtgtgaccccaagtagcggatgatcaaccctgaccaactccactgttatccacgacaccctccctgctagaggcaggtcctgtcctaaaccgggaggactcaggtgcctggtggtggttgcgtgttctgaaggcttttttactctgagcgttggtggcggaattggcggggtctggcctccctcaggggccagtctctcctgggctcctgtctcagctcctgttaagggtgggggccgaggggcactgtttaccttggacatgtggcaccagcatcaggttcgaggcggccgtgggtgggtgggtgctgcatctgccatcctctctctttcccagatcaaccggagagcaagaagctggcttcccagggagactgtaagtccagggggtctggtggcagatatgtggcttcagagggttgaggttttcaggagtcaggagctggaagcactgaggaggtggcagctctttacagaggcccctggtgcttcattctggggcccatacgtttgagggatcccaggaaccctgaaattgagggagatgagctctgtgcttttatggggaggaatccacagcatccatgaggcactggagcaggctggggaccgtggtgccgggctcagctcccactgacccggggcaggcagtgccaagtgcccgaggaggagctaagccagtctttgctttgggttttctctctacagcaatcagttctcaacttggacccatccatcctcccccaaggtaagccatggtggggcccacactgctttcttgtctgttggccagcagactggcctttctgctgacttgggagggctctgactgg

SEQ ID NO: 90646 - DNA, 1036 bp, Homo sapiens
gtaatcccagctactcgggaggctgaggcaggagaatcgcctgaacctgggaggcggaggttgcagtgagccgagatcccccgaccgcactccagcctgggcgacagagtgagactccgtcaaaaaaaaaaaaaaagaaggaagggaggaacggaggaagggagggagggagggaacaaaaagggagaaagaaaggaaaggatggaaggaagaaagagagagagaaaaagactgaggagatgaagaggaggggtgaggtgggaatgtaggttgatgttggctttgggtcagggttgcatgcgattctagaactggccggggaaggagctgaagaaggaatggggatgggatggggatgggttggggttgggtggcttgggaggtcccggtggggctgcgcttggggcagggatggggacggagacagaggcgagcaggggctcctccagggtcctccctccacccaggtctactcctccaagacgaacttcaccaacctgctgggggggctacagagcatggtccaggagggcggcttccgctccctgtggcggggcaacggcatcaacgtgctcaagattgctcctgagtatgccatcaagttctccgtattcgagcaggtggggaatgaggggcctgcttcccccagctcaagcccaaacccctcccatgcccccaaaactccaggcccttgttcaagcacacactcaccctccagaccccaggcctcttccctgcgcgggttttgtgtcggagggtggctgacttctctctcaccctcctctctcctctcccagtgcaagaattacttctgtggaatacaagggtccccgcccttccaggagcgtctccttgctggctccctggctgtggccatctcccagaccctcatcaaccccatggaggtaagagagcatgtgccccgcaggtgaggaaacgccgtggaaactagttacccacgttgctggggctacttcctcttcctcctttctcccctcctcctttctcctccttttttctcacacttctccctcct

SEQ ID NO: 90647 - DNA, 1050 bp, Homo sapiens
gaccaaaaaataaaagaaagatatcaggagacagttactggtggtgccacatgtgtgcactttggtaggtgtaactatttctaggtatagggatttggggatagcagaagattctagagtaggtggtttttaaaattcggttgttctcagggcatctgttttcaggagtagctatttctaggtgtcttcattcctggatgtagcgatttggtgggacagcttttccagggataaccaggttctccccaggtgctgaagacgcggctgaccttgcgccggacgggccagtataaggggctgctggactgcgccaggcgtatcctggagagggaggggccccgtgccttctaccgcggctacctccccaacgtgctgggcatcatcccctatgcgggcatcgacctggccgtctacgaggtctgtgggcagcgcgttcctctttccctgctcccctctgggatttacccacaggacaccccttccccttcccctggggctggctcagttgacctgctatagttagagaaaggcagttatgaggtgaggagcaccttggccctgggaatcctggggaacccttccaggtattggactctcccacttctccacttacttttgattagcagctcagccttccggggtcacctgaaagtcagggaccactctagctgacaaacataagatcaggcaaagattacaaaaattagccaggcatggtgatgtgtgcttgtaataccagctactccaaaaggccgaggcatgagaattgcttgagcctgggaggcggaggttgcagtgagccaacatcccgctactgcactccagcctggtgacagagctactgcactgcagcctgggcaacagagcgagactccttctcaaaaaaaaaaaaaaaaaaggcaggcaaagatgagtctcaaagacacccaacttccccgaagcaagtatcagacccagccacggtctctaagccaatgtcatcttcagggcctgcccatttgagcatctgctgttaccataagaaccacacctaatcaccagcatcttgag

SEQ ID NO: 90648 - DNA, 1042 bp, Homo sapiens
cagaatttgggggctttctggagggctgggctcagtgggtgcagtggagagccagggagtggggttttcctgggctgtagaatcttcagctgccttgtgggaaggggtgagatgaagaattaggggctctgtgagaggagagggtttggggtccccccagatgcttgggtctgcagaagctgttgaggactgggatggagacgtgacttcttggtcggactctgagggtatcagctgggacctggagtcctttgaagagctggtggcatccaaagacgaggcattttgcagggatggcagggaaaggggctggggctccggctctggtagtttcttatcgtctggttgccatcttggtatgttgggctaggtgagatggatagggaagttgtggcttttagatggcagaggggctggcaagttggatggaccattaggggaagacttggggtagggttgggggagtgggcgaggctctcaccaggctgaagcagctgtccaggtctcctctgtgacagcagtctaaactctggctcggtctcaggctgcctgcgctcttggctcccatgctaagactgtccagaatctcgctcaacaaatccagttcttctccagaccccaagaagctgctgtccagagcttcttctgcccacgggcacccctcatcctcagggctcagtgggggtgtcctgggtgaggatgggcagcctcagatatttgcccaagacccccagccctggtcaggctgctctggagtttgggaaccctcctccccatcagtcctggcctcccactttcaacactgctgttccctttttgccttaccccgcccctgggggctcggaagttccctcttccagctggcgtctcctgctggggcgaaggggccggttctgcaaagggtgggggcgataggacctcaggagactgcagaatcggggggctgaggcttgctggagaagggtgagtgtgaagtgggtgccacatatttggggagttgaagaaggaggtgagatgtctggatggggactgggatgggtag

SEQ ID NO: 90649 - DNA, 1026 bp, Homo sapiens
tatactcattttttgttggaatcctacccgcccccctccgccccgcccacggcccctttaaaattgacagccaagatttgctggcaaacattctttttgtccttggatgctacaattccaggttctgccttttatctcccaagctcagaagtttcctggggccaatttttgcagctcaaaattgtccgtgcgattttgttcttcaccgctttgaaacaggaacaccttgccctgttgctttgccactccccattttctttggggatgactgcctccaggaatactcattttatattagtcaaaggggtgaaagtttgcattgacttcttaggtggtgtatggggggtggtgaacgtatttgagacatgcagatggcaaaaaaaaaagctatcttaggggacagaaggctgagctctcaaatgcccaggatcccaccacccttgggtaattctctgtccactcctttataggccaagagtggcttgaagggggtgcagagccttctaatgtataaggtaagatcaactggccgggtgcagtggctcacccctgtaatcccagcactttgggaggccgaggcaggaggattgcttgagcccaggagtttgagaccagcttgggcaatatagtggggccttgtctctacaaaaaaatagttaaaaattatctgaatatggattgcttgagtctagaaggcggaggttgcagtaagctgagatagcgccactgtacaccagcctgggtgacagagagaccctgtctcaaaaaaaagaagactgtggctgggcacggtggctcacgcctgtaaccccagcactttgggaggccgaggagggtggatcacttgaggtcaggagttctagaccagcccgaccaacatggtgaaaccccatctctactaaaaatacagaattagctgggtatggtggcgcacgcctgtaatcccagctacttgggaagctgaggcatgagaatcgcttgaacctgggagtcagaggttgcagtgagccgagatggcaccactgc

SEQ ID NO: 90650 - DNA, 1014 bp, Homo sapiens
gcctcagctctggctgggagccacatccctggctcaagaagaggaagtccgtccttggggatactgggaaaggtagtttatttaatgctttgtggcccttgtctgctcccgctgcattctgggtaatgtagtcccggacagttaagagtgggtggagaaattccgctttaagggccggatatcagatccatgacaattggttagataaactgctcattaaatcacatccggacaatctttatagcgattggtgagagtgagctgggggttaagcgttatcggctctcccattcggaaccggtgctgtccgtcggtgacgcaagcaggcgggcttgcggagaggcaattgctgattggttggcggactggaaactccgaaaggccgggccccgccgtgcggcgattggctcatcggtgggcgggcttgggcgccagaggcggagtcggggaggaggtggctccagagatggcagtgagcgagaggagggggctcggccgcgggagccccgcggagtgggggcagcggctacttctggtgctgctgctgggtggctgctccgggcgcatccaccagctggcgctgacggtgaggcccgccgcgcgagggtctggggtcggtggcgcaactttgtctcggagaagccccctggcttggagtggtctcgtccgccctcccccgtccccgaggcggtggagtggtccggcgccccccgtttccgggcccggagtggtctcgtcccgggatccccttcggtcctccggatggagttgccgggtccgcctcgctggggtcggccccctcccttcgggggcgaggctccatctcttggggactacaccccccttccccccaactgggtcttagtcctttaaattcttggaatcacttttggggcgctagagaccctggagccgcacagcggggtcctggggggctatagagtggggtcctctgggcacttaatgggatttggggggttctgttgaaatattgctgggagctcaactggaatg

SEQ ID NO: 90651 - DNA, 1032 bp, Homo sapiens
taaattgagtcacccatcgggggatccctggaagcagggagattcagggaacctggtgcctgccccctggccactcaggggcccccagtctgccaggaaccctgcccctctggccttgactcacgccgggccggccggattttccggaatccggggggattaggggagcccgagctgggggagtggccctgtccccttccacgcccctcttggcggtcctatgtcggagacctccatctcccggccggggtggctggggcctgggcgctgttctccggcccttcccgggaaggggagggggttcccgccagtttcctgcctccccccgcgccacgccggggcggcgccgggaagccactccttctaggagcgcagagccttggccctccctgggagtctggtcggcgggctgtggggtcccaaaatcgtgaccccggcccctctcccctcctcccccaccatgtcccatgtcaggatcagttcgaggtgctcgagcgccacacgcagtgggggctggacctgttggacagatatgtaaagttcgtgaaagaacgcaccgaagtggaacaggcttacgccaaacaactgcggtgagaccctggggtggacgctacggaggacgcgcctggggcgacggggagcggtgggagggctgcgggctcagccctcctacctctgtctccccttaggagcctggtgaaaaaatatctgcccaagagacctgccaaggatgatcctgagtccaagtaaggttggagaggggctgcagggctagatttgtggggaaaggcggtgcttgggtctcacttcccctccctcagctgggacaccccaccgctcctctcacttccccttctagaggtgagagcatggatgcaagatgcgggattatctggcttggaatcctgagtccactactatgtagagaaattgacttgggcttgtgactcaggttttctgccactattttccttaactgttaaatacagaggccccagcagttacaaaaccagtaactttgggcagatgact

SEQ ID NO: 90652 - DNA, 2517 bp, Homo sapiens
cttgagcccaggagtttgaggctgcagtgagacgcaatcatgccgctgcactgcagcctgggtgacagcaagaccctgtctcaaaaaaaaaaaaaaaaaaaatctactcaagggttggggttaaggaatatggaccagaatttgtcatcgcttcagggattacattcttggggcttaacccttttccacctggaggtgcgtcctggggcatcagcctgctcgggaggaggggcctgactccctgttccccgattctcatccaaccccagattcagccagcaacagtccttcgtacagattctccaggaggtgaatgactttgcaggccagcgggagctggtggctgagaacctcagtgtccgtgtatgtcttgagctgaccaagtactcacaagagatgaaacaggagaggaagatggtgaggagccccccgattcaggttttacaaagggcttctgctggaaccctggcgagccttatcactcttctttctgtagcacttccaagaagggcggcgggcccagcagcagctggaaaatggctttaaacagctggagaatgtgagtttgcagaggtagcagtgactgtggcccggaggcatgggggcagggttgcggatccggagtcagggagctgccctctttgtcagacctggaccttccctcccccataggcttccagtactcccttgacccctacttactggatgacatcccaataatccctgaaaccttggtttcccaccctgctgtctttgggatggtggctccctcactccggttctgtcccctacacagagtaagcgtaaatttgagcgggactgccgggaggcagagaaggcagcccagactgctgaacggctagaccaggatatcaacgccaccaaggctgatgtggagaaggtgtgtgtggcgggggcggggggggggtgcggggtctgggacaagcttggggagtccgagtgggacgtgatcggaacctggcagtaccttccacctctgcattcttcaggccaagcagcaagcccaccttcggagtcacatggccgaagaaagcaaaaacgaatatgcggctcaactgcagcgcttcaaccgagaccaagcccacttctatttttcacagatgccccagatattcgatgtgagtgctcccagttctcagacctaccttcccgaaagcctccaaatgttagccaactcctacgcattcatcaaaaccccagctgcaatgtcccagtccctagattgaaagggaatcagaaacctatagtaacagtgagctgtgcttttagtcagctgttcttcctgctgggcatgccttttacttgtttgtttatttacttctatagagagatggggcctggctctgtcacccgggcaggagtgcagtggcataatcacagctcactgcagcctggaacccctgtgctcaagtgacctttctttctttttgaaattcctacttattcttctaagctccacctctaacaacccctctgaaaggtctcgaatttcccctctcctgtttcaatctagcgctccactctctgtcccatccgtggccctgggagtatcagggctggttctgctttttcttcaaatccctgttcccttgtctcctcctttgagaagcctttgctgaccccctaggcacgcgtccccctctgagatccccctggccctgtgtctcttccccaaccacagtgggctggagtctctcttcccgactctgtcttcccctccagactggcttggggctggggccagcgtggagcgcgatcatatttgcagagtgaatcactgtgcttctagtccctctgttagcacccctgagccacccttgtccctgtccttacagaagctccaagacatggatgaacgcagggccacccgcctgggtgccgggtatgggctcctgtcggaggccgagctggaggtggtgcccataatagccaagtgcttggagggcatgaaggtggctgcaaatgctgtggatcccaagaacgtgggtgcctggtctgggtccactgggctacgggaagggcagagggaggtacccataggctaggcactcgactgctcatccactgtccccctcccccaggactcccacgtccttatagagctgcacaagtcaggttttgcccgcccgggcgacgtggaattcgaggacttcagccagcccatgaaccgtgcaccctccgacagcagtctgggcaccccctcggatggacggcctgaactccgaggcccgggtcgcagccgcaccaagcgctggccttttggcaagaagaacaaggtgggggccgggacccttgggatggtgggggagaaggacagtgaagtggggacagtggggcccctattgagtcagccccagccgcctgaacgccgagtctcgggcaggaattttcctcttggctgccagcccggactggagggaaggaaggcggccgattggcctgggagtcccccgaggcgaaggcgggggcagggtggggaggtggggaggtccgtgg

SEQ ID NO: 90653 - DNA, 1022 bp, Homo sapiens
ctccgggttaggccggaatcctggaagcaaggtcaggtgggctgggggcggggcccaggcgcccgcctcgcccctcccaacctcccggcaccttcctttccccagaggactttgacccaacaggggcccgggagggacctgccccacctgcgggatgactaggcggggtcagaggggagggggcttccagctctctgcaggaatgggggtggggtgcctgaggggctctaccgcagtgcaatggggtggcctgttccaggtgccagatcctggaggtcccgccttaggggctgtgcctggacgtggggctgccccgaggacgggatcccaggttgtcggggaaggtggggggatcttgccgggtgggctgccctaggataggacggaggagtcgttttggagggagcagggcgttcttggggatcgagatccctgggggacgggatcgtcttaggtgggaagggggagtggggacccgcggaggtggctctgggggcaggacagcccgttttgaggtggacggccctgttcctatcaataccgctggatgcagcgtttgcttggggtgagaaccttcctggagtggagccgtcccagtttgggtggggctccgggaggcgtggcgagaggctcccctcctgggacaggctgggtttgggggatccggttagaacctgcagggtgctctgaagtctgcagtccagcgcagagggaacgctcacctcgcaggcgctgggctgccaccttgcggaatttgggtgcgtcccggaccatgtgacgcgccccgtgcagggtgcgcaacagccgctcacagctctcgtccagcggccccgcgacttcctcgccctccagtaggcgaaccatgggtgccacgtgcggcagcgccacctcgccggggtcgcagggtcctgcggagggggagggtctgatcagggtttggggctgtagatggggcatagggcagaggtggaacctaggacaaatgcaggggcggggcttaggactgagcgacagcggggtct

SEQ ID NO: 90654 - DNA, 4363 bp, Homo sapiens
ggcagaggctgcagtgagctatgatcatgccactgcactccagcctgggtgacagaatgagacgctgtgtccaaaataagaagaagaaaagcaaaaagaaaacaccatctctcagcacctctagcaatgctatttctgccttgacaattgtccacacacacagccagcatctgatgtgagcacatgtggtccgtgggtgtcggctgcagggacaagagtgggggtttgggaggatgcgtggcagggcccccagactcacccaggacgtgtccttctgccccgcagcactgacctcatgcgcatgtgctggcaattcaaccccaagatgaggccaaccttcctggagattgtcaacctgctcaaggacgacctgcaccccagctttccagaggtgtcgttcttccacagcgaggagaacaaggctcccgagagtgaggagctggagatggagtttgaggacatggagaatgtgcccctggaccgttcctcgcactgtcagagggaggaggcggggggccgggatggagggtcctcgctgggtttcaagcggagctacgaggaacacatcccttacacacacatgaacggaggcaagaaaaacgggcggattctgaccttgcctcggtccaatccttcctaacagtgcctaccgtggcgggggcgggcaggggttcccattttcgctttcctctggtttgaaagcctctggaaaactcaggattctcacgactctaccatgtccaatggagttcagagatcgttcctatacatttctgttcatcttaaggtggactcgtttggttaccaatttaactagtcctgcagaggatttaactgtgaacctggagggcaaggggtttccacagttgctgctcctttggggcaacgacggtttcaaaccaggattttgtgttttttcgttccccccacccgcccccagcagatggaaagaaagcacctgtttttacaaattctttttttttttttttttttttgctggtgtctgagcttcagtataaaagacaaaacttcctgtttgtggaacaaaagttcgaaagaaaaaacaaaacaaaaacacccagccctgttccaggagaatttcaagttttacaggttgagcttcaagatggtttttttggttttttttttttctctcatccaggctgaaggattttttttttctttacaaaatgagttcctcaaattgaccaatagctgctgctttcatattttggataagggtctgtggtcccggcgtgtgctcacgtgtgtatgcacgtgtgtgtgtccattagacacggctgatgtgtgtgcaaagtatccatgcggagttgatgctttgggaattggctcatgaaggttcttctcaagggtgcgagctcatccccctctctccttccttcttattgactgggagactgtgctctcgacagattcttcttgtgtcagaagtctagcctcaggtttctaccctcccttcacattggtggccaagggaggagcatttcatttggagtgattatgaatcttttcaagaccaaaccaagctaggacattaaaaaaaaaaaaagaaaaagaaagaaaaaacaaaatggaaaaaggaaaaaaaaaaagaactgagatgacagagttttgagaatatatttgtaccatatttaatttttaaagtctctggtattagcctcataagttattgactattccccggggttggcggggagtggggacatgagttggtctgcctgttgtggggccgggaaggggagggagtcaggcacaagtggcctctttgtttggtcttaaaggcatccatttctgggaatgaagccatgttcgctgctaacacttttggatgttgtgaggccacgtggagtgtgtgagagactaggttttatggatggtctggttcaggtaccaggtctgctggaaggttcctgttcggataagctggtagctacctagctctgagcctgccttcaagaacacctgtgttcatcctctgattctctgtgtgtacctcttgtggcgtttcctctcccgggtgtgaacatcctaaccgttattgtgcaaacccaagaacgtcagatcccaaagcacaacaacctggatggactttgggaacatctaagcaatgtaagagagaggtgcactgagagtacgtcttggtcccctccaccctgagagcatctgacggtcctcagtactgaactcccggaagctgctctgagcccggtgacctcatctgggccaggtgtggtgcctgagctgaatgctcaggtgcttacagtgttgcaatccctaagagagtagagtctggaggagaaaccgtgaaaaagaccttacacaccaccaagaacttccgaatgggcgtgaatccaccgtttcttctctttgcaaaaagaaccaccacagctgctcaaagaacacagtgaactcatcactttggttcatcaaaaaatcatcgcccatgcgttattcctgagtgcattttcttacaactttttgactgcttccttttcttcttctcttaagagttgtgggcttaagaatgggatagagtcataatggcaacctccaagccctctcaattcttgattaagaacacaggtagacatgaatcccaattgtctattgctatcttatttatatgattcgggaaaatacagcatgtaaaaatattgctgaggagcctcagtgattgggtacaagaagcaagagtacagaaattatttttgccaaatttattttgtaaatatgagggtctgtacctaaatttaaaaaaaaaacacgtagaactaggtattttgttctcttcttagtaaatttgtagtggttgtatactacactagctgcaattttcacatttttctaattcagaaaggtttttcttatattaggggaaaaagtatttattttaatatataaaatcactctgaaaatcactctcataaaaaatggagcgcatgtaaatttttatcaaagaaaaataaacaggtgaatgggggatagtgattttcttttttcagcacagtctacctcagtgtattgttaagatgtgattcaatcatggacatctttgagatttcagaattctacctggaaccggtctgaatcagggaacgtgtgtatcagctgattcgaatgccagggaccagtaagaattttgagggagggagttgggatggagaaggtatggcctttatgcgagcatagatccttttcttcctggctggtaatattcttctctgaatttaatcttcctttaaaaaaaaatcctccatctattgtcactatgttccccaaacataaactaagttccaggctgtcatgatgtatctgatatatggggtaacccagcaaggtgtaccttcctttggtgagagatggctgccggggcaaagacgggctttgattcagagcaagcattcccacctgttccatggaatccccctgaagtgagcacaaaggtgccctgggctccctgatggtttatgcccactcctttcaggctggtgatgcaccttacacacaaacacctaatgcaatgtctttttaaattctccaagtgggatgggagcatgtgagggaaattccaatccaaaacccattaatgtgctgaacgctttttttttttttttttttttttttgcaacaacaccttggacctctgtgttggggtttgactgacctcaagctgatattattggaccttgtgcagctttgataacccatgtgagagtctaggcaggaccagtggggcccaaatcttgctgctcttgtacttttaggcactgcccttgcagactcacctttctccacctgccctggagaaaggtagggtgtgctgggcctgccccttgcaaatgggattcaccagtttcatttatttgactctactgccacagtgaaaagagcaaacagctattgggttgcaaacctcctttgacattaggaaatgttgactttgtaacaataaaactttggtcctagaaagacacggttgtcctgggagtttgtagtgttaagttgcaacaacaacaacaaaaagcaacaaaaccagcttaggataacactttttgttgcttgttcttaaagatgtctcactatgattaaaacccttttcattaatgtagtgaaagccacacaggagttccttcttccaggaggagaataccaagcacatcactttctctctgcatcagtgatgtcaaatacgcatcagaaaatgttcaggttttaggagctgtcctaggtgctgtttcatcattggaagcagtgagaaagagaagcactgctgcttgtctggatataggctgaggatgattgagagaagctgtgggaactgacacaagggtctgcatag

SEQ ID NO: 90655 - DNA, 1032 bp, Homo sapiens
ttcggcatggtgtatgagggcaatgccagggacatcatcaagggtgaggcagagacccgcgtggcggtgaagacggtcaacgagtcagccagtctccgagagcggattgagttcctcaatgaggcctcggtcatgaagggcttcacctgccatcacgtggtgagtccagtgggggtgggacatgggctggctttcctgacccttccctttctctgcctcctcctcctgcacagagcgacagaggacacagggtgtaacctcctacccacccctcactccactaagcttcccatcctagaggtgtgaggagggatcattcccttctcaaatcccatcctctcccacttcgcctggaaccagactctatcactgtctcatcactttctggaatgtttcattgctttccagaatctttcatcactttctggaatcttccatcattttctggaatcttccaccactttccggaatcttccatcattttccacaatcttccattgctttttagactcttccatttcttgctttttcctggcacctttgtaacccaggaccacatagaggtccacctgataccacctgccctcgttcctactctcctttgaaggcagcaccaactcttcctgcctttctgctcctttgttcctctttgagtcctatgtgctttcatccttgccacacatatttatggggcatttaaagccctgctcttgtccctgtgatacagtggatacctgcccctgtagagcttccaaaacagcaggcggagacagactccaaaacctttatttttattttatttcatatatatatatatatatatatatatatatatatatatatatatatatattttttttttttttttttttttttttttttttttttttttttttttttcctgaaacggagtctcgctttgttgtgcaggctggagtgcagtggcacaatctcagctcactgcaagctccacctcctggattcacactattctcctgcctcagcctcccgagtagctgggactacaggcgc

SEQ ID NO: 90656 - DNA, 1029 bp, Homo sapiens
aggcaggagaatcacttgaacccgggaggcagaggttgcagtgagccgagattaagccattgcgctccagcctgggcaacaagagtgaaactccgtctggaaaaaaaaaaaaaaggaaaagaaaagaaaccatcagggtttaatgctcagcttctggcttaggaagtctggctcttaccgataatgataacctctgcatatatctttatccatagcactatggttataaaattctgcaattctcaaagtcgcttatgtgtcttagtctgtgctttgctgccttggcgtcatttctgagcaggatcctggctgtgagctccctgcgaggggtggacactcccagatgtgcaaagctcagccaccctccttctcctcctctcttcctcccaggagctgcatctctgcgtctcccgcaagcacttcgctctggaacggggctgcaggctgcgtgggctgtcaccggggaactacagcgtgcgaatccgggccacctcccttgcgggcaacggctcttggacggaacccacctatttctacgtgacagactattgtaagtctccatggcagcctcagctgactggggctgtgcttagcactgagcatggtgggacattgcaggggatgacttggagaggccgcaggtgctggccctggccttgactctcaggcctatcagctgctgcggtgcttgccctctttgatcctgcactttttttttttttgagatggaggcttgctttggagtgcactggcacaatctcagctcactgtagcctccgcctcccgggttcaagtgattctcccacctcagcctcacagtagctgggactacaggtgcccaccaccacgcccggctaattcttgtatttttagtagagatggcatttcaccatgttggccaggctggtctcaaactcctgacctcaagtgatccacccgcctcggcctcccaaagtgctggaattacaggcatgagccaccatgcctggcctgatcctgcacttaaaaaaaaaaaaaaaagtttcagag

SEQ ID NO: 90657 - DNA, 1028 bp, Homo sapiens
ggggtcagaaggacccttggttgagatgaccaggttagtgtgggattgctggataataaaatgctgcctaggccaggtgctgtggctcatgcctgatgcctgtaatcccagcactttgggaggcccaggcaggcagatcacctgaggtcaagagtttgaaaccagcctgggcaacatggcgaaaccccgtctctactaaaaatacaaaaattagccgggcatgatgatgcacgcctgtaatcccagctacttgggaggctgaggcaggagaatcgcttgaacccagaaattggaagttacagtgagccaagatcacaccactgcactccagcctgggcaacagagcaagactctgtctcaaaaaaaaaaatcagttgatgctttgtcttttgccacttcatggtctttttggttataatctttttggtatataaactcatttggcctgtttgatgagcccattttacatctctggttgttgagataccaatttctcagtagttactcatgaagcaccaacgtcttggttattttcacgagacccatttgtgcctgtatagaaattatctgaatcttgctaatacggacatatctttggcttgataagtggtggagctgttttcttttccattctacaatgttgttagtcttttaatacaaaaagaccataaagagaatcttaagaaatgcccccaaagtaggatttgttttctgaccacacattttctgatgacgctgcaatagaaactaaaagttaatttcaaaagattaaacagaaaacttcacttcttggtggttaaaagttaaacacttacaggctgggcgcagtgactcacacctgtaatcgcagcactttgggaggcccaggcaggcggatcacctgaggtcaggagtttgagaccagcctggccaatatggtgaaaccccttctctactaaaaatacaaaaattagccagatgtggtaacgtgcgcctgtagtcccagctactcaggagactgaggcagaagaatcacttgaacctgggag

SEQ ID NO: 90658 - DNA, 1050 bp, Homo sapiens
cagtggtgcgatctcagctgatgctacctctgcctcccgggttcaagcaattctcctgcctcaacctcctgaatagctgggattacaagcatctgccaccatgcccagataatttttgtatttttagtagagacggggtttcaccatgttggccaggctggtctcgaactcctgacttctggtgatccgccattctcggcctcccaaagtgctgggattacaggcgtgagccactgcacttggccaagtctcaagtgttttgaataagggatgcccaagctgtgttttttcattgagatgtcagggttgacagttcctttctctttggctgttcccgagttattttttcttgtggcattagattgttgggtgagtaacatgtgaccctatgggatgtaacttcccaggcctcatctgcacggcactcagtgtgacggtcttgtaagggtaactgccttctgctgttttgtcttgaaagcccttatcagaatgtgacggagttcgacgggcaggatgcgtgtggttccaacagttggacggtggtagacattgacccacccctgaggtccaacgaccccaaatcacagaaccacccagggtggctgatgcggggtctcaagccctggacccagtatgccatctttgtgaagaccctggtcaccttttcggatgaacgccggacctatggggccaagagtgacatcatttatgtccagacagatgccaccagtgagtgtgtcttgggaatgtgaattcgtatgtgaatcagacctcttgcttttaataggctgatgcagtgaggttgtataaaatgctccttgatatggttattggctttttttttttttttagacagggtcttactttgtcacccaggctagagtgcaatgcagtggggtgatcatggctcactgcagcctcaaactcctgggctcaagcaatccttctgcctcagcctcctaagtagaaggaactaccagagtataccaccatgtgtggcttttttttttttttttctttgagatgaagtctcactctgtcacccggact

SEQ ID NO: 90659 - DNA, 1212 bp, Homo sapiens
gttgaggttatttactacttttgtgtcaatagtagatacattttgtgtatacttataaatactacttagaggaatgctactgtgtatcttttgtcagcttatgtttagtaacttcatgttggtggcctgaaatccaccactggtaggaatatttacaccatggaaatcggcaaatgctatataaatctgggcctccctgggcccctccctcaggcagctgttaaacatttacaagctcaccaatggtttggaggcttaaaccagttaatagatgtgtctgacatgtgggtaatgatgtagacgtgccgcttttactgttagtgtttggttggctttcactgtctgatccagaattgctgcatatgcagacaggaattggacaaagccatttatttatttatttatttatttatttatttatttatttatttccctctctctctctctctctctccagtttgcccgaccatctgtaagtcacacggctgcaccgccgaaggcctctgttgccacagcgagtgcctgggcaactgttctcagcccgacgaccccaccaagtgcgtggcctgccgcaacttctacctggacggcaggtgtgtggagacctgcccgcccccgtactaccacttccaggactggcgctgtgtgaacttcagcttctgccaggacctgcaccacaaatgcaagaactcgcggaggcagggctgccaccagtacgtcattcacaacaacaagtgcatccctgagtgtccctccgggtacacgatgaattccagcaagtgagttctggatgtgggtctggggggcagccgagaggagaaggaacgtggggttggttgtgacgatgccgcttgttaaaactgtgtgcaaacccagggttaattggctatgagtgaggtctctgctctcagatgctacttttgcaccctgttttggtcctgggcttgggagtgggagttgactacctttttctctaaaggaccagatagtatatacttctggcattgtgcccaccattctttttttttttttttgagatggagtcttgccgcaagactcccaagctggagtgcagtggcacgaacctggctcactgcaacctctgcctcctgggttcaagcgattttcctgcctcagcctcccaagcagctgggactgcaggtgcctgccaccatgcccggctaatttttgtatttttaatagagacagggt

SEQ ID NO: 90660 - DNA, 1041 bp, Homo sapiens
tcctgatctccagtgatcttcctgcctcagcctcccaaagtgctgggattacacgtgttagccaccacacctggccaacattggcagttttgaagagcacaggccagttattttatcgaatgacctcaagctagggttagtaatatatggaaagaaagctacacaaatattttgtctttttcattgcctcataatgggaagtacgtgttgttgccttgtcccactattgtgggcaatgttacttgaagtatttttaactagaatttttaagaagaaatacatttcccgtaaggctcagtacccaagacatgcatatacctgaatgaaaagtttcccacaacaagatttactcttgccattttctagtactgtgggattttttccttttcttttccccctgcaggaggggatgctgctgggggctgaggacaatgctaaacctggatgtctcgaggacaggggatggggtttttgtgtcatctatgttctgatgctttttcatttaatacgagaacaggtttcctatgatttggcacactgggacattcgacatgtgtttgttgaatgaaaaaaagaaaaaagagaaatgctaacaatttgttgaatagtccataaaagagcaaagctggcctggcgcggtggctcacacctgtaccagcactttaagaggccaaggcagacggaggtcacgtgtttgagaccagcctggccaacatggtgaaaccgcttctccactaaaaaaaaaaaaaaaaaaaaaatcagttggtgtggtggcgtgtgcctgtaatcccagctactcaggaggctgaggcaggagaatcgcttgaacccaggacatgggggttacagtgagccaagattgcaccactgcactccagcctgggtgacagaaagagattttgtctcaaaaaaaaaaaaaaaaaaaaaagcaaagctattattaaaacacactccacacttcacccctgagccccatattgattttgtaataaggcaaagataatttttttttctttttttgagatgaagtctcattctgtc

SEQ ID NO: 90661 - DNA, 1007 bp, Homo sapiens
tggtcccgtatcctggattccgtggaggataattacatcgtgttgaacaaagatgacaacgaggagtgtggagacatctgtccgggtaccgcgaagggcaagaccaactgccccgccaccgtcatcaacgggcagtttgtcgaacgatgttggactcatagtcactgccagaaaggtacgccggggatacagggttctaagcagtgtctcgtgccttgttctagaaagcttaaaatgttttatggcttaaaaatgttaaatggtcattaggtaggggccggggaatagtgggtggtggcattcactagcccagggagtggcagacattttctgtaaagactcagatagtagatacttcagattttgcaggccatatggtctctgatgcaacgactcaattctgccactgtattggacaagcagccacaggcatgcataaatgtatgactgtggctgtgtttcaataaaactttatttacaaaaacaagtcgtgggccggattttgctcgagggcagcagtttgccaccgcctgtgctagtcagtgaatgttcttcttgcttgggagaggaaaaggagtggaaaactgtagattcggtttttttaaaaaaatagtttagttcttatctgattatagaagtgatattgcttataatagacatttggaaaaagacacttgtaaacgaaaaaaaagcaaaacattcatcttattccacaacgcatgtcgccgagagtagtttattgggggttgttccttctagtgatcttcaggaatctgtcgtgtctactgaaggtttccttaaccattcctgttattgggcattaagatgatttccaggccgggcacggtggctcaggcctgtaatcccagcacttggggaggctgaggcgggtggaccacttgaggtcaggagttcgagaccaacctgaccaacacggtgaaaccccatctctactaaaaatacaaaattagccgggcgtggcggtgcacgcctgtagtcccagctac

SEQ ID NO: 90662 - DNA, 1036 bp, Homo sapiens
ctcctctctttgttcaataatcctcggccgggtgcagtggctcacgcctgtaatcccaacaccttgggaggctgaggtgggcggatcccctgaggtcaggagtttgagaccaccctggccaacatggtgaaaccccatctctactaaaaatgcaaaaattagccaggtgtggtggcgggtccttgtaatcctagctacttgggaggctgaggcaggagaatcgcttgaacctgggaggcagagcttgcagtgagccgagatcacaccattgcattctagcctgggcaacagagagagactctgtctcaaaaaaaaaaaaaaaaaagaaaagaaaaaagaatcttcatttacccacgtgctttttcagcctctaaacacccagtaccccccaatccccattacctaccactgacctccagcctccaccctgtccagcttccccaggccagtcctccctgccctttccatctcactcttttctcactgttctgcccccagcatctggcttgcatctccgctgctttaccgatggctctcgaagttaatctctcatctcccagttgcgtctcctgcagcctcacctcacttgacccctctgggtttgacattgccagtcccccctcctggaaggctgtgtctcccgtctcacctgtgcctaagttcttctgttttactgttctcttctccttctacctgggctaagatgttggctctctcttcccagagggtcagtgtttcctttaatcttctctcagctcacttttttttttttttttttttcacttcttcacccgggctggtgtgcaatggcatgatcttggctcactacaacctccgtctcctgggttcaagcaatggtcctgcctcagcctctccagtagctggaattacaggcatgtgccaccccgcctggctagtttttgtacttttagtagagacagagtttcaccccattggccaggctggtcccaaactcctgacctcaagagatccacctacctcagcctcccagagtgctgggattacgggcatgagc

SEQ ID NO: 90663 - DNA, 1042 bp, Homo sapiens
ggctgcggcccgcgggtcgcgggcgtggaagagaaggacgcgcggcccccagcgcctcttgggtggccgcctcggagcatgacccccgcgggccagcgccgcgcgctctgatccgaggagaccccgcgctcccgcagccatggccaccgggggccggcggggggcggcggccgcgccgctgctggtggcggtggccgcgctgctactgggcgccgcgggccacctgtaccccggagagggtgagtctgggggcgcgggcgtgggcggggagcgccgcgatggggagaggaccccacccaagccaaaatcgagcccccgcttgtggactgagaaccctccccaggggcggggggcggtggccaggacggtagctcctgcatcgcgtagggggagcgggaagcctctgaccttggcctttgcccgcccgggctcgcgcctccgcgccctgcgtgcccgacctgagcccgaggaaccttgccccggtgcccgccccgccgcgggctcctctctggagcgcgcctccgacccgtgccccggcccctccgagcccaagtcgctccggagacacgacacgcgtcatctttgggtcgcggccgggaagtggggtcactgggtctggacagccccgaacagccaagtcccccgagcgcatatggtgtaggtagagccaagcgccctgagtgcctcaccggtgggtgacgctgcctggggtcagggactgcagagcccccctctacccaactaccttggatctaggcccgtggccaccccggactctaggtccatgtttacccttttgggttctgtttccagatgtccggaggcaaattctaaagccttagcaacagcagcaattgtagcagaagtagtggcggttttttaccctatttattgtaattggtatcaccgcacgccacagcctagtctatcttatctctctggactgtcacagtggcccccggaggcagatacagttatgcacccatttcacagaggagtaaactgaggctcatgtaggacgcataactcccttgccctaaag

SEQ ID NO: 90664 - DNA, 1725 bp, Homo sapiens
acagccctccctggcagggagcgtttgggtgcaaaaccgtgagaactatctgtgccatgggttttagtttcttgtataagaactcagttggtgctttcattgcggacgggaacgagaagctttcccctggtccttacatgtttcgttttgttttacgtttttaaatttcaacttttatttgagattgagggggtacatgtacaggtttgttacctggatatattgcgtgatgctgaggtttggggtgtgactgatctcgtcacccaggtactgagcatagtactcaatagatagtttcaacccttgacctcctccttcccttcccgctctagtagagcccagtttctgttgtcttcttggtgtccatgagtacccaaggtttagctccacttacaagtgggaaagtgcagtatttggttttcttttcctgcgttaattctactagcacttgagtgttttgctgtggctatctgccccttatctcttgctctgttgagattaaagcctggaccacaggattaaaaaacattcttaaagttttaccacggaagcgaagcggccaacacaccttttcccctttgccttgttttcgcggagatgaagctccagccagtagctttgaagggccccattctcttcccattgaccagagagagagttcaggacagtatagacagcccagtggccaagggatgagttttgcaggtgtctgagtgaatgattaatcctccagctgtaagaggtgtcaggagaggctgggcgcggtggctcaagcctgtaatcccagcactttgggaggccaaggtgggtggatcacgaggtcaggagatcgagaccatcctggccaacatggtgaaaccccatctctactaaaatacaaaaattagccgggcatggtagcgggcgcctgtagttccagctactctggaggctgaggcaggggaatcacttgaactcgggaggcagaagttgcagtgagccgcgatcgggccactgcactccagcctggcgacagagcaagactgtctaaaaaaaaaaaaaaagaagtgtcaggagcacaggcttgaggtcagatccgagctgggttctggtcccagttccaccacctgttagccgtgtaacttcactaagtttccgtcttcccatctttaaaatgggaataagggttggttggggtttctatgaagtaatctgtgtaaggtgcatcacagaagtgtctggcatatggcaaactttccatcagtgttatacaccctttgcatatgcgaatgctcccaggcttggatgtttaggttaacattccaaattataaagagtttggaaaatttgagcatctcggatgttgtttggaccgagtcagggtttacgctttatcagtagtttcctatttctgtaggtcagcaagcctttttgcgaaaaaaaaaaaaaaaaaaaaatgaagatgtgtttgttctagagcaaaaaagagcaaacagctggcaggcataatacatttcatttttgtaaacgttactttgttttggttttgtatagcttatttagtttttgttttcttctgaaattagtatgtgattttacttaaaattttttttttctttttagagacagggtctcactctgttgcccagactggagtgcaatagcacaatcatagctcactacagcctcgaactcctgggctcaaataatcctcctgccacaaactcccaagtagctgggactaca

SEQ ID NO: 90665 - DNA, 1114 bp, Homo sapiens
gactggagatctcctctcaaacaccgcatcatcagtcccacaacaaaatgtgttctaacttttcttttttttttttttttttttgagatggagtctcaccctgtcacccagactggagtgcagtggcaggatctcggctcactgcagtctccacctcccaggttcaagcaattctcctgcctcagcctcccaagaagctgggattacaggcacacaccaccacacccagctactttttgtatttgtagcagagatggggtttcaccatgttggccaggctgatctcaaactcctgatctcaagtaatccgcccatcttggcctcccaaagtgctgggattacagtcataagctaccccaccaggctgttttaacttttctaaacagatgtgtaaataatttttttttggaaacatggctcatgggtcatcagtgactgtctggacagctcagggattaatagccgggaggagctaagccccagttcctcctcgttccattgtgctggggtttcatggattattactgagcccatttgcacggtccggtctgcgttcaggagaatattgtcccatctatcttcagttagctgtttgagtattcgggttgggtgtgagggagctaacagttggccccttgctctgttctcagattcttgaggtttatttcccccttgaattgtcccaacagtcctgtgaggtggatgtcatttattacttctgcacagatgactaaacaatctcaggggagcctggtcattaattggccatgatcaaaaaggtagtgaaagcacatggcagcactttgggaggccgaggcgagcggatcacttgaggccaggagtttgagaccagcctggccaacatagtgaaaatccttctctactacaagtagaaaaaattagccgggcgtggtaatgcatggccgtaatcccagctactcgggaggctgaggcacgagaatcacttgaaccaacccaggaggcagaggttgcaatgagccgagatcgcgccactgcactctagcctgggtgacagggcgagagactctatctcaaaaaaaaaaaaaaaagcacgtggcagaataagattcaaacccgtgttccacctgatgcc

SEQ ID NO: 90666 - DNA, 1027 bp, Homo sapiens
ctcacgcctttaatcccagcactttgggagtccaaggcgggtggatcacctgaggtcgggagtttgagaccagcctgaccaacatggcgaaaccccgtctctactaaaaatacaaaattagcgggcgtggcggcgcatgcctgtaatcccagctactcgggaggctgaggcagaagaatcgcttgaacccaggaggcggaggttgcggtgagccgagattgcgccattgtgctccagcctgggcaacaagagcgaaactccagctcaaacaaaagaaatactaagtcctcaggacacagcctggaatgcaagaagcactcaataaatagtacctgttgctacgaattaccacatttttttaaatggtattttgggggtttgacgtgtagtttggggtaggaggcttttcgttttgttttttgtttttggatagtaccaggtttgggaagaatattctgagtcatacttaccttctaagctgcaagatgtcttttttaatttttctttgtcccctgaggtgcgggatgaaggggtttttttcttcctcctacctttttattctttttaatactgtcttgcttgtgtaacatcaaaatgaggcaagaaagagaaatcaatgaagtcatcttctcatcgatttagtctattcccaggtggccgaaaaggcaggaactgtgaactgaaaacttcatctggcatcagattttctttaattgtctctcgaacactcaccagtaagccagtgcttgctagaactctctagagccaggttgcactctcagcctaaaagaaaagtcttggctgaaacaaagaacagaaggatgggtggggacagaaaacctccctaaatgtgagaaaaggagtcattatttctgagaccaggccttgaaaccgaggtgcttgtctggttcacttgtttctttctttttgtttttgttttgttcagagacagggtctcactacgtcgcccaggctggaatacagtggtgccatcatagctcactgcagtctcgacctgctgggctca

SEQ ID NO: 90667 - DNA, 1048 bp, Homo sapiens
tgcaagatcttgctttccgtttccgagatgttaatgcgggatcttgctgtccgtttccacggtgttaatgcgggatcttgctttccgtttccgagatgttaatacggggtcttgctgtccgtttccgagatgttaatgcggcgtcttgctgtccgtttccgagatgttaatgcggggtcttgctgtacctttctgagatgttaatgcaggatcttgctgtccgtttccgagatgttaatgcgggatcttgctgtccgtttccgagatgttaatgcaggatcttgctgtccatttccgagatgttaatatgggatcttgctgtccatttccgagatgttaatgcgggatcttgctgtccgtttctgagatgttaatacaggatcttgctgtccgtttctgagatgttaatacaggatcttgctttctgtttcctagaaaattggcaacttctccatcgtgcggcggcttggcgtgcaggagtgcattctcctggttacacaacgcataaccaaatacccagtgctggtggagcgcatcatccagaacacggaaggtaggccttctccccactgccccgcccgcccgtgctgctgcagcacagggctctctccgtgtacccactccctatttgagcagcaaactgaataaattccctttgaaatccagtttgctgggtgctggggttccttccttttttttttttttttttttaagagacagagtctcactctgttgcccaggctggagtgtagtggtgaaatcatagctcattgcacagcctccaactctggggctcaagtggtccttctacctcagcctcccaagcacctgggactacaggcatacgccactacacacagttaattttttttaattttttttttagagatggggtctcgctgtgttacccaggctggtgtggaactcctgggttcaagtgatcctcccacctcggtctctccaaagtgctgggattacaggcatgagccatcacatctggcctgggtttttttgttttgttttgttttgagacagtcttgctgtgtcc

SEQ ID NO: 90668 - DNA, 1276 bp, Homo sapiens
cttagcttctgcattcgatagatgctctacctaggtaaaaattcagctctgggccaggcacagtggcttatgcctgtaatcccagcactttgggaggctgaggcaggcggatcacttgaagtcaggagtttgagaccagcctggccaacatagtgaaaccccgtctctactaaaaataccaaaaaaaatagctgggcatggtggcgggtgcctgtaatcccagctacttgggagactgaggcaggagaatcgcttgaacctgggagacaggttgcagtgagctgagattgcgccattgtactctagcctgggtgacagagccagactccgtccaccctaccctcccccccccaaaaaaaacctaaactctgacgtgttgcatttattttggagaactatttgcatctcaggagattacatttgggaagtgatcttgagggtcttctgagtggtggccttggagaacacacctcatagatcccacacgcccatacatagtgtgtccacacacctcatagatccacatgtccatacatagtgagtgtgtccacttctgttgtgttaaagtggaaaagaaagacgctaactctgctatgtgtggcagctggcactgaggactatgaagacctgacccaggccttgaacctcatcaaagatatcatctcacaagtggacgccaaggtcagtgagtgtgagaagggccagcgcctcagggagatcgcagggaagatggacctgaagtcttccagcaaactcaagaacgggctcaccttccgcaaggaagacatgcttcagcggcagctccacctggagggcatgctatgctggaagaccacatcagggcgcttgaaaggtaaaggcctgcccctgcccacctctagtgggtgccatcttggatcagtgggcactgtcttggagtggtgggcactgtcttagattagtggcaccatcttgtatcagtgggtaccatcttggagaggtggtcaccatcttggattggtgggtactctcttgattggtggcactatcctgtatcagtgggtaccattttggagtgttggttcccattttttattggtgggtgccatgttggattggtggcattatattggattggtgggtgctatcttgggttggtagcaccatcttgggagttgtgggtgccctcttagagtgatgggtgccatcttggatcagtgggcatcatcttggattggtaggtgccatatgggattagcagcaccatcttggagtggtggcaccatattggattggt

SEQ ID NO: 90669 - DNA, 1015 bp, Homo sapiens
cccagctactcaggaggctgaggtgggaggatcacttgagcccaggaggtcaaggctgcagggaacaatgattgcaccactgcactacagcctgggtgacagagcaagacctggcctccaagatagtttaaaaaaaaaaaaaaaaaaaaaaaggtttctaggatttcactgcaatagtatcttttttcccccagatggcaaaatatttccgctttgaattgtttgaaaagaaatgaggagcgtgacccccactcttagttcccctcaccaggcccttgacctccctgctgtttgggtgctgtggggtaaagggtgacctccccaatgccctctactcatgcaggactcaaagccacccgtcatctcgttacaaaagctcatcgtgagggaagtggccaacgaggagaaagcgatgtttctgatcagcgcctccttgcaagggccggagatgtatgaaatctacacgagctccaaagaggacaggaacgcctggatggcccacatccaaagggctgtggagaggtgaggagggcctgggggtctccccacccactgtgttccttccgctgattggtccacccttggcttcgaccgttggccatcagctgtgaccttgaactccctcatcccagcttgggacccatgacgccattccagctccttctgatgactcaacctgttggacgttgaggccaacgggcccagaaaggcagctgtaacctgggcctttctgcatgcgtgggccactgcacctgccatggcgggctctctgcattctagggccagatttgttggagcagggcatggcatcttgtccttcctccttgggccgagcacccctcagggcccagaaccagctggcttcccctccctctctttattttttatttttttgagacagagtcttgctctgtcacccaggctggagtgcagtgatgcaatctcggctcactgcagcctccgcctcccaggttcaaacgattctgctgcctcagcctccccgagtagctgggat

SEQ ID NO: 90670 - DNA, 1050 bp, Homo sapiens
ctctttctttttttcttttcttttttttttttttttttgagatggagtctcgctttgtcacccaggctggagtgcagtggcgtgatctcggctcactgcaacctccacctcctgggtttaagtaattctgcctcagcctcctgggtagctgggattacaggcacccaccaccacgcccagctaatttttgtatttttcgtagagatggggtttcaccatgttggccaggctggtctcgaactcctgacctcagatgatccaccctcctctgcctcccaaggtgctgggattataggcgtgagccaccgcgccctgcctcaatctgctctttcaacagtgagggaagccgactcagcccctgccttccagagcctttccgcagaataagacggcagagacgggggtcagtctttctccctccaggcccactgacatccttccacccggctccagtggccattgttcttggccccctggggacactctcatatcccgcaccttggcctggaatgttcttgtccccacctctgtgcctggccacagcctgttggtcctagagggctttctgtagacagcccttccccacaaagtcactctcccatatggccattgtcacacaatcagtgtatggtcattgtcatataacacaccaagtgtttcctgctggccctgggcagggccacatccagcattcgccagcccctggcccagggcggcctggtggaaggagctgcaggagcctgtacccgccctccccatggctgccccacagccctgtcctctcacttagacgcagattggcctgtcctggtggccatacctgaagtaagggtgtgcgcagggacagtggggctgaaatcccacggcacacagaagggggcaggcgatcaccaccccagtgagtccctccgtccacccgggtctcgctgccccagcgctccgtattcccccagcacacttccgcagggcgacccgtgcctcctgtccccttccttccacagtcgagggcatccagagcctgatctgcaggcagctgggcagcgccaacgg

SEQ ID NO: 90671 - DNA, 1037 bp, Homo sapiens
cttgcagctgtttctgtagggttagcggtggtgccggggtcactttctgaatctctttttttttttttcaaaaaggaaagtttttaatggaaagttgagccagaactaaaccagggagctgtctgaaatcatagcaccccatccgggtggcggggagatcaactccgagctgtttttccgaggcagtgaggaacggtgccggctctgcacggagctgaggacaggacagaccttgctttgagaaggagctgccggccggggccacgctccacagccgccgcgcgacagtggagccaagggttagggcaccaggaggggccaggtggcgtcggcagcatctgtccccagaatcaggcagaatccacttcccaaacagagccccacgcaggttcaccatgaacctcagggtcagggaatgagccaggcacgggggcatgggcagagagggccacggggcagggcccactgagggaacatcagtggccctccagtcaggttctgtgggtttggaagcccatcgtgaaaggggctgacctttgcccctttttacttggcattggttttgaaaccagctgtttcccaaactctgcttcccaagggcaaccgttgctgttcacacgctcagcctgtctgggggagcgggcctctagcttcagccagggcgggtacacaccctgggcacagggtcctcagcccccgggaaatgagctcccagggctggcgtcccaccttccaggtgggggctggcacatcacagactgtcgagagcgccatgtcccagggcatgcagaggatgcacctagagacgttgcagcaagtggacaagtggccgctgtgcgggcccctcgcttgtagtgagctgttgcagcttacggtccgttccctggaggggtggaggaaggaggtgttgggcagcatcaaaggtgctgggacatcccagggtggtgagatccatccacgatccagctccggtggagaaagggcccatgtcaagccttgttctgcaccccaagcattggtggtaggactgggtcctg

SEQ ID NO: 90672 - DNA, 1076 bp, Homo sapiens
tgagcccaggagtttgaggctgcagtgaggctatgatcgcaccactgcactccagcctgggtgacagagatcctgggtcaaaaagataaaaatcaaggcagtgcaattgatatcacatgaggcccaagggcgcacacacactggctgttgtgtgttcctgggccaggctgtgcaacaatgtctgccagaggccacatgtgcacagactctgaagggttgttctcagccagcagactaagcagtgccctcatcccatcccaccacacattggctgaggtgggagccccaagtatcttcagcgatgccagtgtgtgttgcccagtctcagcctggagcccttaaaatgctcacagtggccctgcgtcggcagcacagtggcatgaggccacgccctcgggtggcctgatgagaggtggcgcctctggcctgtgtgcccaggactctggggagtagagaacagccctcaatggctggaggccacttggggtccgtgggcaacgcttgctcaaagatggagaggacccaccgggctgagggcattcctgaaggtgggctggggtagtgtggtttccaactttgggtccgtcctgtggagggtaaggggccaggagccagcagtgtaataaccttcacccctgagccaggcgccagcaccacaatgtttaattgattcccgttccagctttctcaaggcacgacaggccccctcttcctcatcttgatttggatacaagacgccagctggcaggcaggaggtgctgctgaagccctgcacggcccctgaaaactgtcacggctcaggagctccaggctgaggcctgggggacctcgcatcagtccctccacccaccctgcccatgggtttcaccacaggcagctccatgagagccccggcccctgccctggcggcttctgctttgcgggaagggccctccgtgggctctggctgtgtccctgtgctcttccggcagtgtcagggggtagtggcctcggcctggccgccggcccgggccgcctggtacatgctgaggattgaggagatggtgcccatgaggcccactagccacggcgggaag

SEQ ID NO: 90673 - DNA, 1118 bp, Homo sapiens
cccttctaaaatgtccatgtcctgaacctgtcaacatgttcacctccaaggcaaaggatattttgccgatgggattaagctaaggattttttctttttttgacacggaatcttgctctgtcgccaggctggagtgcaggggtgtgatctcggctcactgcaacctccacctccccaaattcaagcaatcctcctgcctcagcctcccaagtagctgggattacaagtgtgcaccaccaagcccagctaattttttgtatttttagtagagacagggtttcaccatgttggccaggctggtctagaactcctgggctcaagtgatccacccgccttggcctcccaaagtgctgggattacaggcatgagccaccacgcccaacctaagctaaggatcttgagatggggtattaccctggatcatccaggtggtccccatgtcatcataggggtccttataggagggaggaaggaggatgagggtcagggaaggaggtgtgacgctgaaagcagaggtcatgcttggaagatgaaggaaggggccatgagccaaggaatgtgggtggcctccagaagctggaaaatccaaggaaacggacctccccctgggacctccagaaggcatcagcgcctgctgacactagcccagggagtgttctgacttccagccttcagaatcctaagataagaagtttctgttgcccagcactacagagttgtgctaatttgttccgacagttattctaaacaaatacacccacaaaaggaagaaacaacaaaacctccaaggaaaactctaagaggcaaagacccaccgcagtctgaagcctgtgctgttgctggggccgctgccactttgctaaggaggcaccgcccagggaccttgggtgctcccttctggcccatgccacttacctggcaacccccaggagcagagagagggcccacagggttgtactcagcgtccaccaccgagaagagtccacgtggaggacccgggcatcagccgcccaggccacgtgctcacaggggtagtagagctggtcagccaggttccctaggacggagacacagcggacaaaggcgtcctcctcctgcaggaccaggagcagagggggc

SEQ ID NO: 90674 - DNA, 1049 bp, Homo sapiens
tgtagtgagctgagatcataccatggcactccaacttgggcaacagagtgagactctgtctcaaaaaagaaaagaaaagggacccagtcatggtacttaccctgaaagtttgggtttaacacagaatcggacatccagtaaacatttaatgaacgttagtccctgcagtgagatagatgagtccccaccctgtgttgtacgggggaggacacagtggtgggcgtggcatggagcttatgccaggaggtggggtgaaattaatcaaagcaaagaaatgcacaagtgaaatccgtgtttgtggcccaagttagcagggccctgccccaccccagtggacatctgcagggccctccctgtcctcttccagggcctgtgccctgagggagatacaccccaacccccatcctagccatgccaacctctactaccctctccccagctcatcctgtttgggctcagtaatcagctggctgtgacattccgggaagagaacaccatcgccttccgacacctcttcctgctgggctactcggacggagcggatgacaccttcgcagcctacacgcgggagcagctgtaccaggccatcttccatgctgtggaccaggtgctggtgggcgggcaggtgctggtgggcaggcaggtgcaggtgggcgggcaggtgcagttgggcgggcaggtgctggtgggcgggcaggtgcaggtgggtgggctgcagagagcgggccggactcacaggccctccccttctctgcccacagtacctggcgttgcctgacgtgtcactgggccggtatgcgtatgtccgtggtgggggtgacccttggaccaatggctcagggcttgctctctgccagcggtactaccaccgaggccacgtggacccggccaacgacacatttgacattgatccgatggtggttactggtgagtgggcaggacgaggcttcactgttgggagcctgagctgctgggattaaaatcaacagctgtggctgggcacggtggctcacgcctataataccagcactttgggaggctgaggagga

SEQ ID NO: 90675 - DNA, 1467 bp, Homo sapiens
actacaatgtgagttttgcacatgcagctgggccttccacatggttactccacaccctccaaataaatccctacacacgcagccctcaccagccccggccaatggccccttgcaagcctcctcctcctacctgcccacaccagatatatctgtcactgcacctgcgcggggccccgggagcctgctcctttgtgcccacccagctgagtctagccgtgcgttgccctcggaccccctcagacgtggccacgccccctctaggcacccactggctcccatgaccacaccggctgtgccctcggcaaggccccgcccctcccacccccatctgggtgcccacagctgacctgagttgtggccacaccctcaacgaggctccctctgccccaacccagatcctcatcgccacactgcgggtggccctgcccagcgtcatgcgcttctgctgctgcgtggctgtcatctacctgggctactgcttctgtggctggatcgtgctggggccctatcatgtgaaggtacatctaacccctgatgtccctgacattgaccctgtgaccttgtcattgacactgtgacccccagatgaccccttggtgactgctgggagtctgtccactgtcccctgtggtccttggtgaccctgacactgaccctgtgccattattgttgtcacagttgttgatgaccctatttcgacctgaattactcccctcctgctctatctacccagaccctaggtcggccctgtggccctgtcattgacccgtggtcccggccattcacatgggaccccagcctgggacctggccattcacatagtgaccccagcctgggacccggccattcacgtgggaccccagcctgggtcccggccattcacgtgggaccccagcctgggacccggccattcacaggggccctagcctggaacccgaccattcacatggtgaccgcagcccgggacccggccattcatgtggggccccagccaccagctcctagccatttgcatgggaccccagcctgaccccagcccccggttcctggccatgccttggctccctctgaccccgccgcccctctggcagttccgctcactctccatggtgtctgagtgcctgttctcgctcatcaatggggacgacatgtttgtgacgttcgccgccatgcaggcgcagcagggccgcagcagcctggtgtggctcttctcccagctctacctttactccttcatcagcctcttcatctacatggtgctcagcctcttcatcgcgctcatcaccggcgcctacgacaccatcaaggtcagccgcatgcacccagccctgagctcgggctctgggtgccctggagtctgccatgagggggtcttggggacaccgcagggtgaacagagaagacccaggagagaatatgggagactctatgaaaccaaaaagagggtggttcagaactggggggcgc

SEQ ID NO: 90676 - DNA, 2029 bp, Homo sapiens
ttttgattttaattccggctgggcacggtgactcacgcctgtaatcccagccctttgggaggccgagggggggtgggggtggatcacctgaggttaggagttcgagaccagcctggccaacatggcaaaaccccatctctactaaaaatacaaaaaattagcggacgtggtggcaggcacctgtaatcccagctactccggaggctgaggcagtagaattgcttgaacctgggacgtagaggttgcagtgagccgagatcaagccactgcactccaacgtgggcgagagaccgagactctgcttcaaagacaaaacaacaattttttaaaaattttaattcaaatgaagtacaattgcaaatttagcctctgacttgcaccatcctgtatccagtgctcaaaagccagtgtggctggtggctgccatattggacagcatagatattgaatacttccatcgcctctagactgaagagatgggagcccaggggcagtgcaccgaggggaaggaatagctaaagcaaaggtctagtagcctgaaaaaacttggagaaaagatggcccctccatgaggccgagtgagaggaaggaagccttggctgggaccctgccacatccaatgtcaccggcagatgggtacacccccttttccccatgcatggattcagctgtcccacagacacattgactcaggcccttggaactacttcctgtcttgccttagcacgtagacatcacacacatgcatccactcaggtgggcagtctcaggccctgctcccactgctgtgctcagcgtgcatccagctcactcaatagatggtttctgagcatcgaggtcatgtcagccctggctctaggtctgtaggtgctggacctacagcagaaggcaaagacacagactggcaaagacacagcttgtatccaggttcaggggtcagggaaggtccctctgtgcaagcaaactgtggaacaacgggtggagcaggcccagcaagtgcaaaggcccggaggtgggaagcgatgcagatatggctggaggggagggcggacttcaagggccttggaggttgggagccactttcaggctgagcctcccggcttctctccccagcatcccggcggcgcaggcgcagaggagagcgagctgcaggcctacatcgcacagtgccaggacagccccacctccggcaagttccgccgcgggagcggctcggcctgcagccttctctgctgctgcggaaggttcgagtcccgggtctggcacattcagattggaggttagggaatggggaaaggggagcgagccagagaaaactgacgcccctcttccctgcttccttcctccagggacccctcggaggagcattcgctgctggtgaattgattcgacctgactgccgttggaccgtaggccctggactgcagagacccccgcccccgaccccgcttatttatttgtagggtttgcttttaaggatcggctccctgtcgcgcccgaggagggcctggacctttcgtgtcggacccttgggggcggggagactgggtggggagggtgttgaataaaagggaaaataaatgtgtcgttttcatttttagcgggaggagcagtccttgcgttaagcggtgtgaggccctttaaggcgcggccacactcagcatggcggcctcagtcggccttccaagcatggcgcggggaggaggggtgggagggtcgggagggactgcggtgcgactaggagtgaataatttaaaggggccgtgcctgcggagccgggcggaacgctagcggtgttggcgcggagtggaccccggctgcggcccctgggtgagtctgggtttccgttagcctcgcaggggtgtcccttcgagggtcgttagcgagcctccgctttcccacgatctgtcctccgattcctgttaactctagactttctgatgttcccataccccccacgtctcggcaggtgtttccacaccggtagccagctgtgccctgaggtggaagaggaccggccacccaggaa

SEQ ID NO: 90677 - DNA, 1050 bp, Homo sapiens
ccctggaggtggaggttgcagtgagccgagatcgcaccattgcactccagcctgggaaacaagagcaaaacttcgtctcaaaaaaaaaaaaaaaaaaaaaaaggtggccagcctgatttggccagcgggccagagtttgctgtacatgagccctggggaaaggggtatgcgggggtcttaggtttgcctgagccttctccgtgcccccctcacccccggcacccctcccctcccaccaggatcctgcgcatccagaaagagacgcccacgctgcagcggaaggagcccccgcccgcagtgctagaagctgacctgaccgagggcgacctggctaactcccatctgccctctgaagtgctttatatgctcaagaacgtccggtcagtgttggggtgcaggtgggggtggagggctgcagacgtggggccgccctgacctccagcctctgtcgcccaccgcctgtccaacagggtgctgggccacttcgagaagccactcttcctggagctctgccgccacatggtcttccagcggctgggccagggtgactacgtcttccggccgggccagccagatgccagcatctacgtggtgcaggacgggctgctggagctctgtctgccagggcctgtgagtgggcctccccaggggctgctgcaggaggatgggtggtggggatgggcagcaggcattggtctgtagagctggtggtctttggagatgcgtcatcgggagtcaggggaacgggtgaccgaggacatttggggtagtctgcgtagttgctcagtagttacaagtattgaacgatgggagatgcctgctcgttggaagggttggtgggttcccctgagaagggatgagaagtgtcagtgatcattgggatggatgagggggcgacatgccagtcaccagggcgaggccactgagggtccacggtctcctgtgtctcaggacgggaaggagtgtgtggtgaaggaagtggttcctggggacagcgtcaacagccttctcagcatcctggatgtcatcaccgtgagtgaccagtttctg

SEQ ID NO: 90678 - DNA, 1034 bp, Homo sapiens
tctctgcccccaggagatccagcccctgcgtctgttccccagccccggcctcccaactcgcaccagccctgtgcggggctccaagagaatggtcagcacctcagctacagacgagcccagggagaccccagggcggccacccgatcccaccggggccccgctgcctggacctacaggtacccagggacccgaggccagccgagcccaatctcccaggaagccccgtctcagccgccagcccctttttcagttctgcatagagtcaacctgaccttgtccagccccacagggactccatagcggggtacccaggtctgactcctatctggtaccgaggaagctgtggcctcgtccccaagggcccattggaattgctttaactagttaatcagtcgccagcatctccttatctcccaacctgctaatcctcctagtggctctgaggggcaggagcctgaacatgtgtctcccccaggggaccctgtgaagcccacatccctggaaaccccctcggcccctctgctgagccgctgcgtctccatgccaggggacatctcaggtttggagcactgggtctgcggggagggccatggagcttccaggtttgaatccaggtccaccgcctgcctgtcttgattgttttaatctgcgaaatgggaacactgccagtacttccccaggcactgttttgtagatattcattgagatagtgcttctcccacctgttaagagggattcagagggagagtgcaggcgttgattagtcatgtctgctacagcagtggcccatggcacattggtatccattggtctcagactgcaactgtggttactctcatctttttcttttcttttgagacctgtctcccaggctagagtgcagtggtgctgtcatagctcactgcagcctcgaactcctatgctcaagtgatcctccagccccagcctcccaaatagctggaactacaggcctgcaccactacacctggctcattttttaaaaatcttactctcatctttatggtttttgttgc

SEQ ID NO: 90679 - DNA, 1746 bp, Homo sapiens
tggggtccacgctgtccgggttctgtgttcatcacatcccctgcccgcacaggacgtgagcctgcacttcgtgctctggggctgcctgcacgtgtaccagcgcatgatcgacaaggcggaggacgtgtgcctgttcgtagcgcagcccggggaactggtggggcagctggcggtgctcactggcgaacctctcatcttcacactgcgagcccaacgcgactgcaccttcctgcggatctccaagtccgacttctatgagtatgacagcccgaagttggagtgtgggtggcactcggaggaccccaacccgtgggagtggccagaaccccatccctcaacctcactcctggaagagcagaagggagcccccagatctggcctcccagcgccggtgtaggacggttttgaggccttcctctttcatcccaagtctgttcctgcaggatcatgcgcgcacagcccagtgtggtgctgagtgcggcgcacacggtggcagccaggatgtcgcccttcgtgcgccagatggacttcgccatcgactggactgcagtggaggcgggacgcgcgctgtacaggtgcagctcccaccgcgctgctcaggcccggcctaggggtggggacctgggggtggtcagaccttgctgacctccacgcccactcaggcagggcgaccgctccgactgcacttacatcgtgctcaatgggcggctgcgtagcgtgatccagcgaggcagtggcaagaaggagctggtgggcgagtacggccgcggcgacctcatcggcgtggtgagcgcgacccccacccactgacctctggccttttccaggccagtccctcgacaactcacacacatcatcccgggtaatccagggagtggtgaatgcagctcccgacctctgaggtcacccagtccactccccgcccagacctcatttcgttggaaaaaggggattccgcctgtcgtggatccctgtcctctccctctccccagagctctaatgggtagcgagcgaggcttgcttccctacacccccattgcaggggagccctagatggggcagtacagccccctttccacccatcttcggcctcctcattccccacccaagcagccccaatcatgcacgcggccccccaggtggaggcactgacccggcagccgcgagccacgacggtgcacgcggtgcgcgacacggagctggccaagcttcccgagggcaccttgggtcacatcaaacgccggtacccgcaggtgcggcctgttgtgggcggggcagagaggcggaggcgggactccgggggggtgggggccgggcctagtgtgtgggcggggcttacagaggggcggggtcgagggaggggccgaagcgagagagtgagggcgggggctctcgggggtgggacccaggtaacgggcacccaggagccccggcataggagggagaggtgggacctggacagccgcttcccaggtctcactgaaatgccggcctccaacgcccccaggtcgtgacccgccttatccacctactgagccagaaaattctagggaatttgcagcagctgcaaggacccttcccaggtgagagccggccggcccagagcgtgctgggagatgtagtccggcgtccagagcatgctgggagggaagccttctttcctgagggatgctgggaaatggagttccgcgaagaaatcgtgcccctgagggtttcaaaccctaagtaggacccaggtgcagagca

SEQ ID NO: 90680 - DNA, 1050 bp, Homo sapiens
cacaggggcggggtaatgggtattcttttctgagttaggccccagccctgtggaccatggttcccagcctcccttccccacctacccctaggtccgacgctactccttaacagtgacatcatccgggcacgcctgggggcctccgcactggataggtgtgtgttgcagaagggagtggggagggtggtgggtgggcctggagcctcaaattctttcagacctgagttcaagttcttggcttccaaccacggagcctgcgtcttacccataggtcaatggggagattcgcagtggtgtgaatctgcccaccggagcacggacttccgtggtgggggtttgggtgtctaagttcctcccagcaacggagctatgtggtctcggggagcacactgaccccaggccaaccccaggatgacgctgcccccttcccaccctagcatccaagagttccggctgtcagggtggctggcccagcaggaggatgcacaccgtatcgtactctaccagacggacgcctcgctgacgccctggaccgtgcgctgcctgcgacaggccgactgcatcctcattgtgggcctgggggaccaggagcctaccctcggccaggtcggaagcccgtgccccctgatctcacccacctcgggtcccgtcctttgccctcccgtgcctgcaccaggccacgtgcaccctcgccatgggggtaggcgatcagggacccaggtgtggccaggtggtggtggggcggctggtgacctcagccgtccgtattccgcagctggagcagatgctggagaacacggctgtgcgcgcccttaagcagctagtcctgctccaccgagaggagggcgcgggccccacgcgcaccgtggagtggctaaatatgcgcagctggtgctcggggcacctgcacctgcgctgtccgcgccgcctcttttcgcgccgcagccctgccaagctggtgaggagcgggccggcccccaccttctaggggcgtggctggtgggcgaggcttgggagactggggcggggcctgggagggctgaggacagg

SEQ ID NO: 90681 - DNA, 1011 bp, Homo sapiens
tactgaccctaacccataacccccaacgagagcacccagggcccttggtgaccaccttgtggatggccttggatgaccacatcatccctaagtgttcctttttttttttttttttttttttttttgagactgagtcttgctctgtcgcccaggctggagtgcagtggcacaatctcggctcactgcaacctccacctcccaggttcaagtgatttatccgcctcagcctcatgagtagctgggattacaggcacgccccaccagcccggcaaatttttttgtattttagtagagatggggtttcaccatgttggctaggctgcttttgaactcctggcctcaagtgatctgcccgccttggcctccaaagtgctgggattaccagtgtgagccgctgcacctggcccctaagtgctgcttgctcaccccctattgatgaaccttatctgtgaccccatgtaactcctatttgaccctgtctggccccttgtccctagagcatgacttcggtgctggaacctgtgttggacctcacgtacccagtcacctccatgttcactgggtctgcctttaaccgcagcatccatcgggtcttccaggataagcagattgaggtaggcccacctcatcccctgccctgcctacccctccccggaggagccccctgctcctcccccacctcgatccctgtccccgcaggacctgtggctgccttacttcaacgtgaccacagatatcaccgcctcagccatgcgagtccacaaagatggtgggtgtccccgcccagcctgcagcaaccgctgacgccacgtggggttggggggatgcttccgggagggccgctgagcttctgggacgttgttaacacgagtgaccgtccaccctggcccgatcaccgaccactaaccgccacccactaatgccccggagaccccaggtacgtccgtccttgggggaggggagcagggagactcgtcggacgccttacccccctcacgccatccccgcagg

SEQ ID NO: 90682 - DNA, 1511 bp, Homo sapiens
agaatcaggcttttgaggggccagagaatgggcagacagagtggggacaagcaaagcagggttgcagacatggacccagcccctcatttcccacaggatgtgggctaccagtacgggaaggcggtgtttggaggctggagccgtggcaacgtcattgagaaaatgctcacagaccggcggtctacagaccttaatgagagccgccgtgcagacgtaagcctgtgatgcccccagggccactctgactccactgattacagaacccaagcccccttaaagtctccccgaaacctcagatgaccccacatgtccctgggttttgctgagctctcagacctctgctgacttcagagagttcccaccctaggatctcctctgagcccccaatgcaccactgggccccccaggggccccaagactctgtgggccccccctaagagcctcaccagtgtcaccccacaggtgcttgccttcccaagctctggcttcactgacttggcagagattgtgtcccggattgagccccccacgagctatgtctctgatggctgtgctgacggtgaggggcccaggggaccccccaagagggaggggagtggctggagatggcaggccagccccaatcccctcacctgtgccctgctccccgattccaggagaggagtcagattgtctgacagagtatgaggaggacgccggacccgactgctcgagggatgaaggggggtcccccgagggcgcaagccccagcactgcctccgagatggtgagagtgggtggcccagggtcccctcacatcccccagagggtcatgagtacagtgtcaggcaggggagccgggggcgtatttgagatcctgtgtgtgctgggtgctggctgacatgtgacgcatcagtgtcccgtgctgggtgacgtgtgtgtgaccttccctcgcaggaggaggagaagtcgattctccggcaacgacgctgtctgccccaggagccgcccggctcagccacagatgcctgaggacctcgacaggggtcaccccctccctcccacccctggactgggctgggggtggccccgtgggggtagctcactccccctcctgctgctatgcctgtgacccccgcggcccacacactggactgacctgccctgagcggggatgcagtgttgcactgatgacttgaccagcccctcccccaataaactcgcctcttggaaatggcttcctgtcgttttcggactggggacccaccttctgtgctcaggatggctggggctggggtctgacaccacctggtgcttgccccccacagggaatgcctttctagaatccacacggagccccactaggtgcttgtccccactctgccccttctctggctcctcagaagccagtgctgactccggaccacagggccagacattccgtgccaccctcccgggctcacaggtgctcttgggggcccgatatggcacccctcaatttctttctgtgtgttttttgttttttgtgtttt

SEQ ID NO: 90683 - DNA, 1075 bp, Homo sapiens
ggagctggggttcgcgaagccggccagagcagtcagggagctggacggccggggctcaggaccagggtcagggctaccccctcccccccaaggtgggcttgggggcccagcaggtcagcacccctcccccttgctgatggctgctcctctccccccagcacgcaattgccttctgtttgaaggagtcggggagcaaaccccccatggtaatgtatcccccgccccggggtcccaggagtccctgtccccagcccccgctgctggcctggctgctcgaagacatctcctctgcctcttgctgctgcccctcccctgctccaggctggccccccaactctgtctctgggacccccagcttcccgccccctcatggcggaaaccccaggcctccctgcccagcctgcatgaccgctgaccctgggggccagcctggccactcacctgacctggctcccatctgcagatccgataccgcaaggaccgtgtggtggcgcgacgtgccccctgcttcccgacggtgaccagcctccaggacctggccagtggggccgcgctggccgccaccatccactgctattgtccccagctgcttcgacttgagggtgagtaaatggatgtggaacagatcttgtgccggggagctgggcatcctaagtcccagcccctagaccctccatccccaggtccgcgagaccagcaacgatgcagtggtcatgagggcagcttccggaactggcaggcctgagtttgtgtctctctcttccccaatgagctttgtgacctcacacaagtatataaacctctctgtgcttccaggagttcattcctgcagcagatgaaacgtatggagtgtggactgtgtgccagaccttgttttaggcactggggatccagccagaatagagacacactccccacttcacagacggctctagctgggagagaaagatactaagtttatccaaaagtacttttttttttttttttttgagacgggagtcttgctctgttgcccaggctggagtgtaatggcatgatctcggctcactgcaacctccacctcccaggttcaagc

SEQ ID NO: 90684 - DNA, 1034 bp, Homo sapiens
ctcagggttcccagggtccccatagtgaccactcatcgcctcccccaggctccctgaagtcttccccgtccatgtcccatatggaggccctgggcaaggcctggaaccggcagctcaggtgagtagacctcacaggccagggtagggggtggagcaggctagggcgggttggggccgaggctggtcccaggggctgacccctccctccggccgcccagccgtcccctctcccaggctgtgtcattcagcaccccctttggcctggacagcgacgtggatgtcgtcatgggagaccctgtgctcctccgctctgtgagctcggacagcctgggccccccgcgtcccgcgccggccaggacccccacccagccacccccggagcctggtgacctgcccaccatcgaggaagctctgcagatcatccacagtgccgagccccggctcctcccagatggggcggccgacggcagcttctacctccactcccctgaggggccctccaagccatccctggcctccccctacctgcccgaggggacctccaaaccactgtccgacaggcccaccaaagcaccagtgtacatgccacaccccgagaccccctcgaaaccatctccctgtctggtgggggaggcatcgaaaccgccagccccatccgaggggtccccgaaggcggtggcttcgtccccagcagccaccaactccgaggtgaaaatgaccagctttgcagaacgcaagaaacagctggtgaaggcagaggctgaggccggagcggggtcccccacgtccactccggccccgccggaggccctgagctcggagatgagtgagctcagcgcccggctggaggagaaacgcagagccatcgaggctcagaagcgacggattgaggccatattcgccaagcaccgccagcggctgggcaaaagcgccttcctgcaggtgcagccgcgggaagcctctggggaggcggaagcagaggcggaggaggccgattccggtccagtccctggtggggagcggcccgcaggcga

SEQ ID NO: 90685 - DNA, 1026 bp, Homo sapiens
aggtgtgagtggctgggtaaggcctccatgggtgggagaggggggaaagggacatttgcacggtggggggcaggtatgtggggtgacaggggcctcagatgggatttgaccctgtctgttgggtaaggacttccacaaggggctgtgggggtgcagtggggtgagaggtcctccccctgtggcttaatgagtgaggccctcgggtatgtttgggggtgaggggtttccagtgggggctgacccagtcatgtccctcccaaacaaggtatgggtggccggacaagggggatagatagatgtggggaggggtggagaaacagggaggagtcatggatagacagatggatgaatggctggttgcatgggtgggtgggtgatggacagatagacggacaggaccaggatcttcagcgcacctccttgctcatcctctccttcaccccctcgcccccagcacgctcctaccacccctttcctggccctgccctgtgtccactgtctctccattcccatggctttcccagccggggacacctagggttacctgactggcctctgctgcctgcctccatcccgggccattttgcactgagtggtcggggattttgactgctccccttacccttgcttttagaatgaaagtcctccccagggtggccgggcgcagtggctcatgcctgtaatcccagcactttgggaggccaaggcaggcggatcatgaggtcaggagatcgagaccatcctggctaacatggtgaaactccgtctctactaaaaatacaaaaaattagctggcgtggtggcgggcgcatgtagtcccagctactcaggaggctgaggcaggagaatggcgtgaacccaggaggtggagcttgcagtgggcctagatcgtgccactgcactccagcctgggcaacagagcgagactccatctcaaaaaaaaaaaaaaaaaaaaaaaagtgagcacagcccaaagccctggggaggacttccttttcattttttttttttgttttgttttctttt

SEQ ID NO: 90686 - DNA, 1065 bp, Homo sapiens
ctggcccgcttttgggccatctcgtcctcaggcttgtcttcatcctggggacagacgccgagtccagccagccaccccctcccccaacatggctggaggcccatcttccctccacccagcctgcccgccacccacctgtgcttttgttttcatcattgttctaaatgcacttagttggtgcctactgtatgcacagccccacactaagtactgggacacaacagggatgggatacactgggtgccgctcacacacacactgcttaacccaacggggaagacaaaagcagcagacagcagtgagtgccagcaaaagctcgtgttgggcacagacactctacactgcgggaggaccccggcctggcctggagacacccaggaaggcttcccagaggaagtaccctgtagaatgatcaggatttaactaggtgggcgtacagagcagagcgttccaggcagaggggacagctagtgccgaggccctgaggctggagcaaacctactggggggcacggaagtacaagggggccagtgtggctgggacacagagctgaggacagtggcgcaggactaagtcagaagtgagtacaggccagacgcggtggctcacacctgtaatcccagcagtttgggaggccaaggcaggtggatcacttgaggtcaggggttcgagaccagcctggagaaaccctgtctctactaaaaatgcaaaaatcagctgggcgtggtggcatgctcttgtagtcccagctactcaggagggtgagacaagagaatcacttaaacccaggaggtggaggttgcagtgaaccgagatcatgccactgcactccagcctgggccacagagcgagactctgtctcaaaaaacaaaaaacaaaagaaaacaaaacaaaaaaaaaaaatgaaaaggaagtcctccccagggctttgggctgtgctcacttttttttttttttttttttttttgagatggagtctcgctctgttgcccaggctggagtgcagtggcacgatctaggcccactgcaagctccacctcctgggttcacgccattctcctgcct

SEQ ID NO: 90687 - DNA, 1049 bp, Homo sapiens
agctgggaagccagtgccagcctgggttgcagggcaggccttgcatctgagagagacacccaggcaatggcagggggcaactggattgtcaaacacagatctcagagaaacctggaatcactggcccagaggtagatgccaggcctggaaacaccaggctggccaggggagacaagatcaagttagaagttggccccatgccaaacgctggttagggccagtaacaacagccacacagaccaggagaatccagcaagcgggggtggccaaggccacaggaagggccagtgggacacctcgagcctgagagatcagttcagaggcagcttcgaaacagccctggctgggggctgggagtgccctggctgaagctgcattaggggattatgggggttgaagacaggagttggtttgagaaagaacaggagactaaaaacacagccagggagtgtgggaccccggccagcctcggagggggggacaaggttcaacttctctttaaattattttattcaagaagtgggggaggacagacaaggggactgagctgagccctgagtccctgaacctcccagctcagcccccacagcaggactggactcaaagtcagagggtggagactccagccccacccagacacggttggggacagacaggacccaggaataccgactgactgtcctccaggggatggcggccgcagcacacagggcccggcccgtggaccgcccgggtggggctatttgggggtgccgccgcccttcttgggagtggtgggtttcttgccctgccagaggtgtccctggatggtgaaggcatcgacgctcatggacatggtcttggcggggatctgggtgaagcgcttgcggtccgagttgtacttgtagatgccttccaccatggcgggcgtgacggtccggggcccataccctgccagccgcgacagctcctctgtctcccccgacagcgtgtagagcgcccggaactggcagctcgagtcgcgaaagaggatcaggaagtggttggccttgcttttctcaatttcctgg

SEQ ID NO: 90688 - DNA, 1038 bp, Homo sapiens
gccgtcccagctggctgagttcctgatccagggcatctcagcccggcctgacctgggctttccgggtctgggagcctcggatcctgatggcaatctccttgagggctgggccatcacctgggggactgggatagtgcaacgtccgatgtgtgggaggggcccccgtggcgctgaccccctgctcccaccccctagtgtctgacctggcccctgggcagagtggcatggacgacatgaagctgctggaacagcgggcagagcagctggcggctgaggcggagcgtgaccagcccttgcgcgcccagagcaagatcctgttcgtgaggtgagggcggatccttggacgggacaggactgggacaggtcccaagggggcccggggtggggaactgaggcagcatggcccgtccctaggagtgacgcctcccgggaggagctggcagagctggcacagcaggtcaaccccgaggagatccagctgggcgaggacgaggacgaggacgagatggacctggagcccaacggtgagggcccggctggggcggggacggtggcattaccagggtgggcctcgggggacaggccaacgccaggagggtgactggctcccgccttccccacagaggttcggctggagcagcagagcgtgccagccgcagtgtttgggagcctgaaggaagactgacccgtccctcccccatcccccctccccaccccctccccaatacagctacgtttgtacatcatggtctgagcctccttcctgctgcccaggtgcccgagggagtacagctcaggagtgcctggccctgggccgggattggctgctgtgggaggtggggcggctgggccccaggccagatactgcccggcctcaccccgcagagccagttctggactcgagaggccagtccctccgctgcctggggccttggagtgggtcctgcccggaaacttccttgagcctctgtagcctgggaagggcaatccagcccctggctgcccaggtctcgccagcccctgcctctcagagccctt

SEQ ID NO: 90689 - DNA, 1050 bp, Homo sapiens
tcacgcgcgtgctcgtccgacagcacctggacaccggggttggggaggccgggagtgaggccggggtagctcgggggctcccaacacaccatggccatccctgtgcttccagaaggctcctcctcagcccctcccacctgcctggaccccttccgtctgctcagggacctctggccccggcccagccccccacggtgggtacctcaatggccttctggtagatgccgcgggtgtgggtgaccccatagatctcggccgcccgcttgatgtagatgttgaacatgtcatactgctgggcgggctccacggccctggtggcacgctcgtacacggccatggcatgccgggccaggccccactcctcctccagctgtgcgtacagcaggtacaaggctgggcggggtaggcggggagaggggagcacggtcagccggggccagtcagaaacccagcccgcccgccaccccccccatgccctctgcccgcctcactcttggcatattttggggggcagccgtccagagcctgttcaaacaggtcccgtgcccgctccagcttgcggcccccatagcgggcaatgaatttggtcaggtaggtgctccagatgtcggacacgttgggccacttgaacagcgagatgccgcgctcgtacgcctgttaccagagggagagtcacatgtgagagtctgcagatagagaccaccaggcacccgggatgtccttgggtggcgtctgtagggagcctgccaggaactcccttggggcccttccctgtccacgcctccctgtccctaatggcagttgtgggggtctgtcctctgcactgtctccctctgtgagaaccccaagaacaggggtgcaatgggacctgctaagcacagtctggccccataggaggtgacatgatgggtgaaggtgggtggctccccagctccgctgacgctggctgcctgtccccagggagaaggccgcaccccctgacagaggggcaggcagtagcacgcgtatgcatgtacgacctccccatttgtgtatctgtataatgcccac

SEQ ID NO: 90690 - DNA, 1058 bp, Homo sapiens
ctctctccttagcttacagacagccgccttctccctatgtctttgtgtggccttctctttgtgtgtgtcacttttgaaatttcctcttcttataaaggacatcagtcataatggattaggtggcccctaacgacctcagtttaacttagtgatctcatcttcaaacgaatctactttctgaggtactgggggttaagatttgagcatatgaatgttttgaggggggcacagttcattccatagcaggcacagaatcctacttccacgtgcacccatgactcatggggagggtgttggtgccagtgtgtgcgggctctccctgccccgctgctcaggagacgggttgtggggtccagggggtgggttgcgtgtccgtgggaaggccatgtcccgcggccggagcagtcatgtttgagtgtgtgtttctatggatcgtgtgggcattatacagatacacaaatggggaggtcgtacatgcatacgcgtgctactgcctgcccctctgtcagggggtgcggccttctccctggggacaggcagccagcgtcagcggagctggggagccacccaccttcacccatcatgtcacctcctatggggccagactgtgcttagcaggtcccattgcacccctgttcttggggttctcacagagggagacagtgcagaggacagacccccacaactgccattagggacagggaggcgtggacagggaagggccccaagggagttcctggcaggctccctacagacgccacccaaggacatcccgggtgcctggtggtctctatctgcagactctcacatgtgactctccctctggtaacaggcgtacgagcgcggcatctcgctgttcaagtggcccaacgtgtccgacatctggagcacctacctgaccaaattcattgcccgctatgggggccgcaagctggagcgggcacgggacctgtttgaacaggctctggacggctgccccccaaaatatgccaagagtgaggcgggcagagggcatggggggggtggcgggcgggctgggtttctgactggccccggct

SEQ ID NO: 90691 - DNA, 1742 bp, Homo sapiens
cctcgaaagccaaacgggctggccatgctcctggctgggggagccgccagtggggtgtgggcggtatgcgcttcgcagcgccccttccaggggcacgtgtaggccaaggctgtcggaggcagcagggcaagacccgtcagggctgggtagagagaggggacctgagctggggtgggcgagccaggtggaggacaggcgggctggggaagagggtcaggcaagcgagagggacgctttggagcaaattctgaggcctcggaggatgagctgaggcgagggtccctgcagggtggacccataggcgctggggggtttttggccacctattgggtgccaagtgcttcacacatgtgtctcagtcgagccctgaggtcactgtgtgcaaagggcagtcacccagtttactgaggaggtcctgaagctcccaagaccaccctggcagtgcagggcagggcgggggtgagaaggctccacggaggctctgtcctggggtcactacccagaggtgctggatgcgtcactacccagaaggcccccaggggttccacattgaggctggtgctaagagtgctgctgcctgtcccctgcgccactttcctctcacctccccttccctgggtccccacaggctcgggacgtgtacgaggaggccatccggacagtgatgaccgtgcgggacttcacacaggtgtttgacagctacgcccagttcgaggagagcatgatcgctgcaaagatggagaccgcctcggagctggggcgcgaggaggagggtgagcctctgggggccccggctggtggggagagagctgagtggacattagcggtaggggcgggacacatctcaggtgaggcagccctgggaggctcagctgggggccagcagggaaggaggctgagtggatgcagggggtgtgggggtcttgaaggagccaggaatggggacacttctcaggcctgggccagagcctggcagggcaggagggctaggggaacagtgggggtaggagggggtatccacagtacctggggctgggggtggggctcaggtggacacccgagctgagtgtctagggcccagagcacttggctgggggctggagcggagtgagggtggggagtggaggcggtggcatccggggacctgcatcctgggtctccgcccctgacaaacatgttcgcggctcccagatgatgtggacctggagctgcgcctggcccgcttcgagcagctcatcagccggcggcccctgctcctcaacagcgtcttgctgcgccaaaacccacaccacgtgcacgagtggcacaagcgtgtcgccctgcaccagggccgcccccgggaggtacatgaagcctgccccagtcctacccctgagggccagtttcctgcagaactggggagccacccaccttcacccataatgtcaccttctaggggcctgactttgcttagtaggtccaattccacccctgttcttggggttctcctcctgcccgagccccgcccctcagagccacagtccctcctggccccaccccttggagggccacagctccctcgtggccccgccccttggagggtcacagctctctcctggccccgccccttagggccacagctctctcttggtcctgaccattgtcaagggccatagttcgtttctggcctctcccgacaggggccacagcaccctccaggccccacccctcagagccacagctctgccccgaccgtcatctgc

SEQ ID NO: 90692 - DNA, 1060 bp, Homo sapiens
gggttgagcctaacccagtggggccaaggctagaccagtaggaaccgggctggaccagtggggctgaggctggtttgacagggcttgcttttgcccaagacactcataaatgggtggggggggacgccccgaagccactgaatcgggaggtgggcgtagccctgccaccccactgactgcctgaggggtggctcggtccccagctgagtcctgagagtgcagaggagtacattgagtacctcaagtcaagtgaccggctggatgaggccgcccagcgcctggccaccgtggtgaacgacgagcgtttcgtgtctaaggccggcaagtccaactaccaggtgggcctgccgggagccggcaactgggtgggagggccaccccctccatgactgagcctgagactctcccccactgccccatgccctgcagctgtggcacgagctgtgcgacctcatctcccagaatccggacaaggtacagtccctcaatgtggacgccatcatccgcgggggcctcacccgcttcaccgaccagctgggcaagctctggtgttctctcgccgactactacatccgcagcggccatttcgagaaggtgcatgctggcacacggggctctgggttcggggcggggtctccctccgacactcggggacacatgttgacacatgcacaggcagaaaacatgccatttatggctgggtgtggtggctcacacctgtcatcccagcactttgggaggccgaggcggtaggatcacttgaggtcagcagttcaagaccagcctggccaacatggtgaaaccccatcactactaaaaatacaaaaattagtcagacatggtggtgcgcgcctgtaatcccagctactcgggaggctgaggcaggagaatcgcttgaacttgggaggtggaggttgccgtgagctgcgatcgcgccacggaagtccagcctgggtggcagagcgagactccatctcaaaaaaaaaaaaaaaaaaaaaaagtgccatttttgacagacatgcatatccctgcacacgattactatcctgctgagggtggg

SEQ ID NO: 90693 - DNA, 1050 bp, Homo sapiens
gggcagggcaaatggttctgggggtgtccataaagctgaccgatcagcatctgtcccctcctattccccagctacaaactctggtaccgatacctgaaggcgcgtcgggcacaggtgaagcatcgctgtgtgaccgaccctgcctatgaagatgtcaacaactgtcatgagagggcctttgtgttcatgcacaaggtttggggctcggcgaggggatgaatcgggaagtggagctcagtccatggtggtgggtggggcggggacaggggctgggctcagcatgttagggatgggggcttggattcctgttgcttctttgcatgggaagttgggctggactcagtcctggagctgggggtttctgggtcccgccgcatttatgtggtggccccaggtgtggctcagccacaggacatcgagtgtctgtggccaggccatggagtccgtggcttagccccagccgcctctccccacacccccagatgcctcgtctgtggctagattactgccagttcctcatggaccaggggcgcgtcacacacacccgccgcaccttcgaccgtgccctccgggcactgcccatcacgcagcactctcgaatttggcccctgtatctgcgcttcctgcgctcacacccactgcctgagacagctgtgcgaggctatcggcgcttcctcaaggtgagcctagcaggtgcgctggttccccaggttagtttccagaaacggcctcactgtgacactagctccgcgtaggatgtcacccagcagacgggatgtgggaagaggctcctggagatgcatgtgttttgttgttgtccgtgattcatgtctttattttccaaatagtttgttcacactggtttcacattaggcatagcgatgggtgctgaggacagtgtgactaagacactccctgcctgcacggagcttttagtctaagtaggaagacagatgcatatgagctgatggcatgaactagagtaaaaccacagccatgaagagggccaggaataggggtggggagaagcaggcagggtggagagtggaa

SEQ ID NO: 90694 - DNA, 1473 bp, Homo sapiens
gtggccacctgagaaggtaagtgatctcttcttcctgccagagggatggaggaggctggattcttgtatccgggatgggttttagatgaaaattttaggccaggcgcagtggctcatgcttgtaatcccagggcatgggaggctgaggtgggtagatcacttgaggtcaggagttcaaaaccagcctggccaacatggcgaaaccccatgtctacagaaatacaaaacttagccaggcatggtggcaggcgcctataattccagctgcttgggaggctgagggagaagaatcacttgaacccaggaggtggaggttgcagtgagcccaagatcacgccactgcactccagcctgggcaatagagtgagactttgtctcaaaaagaaacattttactctcagccatgagtaaggaaccgagagcagaggagtagatggtttccttattgccttctcctggaagagtgaagcggatcccacgcggacccctttgtaattggcagggggcttccagtgaagacactgaaccctgaagccgtggtctggggcagggtggtgggagaggtgggcgggggggggtggtcccggctctgaggtgtgtgcccctccccccttcctgtcccacccgcttctccacccctagcttcaagagatagaggaattcaaagagaggttacggaagcggcgggaggagaagctccttcgcgacgcccagcagaactcctgaggcctccaagtgggagtcctagcccctcccctgatgaaatatacatatactcagttccttgttattcatttaagtgttttattcttttatcagtttttgggggccgagtgagacccaggatgcctcaggccctcagggggcttgtgtcgggggctgggggctgctgttccgacggaagccgagagcggtcgggtcctgaggggtgagcaggggttggggactgagggtcccagctcgtttctgtgctccgtcctgtggatgaagaggggtcagccagggggagggctcaagggcagtgccggccacaggtggcgaacaatggagagagggtgcaggtagccaccgtgtcccacctcattgtgagcactggtctatgtttaccctcaatatctgccatttagggtggcatttgagtgtgaggtggcaggtcttggggccctcgctgggatcttgatcagaacccaagcttcgtgtatgtgtgaagtcaacagatgtgagtatacagatgtatatatcctatgtgtgagcttacgtgacttcctccctgggatactttcctaggaaggggtcctattttctccctttggcctccccagaaccttcagacttgggggcaggagccacaagttccagccatgggtcttacactagcatggcccctgtataaccttgggcccctctagccactgcctgggccttggtcctcccatctgaagtcagggcagcggatggacagagatggggcag

SEQ ID NO: 90695 - DNA, 1720 bp, Homo sapiens
cctgtaatcccagcgctgtgggaggccagggcaggaggatcacttggggccaggagtttgagaccagcctgggtacagagcaagaccccgtctcttaaaaaaagaaaaagaaagaaattagcttggcgtggtggcgtgcacctgtagtcctagctactcatggggctggggtgggagagtcgcttgagcccgggaggtcgaggctgcagtgagctatgattgcactgctgccctccagcctgggcgacagagcgagatcctgtctcaaaaacatacataaagtaaaattttaaaaaggggaggtacccacagagtccaaggagctcttgccttgagttctatcccactaggcccttgcagggggcagcgtagagcgcaccgcggggttgtccagccagcttaagggacacgggctggggtatttatccactgactcctgcaggcatgggtttagggttgacctgggcctgcctccaattcggcaaagcaggcttcagggaccagggacggctcccaggaggtgcaggtggcggcagcgggaagcggggcaggtgtgcacctgcagcggcaaccctggtgcttctgtcccctcctcgcccaggtgttctccctcgatgctccccacagcacctacaacctctactgccccttccgggcagaggagcgcacgcggcagctcgaggtgctggcccagcagattgccacgctgtgcgccaccctgcaggagtacccggccatccgctaccgcaagtggggaccccacccagccccaccccgatgccgacccccccttaaccgcgtgcaacacctaacctttaacctctcttgtgaccccagccccggccctaccctggcccctgactctcaccttcaaacccatccttgaccccatcccctgatgatgtcccccgtgtctgacctccccgccaggggcccagaggacacagcccagttggcccacgccgtcctggccaagctgaacgccttcaaggcagacactcccagtctgggcgaggtgagggggcgtgcttgggaggtgaggggcagccccaaccggctcagggtcagtgcctcattcctgccctaaaccccaccccagggcccagagaaaacccgctcccagctgctgataatggaccgggcagctgaccccgtgtccccactactgcatgagctcacgttccaggccatggcgtatgatctgctggacatagagcaggacacatacaggtctgcagacttggaacccgtccccacccttgccactgacctggttccccagtcctcagctcccctgacccccaggctccctccttcctccccaggtatgagaccaccgggctgagcgaggcgcgggagaaggccgtcttgctggacgaggacgatgacttgtgggtggagcttcgccacatgcatatcgcagatgtgtccaagtgcgtgcacacggggaccggatcccccccccaccgcccactgtgggcctggtagcggccttgggatccctggctgctgccaagtctttggccctcatgagcacccctcgtgtgactccagactggcctccaatttcaccccacctctccctgtcccccctgagtgggctcacccatggcctgtggctcctctcccctcactctcacccccgcccaccctcatggccaggaaggtcacggagctcctgaggaccttctgtgagagcaagaggctgaccacggacaag

SEQ ID NO: 90696 - DNA, 1058 bp, Homo sapiens
ctccaaggccccacccctcactcaggtcccacctctccaaggctccgcccctctcccaggtcccacctctcttaaggctccacccctctcccaggtcccacccctccaaggttccacccctcatccaggtcccacctctccaaggttccacccctcacccaggtcccacctctccaaggctccgcccctcacccaggtcccacctctccaaggctccgcccctctcccagggcccacctctccaaggctccattcctctcccaggtcccacctctccaaggctctgcccctcacccaggtcccacctctccaaggctccattcctctcccaggtcgcacctctccaaggccctgcctacctctccaaggtcccacccacctatgaataggccacattcctgtcctgggaccacctgtccaaggctctgcccctcacccaagtctgacctctccaagccccatccacctatgcacaggccacaccctcatcctaggaccgtttctccacaagacccactccttccccaccaggtcccacctctctccaaggcccctccacctctccacaagccctgcccctcccccagaaccccccatctctacagttcagcccctccccaataccccgccttggcaggaccatcacccctgccccccgcaagccctgccccacctgctccacactacacagcttctccaccgagcccttgaagtgcttcatacaatcatctgctagatgcaggtgcgtagaatactgcagggtgcagggtgggggttgggggataacaaaggctgagtcaaggcagaacgcagacagagcatggggttgaggggccgaggtgtccccgctccctgcccacccgagcacaccttattcagctccttctggtactgcggcatctttttcaggatctgggataggtctttgatgttcgcctggggaagtagggggaagagggtagggattggggggcgaagccaggcagtgcccacctgggtctcagtccaggctcgaaatccaggctgtggccctgcgcccatggggaggggggcttcct

SEQ ID NO: 90697 - DNA, 1862 bp, Homo sapiens
ctctctctctcacccttctctctgccttcccctttctctctgttctctgtcttgctcccctcccctctccgtcccccttctgtccccatcttcctctctctgtttcctgcttcatctcttgtctctctctttgccttcatactttgtctcactgcttcttatctctttgcctatctctgcctctgtctttgtctttctctggctcgctctctctccctttggctttctctctccgtctctctctggctcactgtttctctctctcgctttcttgctgtctctcgctctctctcgctctctgttccacttccccatctttgcctgccatcccccaccctaccagccacaccaggcgcagcccctctgtgaccagcctccttcccctcaatccccctgctgccctccctgccctgcctgtagggctcggggacctccagccggctggagccgagagaacgcatggagcccacctatcagctgtcccgctggaccccggtcatcaaggatgtaatggaggtactgggtggcaggtcagggtgggggccagccctccgcatcggctggcggctcagcctccctcctgctgaggtgctaagcctcagggcttaggggaaaatgctcattgctggcattcccttggcaccgatctgctctgctgaggggggcacgccaagcccgcagctgaggaattggggtgacagcggggcctgtgctggggagcctcacttcctccccacctgccggctgcctccgctatatctctctagtctgttcccctgtcccgcaggagtgcccctgagccccagccctggccttcccaggatcccagggcagcaccatccaatggcaatgggcctggggcggcttcctggcttcctccttgtccctctaagagccccggcccctctttctgcgtgggggccagagacctgggcctcctcatccccatggaccttgaatacctggacttctggggctctgaggggctgagagcccagacactgggttccccaaagggctgggggtattgactgatggtccccaagggcctggaggcccagactactgggttgccgaggaactgtgggtttagacttctgggtacccaaggagttatggaattagattcgtgggtccccagtgagttatggatctagatttctaggtccccaatggactagaggcctagactcctgggtcccccagaggcaggaggtggagatgctggttcctgtctgccaggatcttggcccctgaataccccgtggggggcactcctgaccccggaccccatgcctggggttcctcccctaacctgcctctcggccgccaggacgccgtggaggaccggctggacaggaacctgtggcccttcgtatccgaccccgcccccacggccagctcccaggccgctgtcaggtgaggccccggggccgcccccgcccacgcctgggtctgtgttaggtgggcggcctggcggcggtgagggcctcctgcctggactttctgcccctgccctgcacagtgcccgcttcggtcactggcacaagaacaaggctggcatagaagcccgggcgggcccccggctcatcgtgtatgtcatgggcggtgtggccatgtcagagatgagggccgcctacgaggtgaccagggccaccgagggcaagtgggaggtgctcattggtaagtcaccaggactgggaccctggggtctggggcttgggttcccggggcctgggcttgtaccttctaggtgtctggactccagagtccttggagtcagggacctggtttgctgagggacagggacagccccacaccagccgggaccgggagcctgtcaaagacgaaggcagcgcccc

SEQ ID NO: 90698 - DNA, 1062 bp, Homo sapiens
tatcaagggagtccctgggagttgtgctgagccaggcctgtgccccaggccccaccaacccctattatcctctcagaaggagaattagcctctccctgcccctgagggcatctcaagccctcatggaggttaagaacttggacttttggcagggcacggtggctcacgcctgtaatcccagcactttgggaggccaaggcgggaggatcacttgaggtcaggacttcaagaccagcctggccaacatggtgaaaacccatctctactagaaatacaaaacaactagctgggtgtggtggtgtgcacctgtagtcccagctacttgggaggctgaggcaggagaatcacttgaacccaggatgtggaggctgcagtgagccgagattgcccctttgcactccaacctgggcaacaaagcgagactccgtctcaaaaaaaaaaaaattggactctcatttgaatatcagctctaagatattctagcggtgaggccctgaccaacttccggggttcccaatctaaaaacagggagcccaaaatagcagctgctttgcagaggagagaacagagatagcgcaggaaggctggtggcgtgcaagcatgacagctgctgctaccccattttcactggaaccattttggctgctccgttaatattgttattaagcagaatggaccctggaactccaacccccctagaactgttccaaggggacctgtaggcatacgatgccaggagttgtgttcagcttctgctgtattcatgtgaggcacacagcaaacgctccctgctttctcctcccagccccacggggttcacagagactcctgactgcaggacttatcagggccttcggtgggtgtatctgtttgctagggctgtcataacaaagtaccacagactaggtgacttaacagaaattgccaggcaccgtggctcatgcctgtagtcgcacattgggaggccaaggcaggttgatcacttgaggccaggagttcaagactagcctgggcaacatagtgagatcctgtgtctacaaaaaaatagaattagctgaatgt

SEQ ID NO: 90699 - DNA, 1034 bp, Homo sapiens
gcccccactggcgtccttctcccctgcaccctagagacccttatctctgagccctcatccgctttccgatgcagtttatctagggagctcctccctccacggtatttccatctcctcccctggatcccagaggccccctcctcacctgtagtccacgtggctcccatccacccagataaactcccccttcaggtccaagttccgaaggccaatccaggagccggtgtggctggcatgcttggtcaggaagtcctgggggacaggacagggctggaggactggagacatgtgcccggggccttccagcccacttcgagaggttgggtagagtggggtgggggtccccccaccctcgccatgctgcccaccacctctgcagagccccagcccacctgctcctccgggctgtggatgctgaccagctgcccttccatgtcgtcacaggcataccgggcgtggacccactgcttggtgcccttgccgaagtagtagcacttccgttggaaattgatccacttttcagggcacgtgttgcacacaaagcctggggtggaggagaggctcgggggtggggccaatggaagtgccttgggcaccctgggcagactaggtggcagcacccctcctagggccactcctggggtcccggctaaaagcagacccaccccagggcctaacagacagcctcacgggctgtgttctctgctggagctatgatgctgaccagatccatagtagaagcacctcagccaccatggccacaaacaccttcatggttagcagagcacggtgtcgaccatcaacacctcaactaccatcagcatctccacaaacacctcatggccagaagcaccacaagcaccaacactgccaccacacattcatgtccaatatggtcaacaccatgaccacaaacacactcatgtccaacaacacttcaaccaccatcaccacagacacctcacggctagaggtccctcaaccaccagcaccatgaccacaaatgcattcacgtccaacaacgcttcaaccac

SEQ ID NO: 90700 - DNA, 1006 bp, Homo sapiens
tgtccacactgcggcccccacccccgccccctcaccacccaccacctcccttctctggttgtgacctcctgctggtcatcccttgaggctcagcccaaggtcgtttcttccaagggcgctttgatctccacttcccatggccaacccccaacacaccagatacgtactcacttagtggagtttggagcctgtgtctgtcctcctagtgtgttggggtcgaccagagcgattggcagggaccgtcagagacagaggtttaagcaggaagagagacactttcttctgaaagtagagccactgacagcttctattttcatagacctaaatatgggcttgccacccggataacattacacgcatggcctctcctggtgctccccacacccgggtgaagtccgtgttattattatctccatttctcaggtaagagaattgggtgagaactagagatgttaagcagcaagttcccacagggctgaaggaggtgagtggtagcgtcaagatgtgaaccactgttactgcacactgaatcataccactatggccgatcacagagggccctggggagccacggaaggctctaggcagaggcagggcctcttgggttagaaggacggcctggagttgggatcctgccacccggcacttaccagcagacaccccaccatgagattatgtctcttgatgattgagcaaataggctcccaggtcaaatgtcccaggtttgagtcccagcaagaaaaaagggaagaggagagagaggcagaggaaggggaaaaaaaagacagaaggaaggagagggagaaggaggagtaggagggaaggagggaagcggggggaaagaaagatacgtgagataatattcaggtcaaatatggacagttttggctgggcacggtggctcacgcctgtaatcccagcactttgggaggctgaggtgggaggatcacttaagcctgggagttcaagaccagcctggacaacatagcaagccgttgtctctaca

SEQ ID NO: 90701 - DNA, 1036 bp, Homo sapiens
tcatagggaagtgtgcctccaggacatgctgctagatctgtcccagccctagacccaaacacgggtcagtgcggacctcatccagaaagctggatttgggtcctggagcacaaatcctccatcaatgagccctgggacaccaggacagggccaaggctggcactcagcctgttcccagggagagggactgcctggcctggtgtggcctggcctgggggccagagggcagacagggtgtttctgctggggcaggtcctccacctgatcatgtccctgaggggatggatctcagacctcggggagtcagtgtgtgcagcgcggcgtttatgggggttgccctaggacaccctgtgagagtaggtgctgttactacacccattttatagctgaggaactccaaccgggttccacaggcgagtccgctccccgtgggccttgtcaagggggtcgccctcccccatctgagccgcccaaggcagagctcaggaggaaacgtggctgggggcgtttgtcctgcaggaagggccatgcggctgcgctgctcccccaggccctgaccccactcttcccgcagaggaacagctcgctgcccgacgagaacaatgtggcgcagctgcaggaggagctgaaggcgctcaaggtgcgggaaggccaggcggtggcctcgacgcgagagcttaaactgcagctgcaggagctctcggacacctggcaggtgagggccgggtgggcgccggcgggcagagcgccccctagggccatcccctcggggttcttgggcggaggctgaccgccggcttctcggcttcaccccccaggcccatctggcccgcggcggccgctggaaggagtccccacggaagctggtcgtgggcgagctgcaggacgagctgatgagcgtgcgtctgcgcgaggcccaggccctggccgagggccgcgagctgcggcagcgcgtggtggaacttgagacgcaggtggactcggggggcctgctcgttggggaaggggcgtggtgtccgtggccagcccctgagtt

SEQ ID NO: 90702 - DNA, 1073 bp, Homo sapiens
cacccccccccgcggtcccgcctcctgatccgcccccgcccgcggccacgcctcctgacccgcccccgcccgcacctcccttgcccgcggtcccgcccctgcccgcggtcctgcctcctgacccgcctccgcccgcggccccgcctcctcattcgcccctgcccgcggtcccgccccctgatgcgccgcgccccctgacccgccctcctttccccccaatcccccgaccccagagcaaggaggaggtgatggctgtgcgactgcgggaggcggacagcatggctgcggtggccgagatgcggcagcgcattgccgagctggagatccaggtgatcggcggggccggggtcggggggcgggggcgggggcagggcccggggcaggagcggggccggaccccaggcccagcatggcactggccccgcgtgacctggcgcaccccgcagagggaggaaggccgcatccagggccagctgaaccactcggactcatcgcagtacatccgcgagctcaaggaccagatcgaggagctgaaggccgaggtgagccggcgcggggatgccggggacaggcctgggtgtcgtcggcctgggacgagccgagcgcaggtgccttgcggaggatgcggctgggagggcggggcagaaggccggtccacgcctgcagcgccggtcccccgccccaggtgcggctgctgaagggcccgccgcccttcgaggacccgctggctttcgatgggctgagcctggcgcggcacttggacgaggactcgctgccgtcgtcggacgaggagctacttggcgtaggcgtgggcgctgccctgcaggacgcattgtatcctctgtccccgcgcgatgcgcgcttcttccgccgtctggagcggccggccaaggacagcgagggcagctcagacagcgacgccgatgagctggccgcgccctacagccagggtctggacaactgaggccatgcccagcgcgcccggagtcaggaggccgcagccgcggggggcgcccgggcagtccgcgttctgctccccacctgccgcacttgacaaactacgcgccctctgt

SEQ ID NO: 90703 - DNA, 1264 bp, Homo sapiens
cgtcctggttcaaggatgtcatggcgaagactgagtcaccgcggactagcggcgtcctgagccagccccacctgcccttcttcaggtagctgcttggcggcggccagccccacagggggccaggggcatggccacaggcccccctccccacttggccacccagctgcctgccaggggagacctgggacctggacggccacctaggactgaggacagagagtggggggtgcccacccaccccccccgccccgggcctaccaagcccccgcccttcccaccccggggtcagccggccgtgtgcgtcccccgacagacactgtgaacggaagacagcaggccgcgatcagagtcgctgttcattcagccgcagcctctgggccggggcggcccccaggggccaggagagagccctggagtcccgcagccaccatgcacgctcccagcgtgctgtgtccttcgccactcccacgcgcccgttcctcttccgtcgccctctgtcccctgctctacctctctgtccttgtctggctctcccgtcaccctccctgcctctgtctctcttctggcctgagcctgggcccagccacctcctgacgggtcccctgggtctgcataggtctcccatggcgcaatgagtcagtggcccccagccaggcagtgtgggcattgccactgcggctggacggggctgcgcgctcgcgctctctctctctctctctctctctctttgatctcagggggtcctttttggagtttattgtattttattgtacttggtggggtgtttggggtgggggcggaggagagcttgttctcgtggggttgtcggtaccttcagaaacttttaccaaagtcacgattagctgcttgtggtggggccccaaccgccctcgggcactggggagctgggctggggctgctgctctggggtctccgggggccacagcttggggtgagttgaagacctcaggggatgtggaggggtctgcggggccctggccgcacaggatggccttcagggaaggtggtcttggggcatggtgcagagcaggtgaccggagggaatcggtgacggagcggggccaagggaggggtccggagggagtcagggatggagggcagagggagtggatgtgggggtttgaggacgtgtgacaagctccagcaggggtgggggccgggctgagggtgggggtgcgaggtggtcactcccatcgtgcccctggccgtccctccactcacccacacctggcccagtccacgt

SEQ ID NO: 90704 - DNA, 1682 bp, Homo sapiens
ctgcggggcaggctctcccgggcccacggggcggacgctgcataccaatttgccctgcaccgcctgtcccggagacggagcccgaaggcctgccatggcggctgtgtcgaggatgcgtggcgcctgccgtggcgggacagcgtgggcaggctcatttctgcccccaacccgggccccaggacaggtcagcgcgccctgccccggtgcccaccgctgccccccatccgccctcctgccacttgcccctgacccccctgccgtgcctcccgcagccctcccatgccgttccactcctccctgcctctgagccgaacatgataataaaagctattattgagcgcttactgcatgccaagtagcgtgctgagttggcacctcctgtttatagcctgtctcctcttcgggatcgtgagaatgagccaggccctgttagcatccctattctacaggccaggagaccgagggccaggcagctccagtgactgacttgcccacagtcacatggctagagtctggtagggctggaagtggaacccaggtctggcttttgcatgtttttaaagcttcccagggctgcaaagacaccaagatcacaagcacctttcaccggctttgggggggggggctgatgtgtaacccccagctgcctcccctccacacacaattctgttgatctggggaggcgccgggggtggtgagagagactcagccctgtggggaactgggaggcgcaccctctgccagccctggagggaggctccgacgaccgaccgtacctgcagcctaagcctcctccccctgcccaccaccattggcagcgtttgtgggtctggtgcggtggggcggtgaccacggacggagtgggctggctgtgctccaaggccctcccaagagatgtgcaccccaggggagccgtgtgcagtgtgtggggggaggaatgagcgtttctataaaaggcaggctgggtgaatgcacaggctccgagaacggagaatttaccgacttggattactagctgggcgtgggacgcggtgccgtgggaggacatctgcttccctctctaggacccgaccctcggtccacacccacagggcaggtgaagctgatggagggggcctcaagcggggtcccagcacccccaggggtttggggtcagccctgactccagtacccctccctccccgccttctagggatccttgaggtcccaaagccaccccaggggacactccactcccactagcctcctgccactcggggcagcccacccctatctatcttcctctaaccgcccagcctggggctcaactccttccaccgggtcacccccactctctgctgccttctcccctccacctgtgcgatgtgattttgccctactctgaaacccatccctgacgcctgtccccaaggtgccctgccggctctccccatccacacttgtcagcttcacagtcaccaaggggctcctcaccccaggcctcatcacaccagtcaggtggcagctctcctccctggcacacacccccagccctgtgacccccaagctctgacacttcagggcccccacttccatctttaagtcacaggtgaaagagaaagagaatgataactttattcatggtcacagaatacccccgggaaggggaaggacctggcagcagggagtaaccacgactggtc

SEQ ID NO: 90705 - DNA, 1048 bp, Homo sapiens
ccgcaacaccacctgcggcaactccagacctctgggaacaagactgcgggctctgcccccagctctgccaggacggctgcaagaccagctggcccgggaggggacaacgggctgttgcgggtgcgcggcagctggagacactcccccgcagggccaacccctgccctgttgctctgccctgcaggggtcccggcgcctggtcacctggggtgcacacaggtcacacagtgccaagaggccccagggcccagggactccccccacagcagggtgggacccgggacccgcggctcagtggcccgctagccacgtcagccaagccactttaggtccattttttaattttaacagtgctcttccatcttgtgcataagcctgagatttggaaagaataaaacaccgaattgcagaagagcagctacggagtctgaagtgtcttctctggcgcgggagtggccgaggcgatggtgggggtgggagcaggcggctgctgtgggaggcggtcaaggtcgagtgaggaactgcagccgcagtgggtggacgccttgcccagggctggaccctgagttggaagacgaggccagtgacagacaaaactagggggacttactcatcccagtgacctgcctgagctctctgagaattgaggtccccagggccgggggagcttgagtgcccatatgagtgttttagggccactgaggtccccccacaaacagggagtctcgagtggggtctatcgcggaggagaatgcaggcacagggcaggctggggggcccgaagtgccaggggaggtgggagtggcagctgcccactccccggcgaggtcgtgggtgctcgcgggtcctcggggctggggttccgtcctcccgcaggcccgggcggggtcgctggctcgcgcgccgctccctgcgcagcctccgccccctgcagccccgccccccgcggcggccccgcccccgtcgccataggaacagccgcggcggcccggctcgcgcgctgcttgcctgcctcggtctccgccgctccaggggcgggtggggtggg

SEQ ID NO: 90706 - DNA, 1013 bp, Homo sapiens
cccgggacacagtcacctgccctccaagacaccttcactcacggttaaacaccacgttgttctccttgaagtccttccactgctggtaccacttggagtccttgtgcagcacgacccccagggcctccctggggaagagggtgggccctggggtgagcggcggcgccagggccaccctgtgccctcctgcggctgcaggcagggggcagtacaggacagcaggcagctgagacctcaaacctaggggctctgaggaccccgccctcacctctcaccctcaaattcgagggagccgggaaccttgggcagaaggcaaactcaagaaacggactcaggagggaaccattggtgggctcccgaaatggacagcagtgaaagctgcccaaaatgggggcagcgagggccacgggctggtacctactcgtttggctcaaacactttctcctccttgaacttatctcccgcaaactccgttctcttccggagtcgctggggcctccggtagggcccggtctgtcccaggacgctgtcgtcaatttccttcttcacggactccaccccctgcgagggaggcacagcggggctggggtgggtgtctgggttcggccgccccaggctgcatgccctagcccaggactgggctcacctgggagagggctctgaaggccgctgtcctgcccagcttctccccgcctttggataccgactcggccgactgcttggccgtcttggctgcttcctccacgccctccttgattttccggccgagatcacttttactgacttcgtgaaggctctactgagacagacacagagagggggcgttggcaccggccctggcggccggggggcggggcaggaggaatgaattcctgccggagagaagggcggatctggttccccgaggccggcagaggccttctgtgctcctgtggtacgcggcacccccagagccatgagcacaacggcacccccagagccacgagcacaccgccacccccagagccacgagc

SEQ ID NO: 90707 - DNA, 1025 bp, Homo sapiens
cctcggttgtctgttctgtccagctttgcgcagcatggggcgccctcaccgccgttctttccccggggtcccctccttgggaatccttgctgccaggcagttcccgggtctccagaggactcctgcccattttggaaaggggccagcagacccagcgtctcacccagagcccagggccagcatcccggaagccgtggcggtgtgctcatggctctgggggtgccggtgtgctcatggctctgggggtgccggtgtgctcgtggctctgggggtggcggtgtgctcgtggctctgggggtgccgttgtgctcatggctctgggggtgccgcgtaccacaggagcacagaaggcctctgccggcctcggggaaccagatccgcccttctctccggcaggaattcattcctcctgccccgccccccggccgccagggccggtgccaacgccccctctctgtgtctgtctcagtagagccttcacgaagtcagtaaaagtgatctcggccggaaaatcaaggagggcgtggaggaagcagccaagacggccaagcagtcggccgagtcggtatccaaaggcggggagaagctgggcaggacagcggccttcagagccctctcccaggtgagcccagtcctgggctagggcatgcagcctggggcggccgaacccagacacccaccccagccccgctgtgcctccctcgcagggggtggagtccgtgaagaaggaaattgacgacagcgtcctgggacagaccgggccctaccggaggccccagcgactccggaagagaacggagtttgcgggagataagttcaaggaggagaaagtgtttgagccaaacgagtaggtaccagcccgtggccctcgctgcccccattttgggcagctttcactgctgtccatttcgggagcccaccaatggttccctcctgagtccgtttcttgagtttgccttctgcccaaggttcccggctccctcgaatttgagggtgagaggtgagggcggggtcctcagagcccc

SEQ ID NO: 90708 - DNA, 1015 bp, Homo sapiens
tctagctaaaaaattccaaagcctttatttgggagtcttagcttgcaagcttgtggaaggatttagcttaacaactgtcactcctgaaaagcaatctctgttccatcaaggttctagttgctggccctgtgtcctcaaagttcattacatcttatcaaggcctgtttgcaaaggggagatcccttttcttaaaaaaggctcaacccaaaagaaaccatttcttaaaaaattttacatagatcagttgtatttctatttagcaaaaatgagtgctctgcttttatttgggaatttcgatgaaaaagcgttcagagtagataatgttcatttatcaaaaatctggtttgggaaataccaaagaggctttgattgaattcccttttgacccgtgtgtaacttcctctggtagttagaccccaggcagctccgaatttgtgaacctgcttcctgatgaattctcccttgttcccccttggctctgccattatttcgttttcagtgtaatttgccaagccgcagttttctgtgctggctgtgcctctagtcgcagctctgtgactgattccctcccgggtgctgagtcccctccccggccaccatcctgcgtgaatatcctgaaattcatgggcttcctcgggggcccgcccgcaggtggtgctgggtgggttccgccaccttctcctggaaggtgagccttttcctggccaagggcagctgccttaacctctgagagtctgcgcttggccttagtcctggagacccagcctccagggactgaaccgtgctgctgttgggagccaagaccggccctttggagccggcagcccaggggtccctgctggatcagagaaatagaagcacccgaagacggttagtggcaattccttgacccggtttgcttccaaatgaaggccatttgtccaccaggcattgaaaagacatgacttacccagtccggcatcggacttgaaaaatcgaaattgacatcactcagctgttacatttcacatccgat

SEQ ID NO: 90709 - DNA, 2275 bp, Homo sapiens
gcgcccatcatctaaaatgtggggaaccgcaggaacccctaaacagaaaccccgacatacacagtgggaggagtggagggcaccaaccagcccctcagagtcagctccctacagaacagggtcccgcccctccactactgtatttaattcctcccagggttttgacccatgcaggtgtctcaaccgtgagcacctcgtggctgcgcagagcgggatggggcccagcggccatggtcagcatgcgtccaggccttgccccatccccaggccgcctgcgctgaccgtggcctgacgcttgctctctgtctgccaggttctcccccatgggcgtcgatcacatgagcgggctctctggcgtcaacgtgccaggaaacgcctcctccggctggtgcattttcatctacaacctggggcaggatgccgacgaggggatcctctggcagatgtttgggccgtttggtgccgtcaccaatgtgaaagtgatccgcgacttcaacaccaacaagtgcaaagggtttggctttgtgaccatgacaaactatgaagaagccgcgatggccatagccagcctgaacggctaccgcctgggggacaaaatcttacaggtttccttcaaaaccaacaagtcccacaaataactcgctcatgcttttttttgtacggaatagataattaagagtgaaggagttgaaacttttcttgttagtgtacaactcattttgcgccaattttcacaagtgtttgtctttgtctgaatgagaagtgagaaggtttttatactctgggatgcaaccgacatgttcaaatgtttgaaatcccacaatgttagaccaatcttaagtttcgtaagttatttcctttaagatatatattaaacagaaatctaagtagaactgcattgactaaccagtccctctggatggtggtgaacctgaagcatgctttaacctctaagactgtctaacacgcgtttcattcaatgtctccacagactgggtagcaaaaaaatcaccttttagttttagtttttaatctaaagatgttagacagatgctgagtgtgcgttttctcaaccgcttcaacattgtaagcgatgtatgctttggttgacaggaagttccttttccaggcaggtcccgttgccacctcctgctcactcagtcccgggctctgccgagtggtcctgggaatggcggcgggcccgtccagcgtgggccaccactggggccgggggccacgggctgcatgctgggcgggccctccagagaaggacacaaacgtgtttcgtaagcccaggcaccaatgggaatggaccaaagagtttcagggaaactccagtatattccagagtcagatctaagctccaggcacgcctgaagatgtgttgctactctgacatcccgagtttctgtccacacattgcatgcacagcgccccacacattggatactgttgttcacgataatttctcccgttttccagagcatttaacatagcttggaggcgtaaaatggctctgtattttaataacacagaaacatttgagcattgtatttctcgcatcccttctcgtgagcgcttagacctttttctattttagtcggattttgttttggaattttgcttttgtatgaacactcagcagaaaagtacttacttcttgccagttatctattaaccaaaacctttgatttgtagttttaaagattaaccctcaaagttctcttcataactgccttgacattttgggttgttctgttctgttaattttcttttgcttttttgtgttttttgtttgtttttacttttgcatttaagaccattaaatttgattttgttttgctcgaattttgttttgttttttattttaccttttctttctttttggctagggaaggtgcaggtggcccagcattcagggaggagtcgtaagatcttaagaaaccaatccttgcctcaagcaaaagcatttctgaatctgtgacgcaagaatgtgcagttacaggctggtggcttttaaaccaggagcccggaggaagggtgaaagagaaagcctgtgaaataggcagggccagatcacccaaaactcctcaggactgggatctggcgtttataaataactagtttacagagagaatcacaaacaggataacttagtaccagcagtttttaaccttgacgtgagactaaaacgtgaccgtaggctgttttttagttattgctctcatgagatgatggctgtatttatctgtttatttatacctatttatgtatt

SEQ ID NO: 90710 - DNA, 4351 bp, Homo sapiens
taggaaccccacctggcatgcactggccctgccgctgccggccttcgttcccgctggggcccgaggaggggaagggcccctttgcacttcatgggggccctgggagcttcctgtagcctagcacagactcgcgccctggcaccgggcagtgccgaaggacagggctcactcgcacggccgccgccattctgcctttgctctggggagagggtcgggggatgccagttactcggtgtaaactcccctggtctgcaccagaagagtctcctgtggtccctgaagtcctctcacttaagtgccagctgagcgaatgatcctgtcagtgggccagtgtgtgggtttattgccccccattctgcactggggcatctgagctggctgtgcagggcccagggccgggggaaccaacctcactggcccacagtccactcccctcctcctctagaccccacatgcactgctctgcctcggcctgtctgtgtccagtatggccctgatgagggaagcctgtgctccacttggagcccccaatgcctgagaacatgcctccagccacccaactctcttggggccttccctagtctctcaggcacacacgggccacaggcagggggaactcacctctgcacacagctgctgggggcattgcttcctttccctctgcaagatagtgtctcccagggtgttgggggcaccttagtattgcgcccccagggtcggctgtgaacctcaaggtggcctaaggaacctttgtcatctttgcagagcagtgagggaggcagagagaagggagccaggagggtctcccggctctgcttcccaccccaggatgcagaattggtgggaaggtgaggctcccatcccagggctgtagctccctctgctggagacagagtgtgtgtggcaggccagcctgtgtggagtttgccttcctgtgacgggctttttagtgttaaatagatgaggatggccgggcgcggtggctcacgcctgtaatcctaatactttgggaggccaaggtgggaggattgcttgagcccaggagttcagaacagcctggccaacatagcgagacccccaactctttttttaaaaaaagagaaaaaaaatcccaccctgagctgacagagcttaattttttgtattccttcgcttctatatccaccttaattgtgaactttatagtgtattcatctggagattatgccgtttcttggactctgctgttaaattctaaaaaacacaagggggccgggggccgtggctcacgcctgtaatcccagcattttgggaggccaaggtgggtggatcacctgaggtcagcagttcgagacctgcctggccaacatggcaaaccccatctgtactaaaaataggccgggcacggtggcttatgcctgtaatcccagcactttgggaggccaaggtgggcggatcacgaggtcgagaggtcgagaccatcctggccaacatggtgaaaccccgtctccactaaaaatacaaaaacttagccaggcatggtggcaggcacctgtaatcccagctactggggaggctgaggcaggagtatcgtttgaacctgggaggcggaggttgcagtgagccgagattgcaccattgcactccagcctgggcaaaaagagcgaaactccatctctaaataaataaataaagtaaaataaaataaaaattagccaggcatggtggcaggcgcctggagtcccacctactcgggaggctgaagcaggagaatcacttgaaccggggaggtggaggttgcagtgagctgagatcgtgccattgtactccagcctgggcgacagagcgagactccatcttaaaaaaaaaattaaaaataaaaaacactaggggaagaaaaaaacaaaaaatgcagagccatcttcagaaagtatacatccattaaataattgagtgaattgatatccccctctgctaaacagcatccctcctgccccccttactagagctttcttcctttcactcaggcagtttgcatttgaaagccactctacaaccccagacgaggaagccacacttgcacacgtgccttctctccgctgggccgcagggtctttagaaacagaatgaagccatctgcttggagccagcttccctacgagccggccagcgtcagctctcagtcgtatttgcctaaagttcgattttcatttaggtttccaagactgactaagctgtcattcgtgtcgtgagagactcaaagaaaacagcatctgtcagggttgtgttttcaggtgttccttctgagcagcagctcagaaatgagcttgagccccagaatattcctggcacgtgtgcgtagcgctaggtctgaccttactaaagctgctgtctctgtgctcacggggggcctgcagtgtcgcgattgtgggggcagctggcgggaccctctgggaagtggtggagtaaggtgccgtgtgaggcgtggagacaggacatggggacagttgggtgcccgctggacaggtcacccaaggccccgggctgcctggctttggtcgttgtttgttaccatgcaccagaggcctttgcctggagaagaaacctgacttaagacaccctttgactggaagtctttctttttccttaagaggtgagatcttactgtgttgtccaggctggtcttgaactcctggcctcaggcgattctcttgcctcagcctctggagtagttgagaccacaggcatgagccttggcctggcttgactaaaagtcttgagaaccagggtgtttgggttgggctgtctgtgacggcctctcccactgggacacacccgtgactcccgcctagtgatgtcactctcagactggcctctcagctgtcacctctcccacccctgggccttcccctgactccatcatgtccttgcccccagagaaggagctagtgcgctgctcagtgtgccctcatccccatccccctcatccagtttccagcccgcttcccaggttcctcaagggacgggctactcatgtttccctcccgggcctagtgtatggacaggcaggggtgcaggacagccatgctctccttccacccgccttgctcagcatctcacacccatgcccagctgaccaatgtcccccatagcaggacggtcctcaggtctcacactgctccgtccagggattgggtttagccgggaacccgggactggcccttgggtggctcagttgaggtggcaagagaagatgccctctgggcttggctgctggggccctggcccttcccatacagggaccccaggcctgcctggcgagcctgtggataggttcagctctgctgtatgagcctgggcagtgttctggcctcatttgattctgatggcaatttggggcccacgggaggggtgtaggaccttagagtggagtatcccaagacaggagtgaggtgacagcagcagcatggagctggcagggggtggccacaggaccctactccctcctggcatgaaggagaaggcatgcaggctgagctgggcacctttgcagcaggctcggccacgaggcctgctgtcacagcgggcccagagacagcagccaggagagtggcccctgagcccagggaggatctctcagacgcagtccccactccaaccctgttacccaccaaccacacaccacacccacgcacccactctgtggcggacacctggcagctaaatagtgacggtggatgtgctgtttcctaatgttgctttcttccaaataagaggcctgggtgtctattggggatgtctgtcaccaaaatatctttgggcgccaacactgtggagtcatggcttcagccgggaagaaagtctgaagctttaatcttctgttagtcattggttttctttactccatccatttgttttcacttttaggtttaatttttgtttatttccttaaccagacttctagcctggcccacagtagactgacctgacttttgcttttcagttttgaaagtcctagcgtttttccccctaactccgtttttgttgatttgttgaaaaggtttgtccagaggggttgcgtttatccggtttgacaaacggtcggaggcagaagaggcaattaccagtttcaatggtcataaacccccaggttcctctgagcccatcacagtgaagtttgcagccaaccccaaccagaacaaaaacgtggcactcctctcgcagctgtaccactcgccagcgcgacggttcggaggccccgttcaccaccaggcgcagagattcaggtgggtcgggagggtgcgcgctcctgaaagccatacttagccccgctggcaggcgacggcacagccacagaatagaaaccacgggg

SEQ ID NO: 90711 - DNA, 1506 bp, Homo sapiens
tggggtctgcacggccgtcagcgccaacctgagaaagcaccgaagaccttgtcttgcattggcctccgggctcccctcaccaccctctccacacgaatgatgaatgtaccattttgtcaaagcacccagaaggttctcttcagttttctttgattttgcaaaatataaatccaaaaggcattgagtcgtttaatattgaacacttgagtggatttgagtacaaactcggggtcctcccagaactcacagcccctgtcagggcttctgtggcgagcttgctctttggcaggggagtctcctgtgttcccagtagctcccagcttgcttgcccgctgcagcacgggctgctttcaggcaccaggacctctctggcaccggctcactgtccagcacatcagagaggtagccacacacaagctgcgggccctcagttgctgggctttgtgacataggagtcacgcctgcctccttgaggatggtgagcacccagtgaggaagcactgccaggcatcctggctcacggcccatccctcagtgagcttgccaccatgcggctgcaggcggtgagcgtcagtgatgataatcgttccctgcatgatttctaacacacagtgttggcttttcctaacccagcattcaacaccctcctcaatgctttggccacgtgcctgtactaatctcggaaagtggttgtgttcccaaggtgtcgtatgctcgcccgagctcagaggtgatcaaagacgccaacttgtacatcagcgggctcccgcggaccatgacccagaaggacgtagaagacatgttctctcggtttgggcggatcatcaactcgcgggtcctcgtggatcagactacaggtaccagaggggccccagacgcgtggggagggtgttctctaggtgggggctgggttttctagggaaggcagatcaccgtttgattttaaatgtcattagttattccgcaaacgaggacagcaccaaaatgagaagacgttggctttggtttgaggaggctgaggaggtaagatggcattaaaagaagctggggatatctgggcgtggtggctcacgcctgtaatcccagcactttgggaggccaaggtgggtggatcacgaggtcaggagatggagaccagcctgaccaacatggtgaaaccctgtctctactaaaaatacaaaaaattagctgggcatggtggcgggcgcctgtagtcccagctactcgggaggctgagacaggagaatggcatgaacccgggaagcggaggttgcagtgagccgaggtcttgccactgcactccagcgtgggtgacagagcgagactccgtcttaaaaaaaaaaaaaaaaaaagctggggattaggccagcatttcatgtacagtgaaaacgccaagagattctagcaccttccctcaggcacccaaatgtgctggccttgcccatgaatggggtgaaaaggacactgcaggccgggtgtggtggctcacgcctgtaatcccagcac

SEQ ID NO: 90712 - DNA, 1044 bp, Homo sapiens
ggtttcaccatgttagccaggatggtctcgatctcctgacctcgtgatccacccgcctcggcctcccaaagtgctgggattataggcatgagccactgcgcccagccaaaaaaaaatactttttttttttttttaaagacaggacctcactcagtcacccaggctggactgcagtgatgtgatcacggctcactgcagcctcaaactcctgagctcaggtgatcctcctacctcagcctcccgagtagctgggaatagaggtatgccccaccacgaccagctaattttttttgtagagatggggtcttgccatgttgcccaggctgaactcttgggttcaagcgatcctcccactcagcctccaaaacagtgggattactggcctgcgccaccacacctggcctaaatttccctcttttataaggacatcagtcacatttgattagagatcaccctataccagtgtgacctcgtcttaactgattacatccgcaatgactgtatccaaatcaggtcacgttttgaggtcccaaggggttaggacttcggcatatgaatttggattgtggggtggggggaacacgattgaacccctcactggatgaattcttgagaatgggcagccagaaaaagacctgattgaggccaaagagcaagcgatgttgggagcttaggaaagagggttctggccgaggggccggggagccccaggtcagtgcacgcctgctgtgcgccagctgttctgattctagcctgactgaacatgacagtgtccagagagaagaggaaagcagagttcccatggtccttggagacacctgtccttgggaggcatcagagctttccccagcatttggctctagggcacttctcctctggggcttcatccagggacggcagtaggtccagtcagtgccagcctcagctccgctccactggcgccagggtcatggtttggcaggcccccaaatactgccccagtccagacaggtctgcagggagccagggcaagcccggacactaggggaggctgggggccaaggc

SEQ ID NO: 90713 - DNA, 1029 bp, Homo sapiens
aaaagtaaaacctcttggccaggctcagtggctcacatctgtaatcccaacactttgggaggtcgaggtggggccgaggtgggaggattgcttgagcccagaagttttagaccagcctgggtgacatagtgagaccccatctctaaaaataattttaacaattagcttgggcctgctggagcgggcctgtagtcccagatactctggaggctgaggtgggaggctgtcttgagcccaagaatttgaggtggcggtgagctgtgatcacagcgctggactccaccctgggtgacagagcaagatcctatctctttaaaaaaaaaaaaaaaaaggaacctgtgttcattgcagaaaatgtacgtgtttgccaaagaaaataaagtttgctagcacctgtaatcccatttcccaaaggccaggcagatatagtgcttcccgacctccctgtccctcactcgcagacggttggcttaccaatgtcttcatgttctcttgcacaggacacagcttgggctatggctttgtgaactacgtgaccgcgaaggatgcagagagagcgatcaacacgctgaacggcttgaggctccagtcaaaaaccattaaggtaaagggatctgatcaccaccgcatccattcctgccctgggcacaggtctgtgctgagccccgcccagcctcacagtcactctccaagggactatgagcacagccgctcctcgggggctcccatcagataccctggtcaggtgtatctgacccaggccttacatgagtgtctcaggacccactccccgcccagggtgcccccaggttgcgtcagctcccaggcctcccctgtcgtctctcctgcctggctctctgtgttcccatccctggacagctccatccacccccagcctgcccagtgctccctctgcgctccttggggccagttgtaacccttccctcacccagcacctcactcagcacctactgtgtgccccacagtgaccaaaacagacaaattcagtgcccccgtgggtcgggggtg

SEQ ID NO: 90714 - DNA, 1021 bp, Homo sapiens
ggagtttgagaccagcctggccaacacgacgaaaccccgtctctactaaaaatacaaaaattagctgggcatggtggcagacgcctgtaatcccagctactcaggaggctgaggtaggagaatcacttgaacctgggacgcagaggttgcagtaagccgagattgtgccactgcactccagcctgggtgacagagtgagactctgtctcaaaaacaaaacaaaaaaaaaaaaaaagaaagaaagaaaatctctaagtgcaaatgcagttactagttttgccttcatatactgcaatatgaacattttgaatttacttgctctttttctcttggcagatttttgaaaaatacaatgtctaatggttatgaagaccacatggccgaagactgcaggggtgacatcgggagaacgaatttgatcgtcaactacctccctcagaacatgacccaggatgagttacgaagcctgttcagcagcattggtgaagttgaatctgcaaaacttattcgggataaagtagcaggtaaagaaatggaggcgttttagtaaaccgggtattggtggccatcctttgggcactgtctcctttgcctgtgactctgtggcattcctcagtgcaggataactacagccttgaaacgatggctgtgaagtttcatttttatttcaaactctgtccattgctcttgtataagatcggacataagttcccaaaagaggaaaaattcattgtaagacagagagcatgtacaaaataagacagtgggaggagaggaaggaaccagagacagggcattctgagagctggaaggggctggagaaccacagcctgacctggcttggcctgggcagattgattgggtcccacgtgtggaagggaccctggcgagtgtactgtccagggcaggtgcaggtaggcctgcccctgtctgtccaggcccccactcttggtcaggcccaggtcagcagaacaccgaggaccttgtggacagcccttcgttatgtttgggctgctctgtc

SEQ ID NO: 90715 - DNA, 2028 bp, Homo sapiens
gacaatacataaacaaatgagacaagctgtattccaataaaactttatttataacaacaggcaatgggccagatttgtaccacaggccatgatgtgtgtttcaggaggtccacttttcccagacctagaggataccacactgtggacagtaagcctgggacagccattgtccatctcaccgtccatgaaagcagaatgagggaaaaagcaaagtagatgcctaactcttagagaaagggcgaggagaaggaaaggtaaaggaaaaaagagaaagaaagaagggaaatgcttgaattacattttgagcaagcttcaatgtgcattttaattcttcagtgttaacccttgtggtctgtttggatcagcttccagcaaatgtttttgtctgtttgtttgtttttgagccagtgatctattctaaaatctcgtggccacagatggtgtaacagacacgtggagtttctcatgattaaagtctataggtcccgagctgctactgaaagttgaaatttagccatttcccattaacgaatatttagaattctatccagttttatactcttatgaaccatgaggtagtgccttccttgcactttttgttttgttttgttttgagacagagtcttactctgttgcccaggctggagtgcagtggcgccatcatggctcatgcagccttgatctcctgggctcaagcgatcctccctgcctttgtctcccgagtagctgaaactataggcatgggtcaccatgcccactaaattattttattttttgttgagagtcagggtctcacgttgttgtccagactggtcttgaactcctgcacttgcgtgattatttctgtagaaagatcctgcagttgtgagtcagaaggttctaccatctcatactcagatcagtagcaggtgatcttgcgctggattttattccatgtgactggcagaaaatagcatctggttttcttttgcattttcctcattgttcacgaagatgaagttcagtgtctttttctggacttacgagccatttgaatttaaggcctttataaattgctgctcacatcctttgcctacttccctcttggttacgtctcttcttttatcccttaccaatttgtagatgttccgaatcaagttttcccaacctcggcagtactgacatttggggttagataattcttggttgtggggccgtcctgtgccctgaaggatgctttacagctctctgacttctacccaccaggtgtcagtagcaccccctcccccgacccctggccctgaccaagtcacagtaaccaaaaatgtctccagacattgccctgtgtccccttgggggcagaatggcccagtgtgaaaaccacaggtctaaataatagaatatgcagtgaatcttttctctaggctactcctcttcgtctaggtctgtgatgccttttgctgtacagaggtttttaatttcatggagtctcacttttcagtctttttttctatggcttttgatgctaacctactttttaaagagcagggagcataggacatcctcaaataaaagaaatgttaggaaattgtactgattttccacattgtctgagactagtaggagggtagggaagacctggatgtttctaccaggaagaaagaaaccagacctaattcttccctcggcgttgattcagggagtaggtaggaaatctccacatgagaggtgtgttcagatttttatgtaactgctggcaaggctatttttaaagaaggccaaaggcgcatgaccgtgggcactgggtgttcaaacataacagaattgagcaacagggatctggggaaagggatgggctctcaccgagacctccaggcgggtggccatccacagggatgactacctgtgtgtttagaggcagggatgaggggcctctgagaagtgagcccagtgtgcggcgcactttcagcagggcgggctcggcatacttggccgcattgatctggactcttctccaaagtcatcactggctctgatgtttatcactga

SEQ ID NO: 90716 - DNA, 1005 bp, Homo sapiens
ggtgtttgtagctgcagacagggaggttggggagacatacattcgccttgattttgttcatgaagtgggactagagacaggtactcactgtaccaggcactgtggagcaaggggtgacatccccagtggaggaagctgaagctctgggaaggggagcgacttctgcacagtagttcagctgatgagcaggagacttagtgcccagctcgggcctgccaggctccagagctcagggttttttcctgccatgccctgttgctttgcacttctgtgtgagatccctgcagtggcctttggccttgaccagccagaaagaagccagagcccttagcagggctgtggggtgcctggactgggccacaggccagccacacctgacctgctcctgccccgggcttctcagcctggctgaaagggaattgtcacttagctggagctgctccagccaggcatcctgcccttctgtgggccatgggcaggggcttggaagaagctggtgccatgtccacctgagaccttgccttgcatggcatttataactgggtcaggtggtgctttgggttttttctggcagcagagcatttcctgaatgacctaagccttttttacctggaagactcagaatgttgcatctggaaaggaccttaaacattattgggtccaagccctgtcagatgatgtgtgaagtgtcaagattgagcctgaagatagatttgactgttctagttttgctctggctcaagtggtttagaatacctgctccgtcatggtgcaatgaaagtgattctcatgcttgcctggtggaaagcagcctcactgcttcactctttttctgtcacacataaagacacacacatctctctcccctggatatgcgctagatgatcgacggatgtgaacaacatcactgatgtcacatagacaaccaggattgtttaaaatagtgcattggagtcaaaaaccttcagagatcatccaaacaagacttctcccagaggccaggca

SEQ ID NO: 90717 - DNA, 1039 bp, Homo sapiens
ctgttgcagcctccacctggagacagatctcttccacctggagatcctttgcttatgctccatggctcagcccagagctcactggccgtttgaagcctcgtctgactgccactcttcctccacccgcaccggaatcaactgttccctccttagtgttcccatcccattcagtttattgaatcgaattcaaggctgaatggcgagagaagcgcagcgcccggctggcgcccctaggtggcagtagcgaggcggtgcggccgacccgagctgtgggtcaggggaagaccaacggaagccagcctgtgggagggaagtgaggctcgctccctcctctgaacgactctccctgctccgctgctgtgtcctgggcccccgctaggctctggagagtgtgcatgatgtgtgtaggtcatctcagcccactctgatgagtgctgtgagaattatgccctggctgatgtggaagcccagaaaagggacctgggtgggcacaggagagcccagaatgcttcctggaggagaggaggcagtagcggtggggaggagctaaccaggcaaagacaatagggtggggctttttaggatacagccaagcccggaggtgggaacatcgcagtgttcagagaacatcgtgtgttcaaagaaccacgtgggttctttagggacaagaaggctgagatgggtagtggtggcaggagtgctcaggtgtccactgggcagagggcttggctgttaccctgcaggtaggccaggggtggctactgagcagttttagttcactgctcaccctggtggagaggctggggggagacaaggagaaaccagtcacaggctgttgcagtactgaggtggccccgtaatggctgaaccgcttgagggtcaggactgggactgcttctatattttgtatgcctgatgctttgctctgtgcctggcacgtggttgatattttgtctgtgccagggaaaggaaagattggcagactactcagaagcgactggatccaggtacctgtcaaacagacatctgtggctgggtg

SEQ ID NO: 90718 - DNA, 1012 bp, Homo sapiens
gcggcgctaacggctccgctcggcctcggtagcggtggcggcggtggcggcgacggcgacggcggcagcggctcctcctcagcgcgcacgacccgctccggcccgcggcccggacacgccccccccgcgcgcgagcccattggccgacgtccgccacggcgcgctgctcattggccggcgtagctgtcgcggcgctccggggcgcgcgggagaggcgggacttccggtcggcgccgcctgcgaagtgctccgcggccggcggagacgcgggcagccagcgatggccgcggagggggcgaactgggttccggccctcggaggctgacggaaggcggtggctgaggagcggcgcctctggttgagcgctcgccgtgtgtcccgcacctgtctgtcctgccgccgcccggtaaggtaggaaaggtcagcgcgccggggttacgggtacagaacctgggttcgaatcccggccccgacgtttccgcactacgtgccgttgggcaggagctgacgtcaccttgccgggcctcagtttccttctctggtgcgctgaggaggcggggcatggaacgtggtcagcgcttcatcggtgctggctctttgagcaagccagttcccgaaggctcagcatctcattcattcattaaaatgtcattgagcgcctactgtgtgtcaatcactgtatgggcagtgagcagaaaaaaaatacctggtcttattgggctaacattctaaaccagcgctggcctagaatgccctagtagaaatacatgcaagctacatgtttaatttttttttatgtaaagatgggctctggttctgttgcccaggctggtctcgaactcctggactcaagcgattctcctgcctccgcctcccaaagagctgggattacaggcatgcctgcactctgcctaattttttcttttttttttttatgatctgaaaataatagtctttttatttttatttatttatttatttatttgagacggagactcgctctgtcgccagg

SEQ ID NO: 90719 - DNA, 1020 bp, Homo sapiens
ctccccatcccgggttcaagcgattctcctgcctcagcctcccgagtagctgcgattacagacatttgccaccatgcccgggtaattttttgtgtttttagtagagacagagtttcaccatgttgcccaggctggcctcgaactccttaccttaagtgatccacccgccctggcctcccatagtgctgggattacaggcgtgagccaccgcgcctggcccctgcctgcttttgaaatctagtatgtatcttatactccacagcacagcacagcaccgcacatctccagtcggactggctacatttcaagggctcaaccatcacgcgttaccagtggctactgcatcagactgtgcagtgctagatggggagtcagaagagaaaccaagtgatttccatgtcaagtggtgaacaggctaagaagaaaagtaaattggggaaagagcatggggaatgtgggggttgctgtttgaaagaggatggttgggaaggctgaagagctgtcattcgcagagggacccaaaagaggtgagagcactgaacaaatagttacattcttcattgtctgccgcagtgctgtccagaagagcttcccacgataatgggcatgttccatatcagcaccgtccaattcagtagcccctggctccatggggttttctctctttgtttttttctgtttgtttttttttttaagacagagtctcactcttttgccaaggctggagtgcagtggtgtgatcttagctcacagcaacctctgcctcctgggtttaagcgattcttctgcctcagcctcctgagtagctggaactacaggcatgcaccaccacgcctggctaatgtttatatatatattttttgctttgttttgttttgttttgagatggagtcttgttctgtcgtccaggctggagtgcagtggtgtgatctcggctcactgcgagctccatctccctggttcacgccattctcctgcctcagcctcccgagtagctgggaatacaggcgcccaccacca

SEQ ID NO: 90720 - DNA, 1064 bp, Homo sapiens
tagtctctcctaaaaatacaaaaattagccagacatggtggtaggcgcctgtagtcccagctactcgggaggctgaggcaggagaatcgcttcaacccgggaggtggaggttgcagtaagccaagatcctgccactgcactccagcctgggcaacagagcaagactctgtctcgaaaaaaaaaaaaaaaagaggcagctgtgggtacaacaggagtccaggcctggcagacggggctcctggggtgtggattgctccctacaagactcgtgaccatgcagggcagtgggggcccatcagaagccaagagtctcatcagggacctggaggcaccagagttcaggagagctgcaggcagctggggtctgatatgcaaaagtgactacaggaggacccccacttctgcccatagtgttctcccagtgcccctgagcctttgccgatgacctcccagtcatctgctctatggcgcttccccattgggggactgtccttttcttcacagtatttaagaaataaaaattagattttcctggccaacaaaaaaagtaagtaacttggcttctctgaccctcaatctcctcctttgcacagttgggccaatggtgagcacccaggagcatccttcatcccactagaggtgcctgccactgggtagggcagatgtggtggtggctggtgcaggcttcccagaacatctcatcgcccctgcccaccacctggccactgcaaccaactgggcttgtctagaaagacacctgcctacccacccaaccctgcaggctctggggtattggtctctgaatttggctgagctacaggatggagaccaccctcaactgctcccatcatcagaggtgcagaacagaagtcggtgtggggggcacttgttccccccagctgtgctgatttcacactggcggagaagaggacccttgctgatagcggactgctcttttatttttttatgagatggagttttgctcttgttgcccaggctggagtgcaatggcaagatcttggctcactgcaacttccacttcctgggttcaagcaattctcctg

SEQ ID NO: 90721 - DNA, 2843 bp, Homo sapiens
aagccaccacagggcctctgtgacccttgtcctcatcaccccctccccagccccagctgtctctcctggccgcccagtgtggcctcacgctgcagcagacccagcgatggttccggagacgccggaaccaggatcgaccccagctgaccaagaagttctgtgaggccaggtaagcccaggatggggcttctggggtgcagggaagcgggccggggtggggcggggcgggtgtctgctattttcacagctccctccccatccacagctggaggtttctcttctacctgtcctccttcgtgggcggcctctcggtcctgtaccacgtgagtataccagagtatagctgactgctcacctgccccatccacctggcctagatctggcaggagtgggggtgtggagtggtgcagccagagaggaaaacatgcagctgaggagagagcgagctttgcaagatggtggtgaatgttcactcaacaggtatttggatttactatgcaccaaaagttggggttctgcagtgaatgagccccccagtcgagagtgagaagcaggaaaaagcagggctgggtgaaggtagcatctatgtgactgtggaaggagaaccaaagagaccgcagacccagggtgggaggttggattctcacctctgcacagcctgacacccatttccctgcaggagtcatggctgtgggcaccagtaatgtgctgggacaggtacccaaaccaggtgagtggcagagtgtgtgtgaatgcttggagggtgagggcgatgatcacagttgctgcagccatgggcatgggacccgaaccctgacactacactgtcattccccactgagtcccacgctctttgattcctctggggaatagagaggggccagaaaaccaagcaggagcttccaccaaaccactgcccttgattacctccagggatggggagctcactcattgggattcaagtatcctggttttgagcaaacggagtgggcccggagccatacccctgcccgattggagccttcgctccccacagctaaccttgtcctgtcctgctgcagactctgaagccatccctgtactggtggtacctcttggagctgggtttctacctctcactgctaatcaggctgccctttgatgtcaagcgcaaggtgaggccaaataagagtctggaagacccagtctctggccgggatgctggggtgctggggggtagggcagccttacaaccgcaccttgagagctccctggtgcctcctgcaggagatatagaggccatgggcccagaggccacaccaaccccctgaaaggacccacttcttggcccatagggtgggggaccttccagcatcaagcctcgtccccactatgacccaccgtctactgcaggatttcaaggagcaggtgatacaccacttcgtggcggtcatcctgatgaccttctcctacagtgccaacctgctgcgcattggctctctggtgctgctgttacacgattcctctgactacctgctggaggtgggcccgacccctgcctgacccttcccagctgctgtacccagccctcccaggtgccccagagatgaggtcccattcctcccaaccttcctgggagatggagccccacccctcctgtctttctcgggtgatgaggccctgccccctctgtcttccaggctgataaggccccaccccctctgtcttcctgggtgatgaagccccacccttcttggcttccttgggcagaggcccccgccttctcagcttccttgggagatgaggccctgccccccatcttcctgggagataaagccctgcccctctcagctccctccttggaggataaagctacacacatgtgcacacacgcatgtattcacatttttttttttgagacggagtctcactctcttgcccaggctagagtgcaatggcacacactgctcactgcaacctctgcctcccaggttcaagtaatctcctgcctcagcttcccaagaagctgggattacaggcacttgccaccatgccagctaacttttgtatttgtagtagagatggagtttcaccatgttggccaggctggtctcgaactcctgacctcaggtgatctgcctgcctcagcctcccaaagtgctgggattacaggcgtgagccaccatgcccagcctatattcacactctttacctttcctgaaaaggtaggtagttcctggaaacaaggccccaccccaactcacctggtcccatcctatagcaccttctctttgagaccagggccctggtcctgagcccatttctccctgctgccctttccaggcctgtaagatggtcaactacatgcagtatcagcaagtgtgcgacgctctcttcctcatcttctcctttgtcttcttctacacccgactggtcctctttcccacccagtgagtcagccctcccatgggggtcagggaggtgggagggcgtgtctgagattccaggactgcctcaccattggtaccctgccccaaggagctggggatcttggctgggagagttccaggaggaggcagggaagggtgtgccaggcacagggcacggcatatgcaaaggcgcagaggtgagacagagaattattattactcagcgtgcctggaccatgcagtgggaggaagggtcagggctgccagcgcaccaaagtctgcccagtaaatatttgtgggggcctcttgagtgtgctggtaacacagcagaggccacagttcaaagatcccggcccttgtgagcagacattgcatgggtgggagcagatggtaagtgaggcagccacgtgaactgcacagcatgcgaaggagaga

SEQ ID NO: 90722 - DNA, 1653 bp, Homo sapiens
tttactccttgggagatgaggccccgcccctcttaaactctgggagatggagccctgctccctgtgtcttcctgggagatgaggccccaccgcctgccttcctgacatgaagcccctcccctatgaggtgagtaggcagtcgcctgctgatgaaggggaggtgatgggggtctgaggagtagagagaagctgccagagtgccacccaggaaagcagctgagttcataagtacccgcttgggtggggttcatagtcatgaatggccagtcagggagctcgtgtgtgtgttctgctcatttagtacaagcgagagggggcctcgcgtgcccagctcaagagtgttaggtatcatggggtggggggcactagggagccataggtggttatggagcagggaaggccatgccagttagaaattcttaggactgggggctacagcggctggtcaaaccccagcctcctcctctccccctggctgtaggatcctctacaccacatactacgagtccatcagcaacaggggccccttcttcggctactacttcttcaacgggcttctgatgttgctgcagctgctgcacgtgttctggtcttgcctcattctgcgcatgctctatagcttcatgaagaagggccaggtatggctggacctccccgggggccccagccctaagctcctccttcctccctgctctgagctccatccctctctctgttccccagatggagaaggacattcgtagtgatgtagaagaatcagactccagtgaggaggcggcggcggcccaggaacctctgcagctaaagaacggggcagctggagggcccaggccagcccccactgatggccctcggagccgggtggccgggcgtctgaccaacaggcacacaacagccacatagccgggcggggctggctgtaaggggttgcccccccgccagtgccttggatatttctggggtgactggactggcgcccctgggccacctttctggagacagggagggccccacccggggtgggtgggaaggctgatgatctgtctccagccccttccttctgcccacccacccttcttccctctgggcaactggacagatctgggagccagcagctggatgctgtggctggccagagacacctccaggctgtggcctgggggctggggggagccccaggctgaaaagggtccaattaaaacaaatggagccaaattttctgcctgagaacttgggtccctatcaaagttccttcttcatccccagagacccccgagggagccaggcctctgcttacataccccacctacgggatactcactgccacccaaggatgcagggccccaggggccccagacagcaacagagctcagagaccacccgctccccacgctgttcccagatgagcccctgactcgccagccagtgactcaaacaagcccctccctccacccttagggtacccttgggtcagcctctcaaagacccccttgcagactagctctgaaaggtcaagtcctttgcccaagctcacaggtaggtcacagaccaggcctgtctctgcagtcctttcttaagtccggtagattgcccacctttgtggtccctggatccttccttgggacagtggagggagtgggctgaaatcccaca

SEQ ID NO: 90723 - DNA, 1049 bp, Homo sapiens
ggcgtgcactaccacgcccggctaatttttgtatttttaacagagacggggtttccatgtaggccaggctggtctcgaactcgtgacctcaagtgatccacctgcctcggcctgccaaagtgctgagattacaggcgtgagccactgcacccagcctctgccaccagctgtatggcctcctcttggttcctttctctgtaacctggggagtgcagtagcacctgcccagtggggctcttgagcccaggaactgctacactctgaaccccactcgtactaggggctcagtaacaagcagccgccagtgtggttcctatatcccgggacttcgcctgtctcctgcggatcacagccagtgactactgtgctcttggagaaaggtccagcctccagcttcccaggcttcatttgcatccatctcgcaggccccagctcaggctcgtgcccacccaccaagttccagtgccgcaccagtggcttatgcgtgcccctcacctggcgctgcgacagggacttggactgcagcgatggcagcgatgaggaggagtgcagtgagtggccacgccccttggcggggcttacagggggcggggcctgagggtggtttgtcaggggccaggcacgcggaggtggagcttgtgggaaaggcagggccgcagggatgggtgcgacttgggtctgtgggtcataagaagcggggtctaagatgggcttgggctgggcgcagtggctcacgcctgcaatcccagcactttgggaggctagggtgggaggatcgatcacttgatcctgggaggttgccgctgcagtgagctaggattgtgccagtgcactccagcctgggcaacagagtaagactgtctcaggaaaaaaaaagaaaaagaaaaaaaaaagaaaaatgaaagaaaggaaagaaaggaaggaaagagagagggagggagccaggtacggtggctcacacatgtaatcccagcactttgggaggccaaggcaggcggatcacttgaggtcaggcgttcgagaccagcctggccaacacagtgaaaccc

SEQ ID NO: 90724 - DNA, 1029 bp, Homo sapiens
caattctcatgcctcagcctcccgagtagcttgggactacaggcaccgtcaccatgcccggctaatttttgtatttttagtagagatggggtttcaccatgttggccagactggtctcgaactcctgacctcaagtgttctgtccgcctcagcctcccaaagtgctgggattacaggacaaaactctatacacagtctcttttttctcaggatgttgaggtagggattcccagcataccccgtttacaggtgaggaaactgaggccaggagagaaagtcactggtcactgtaactcctgtcaggcttacaccctatgaggcggggactgctgtgctctactgtccactttgcagagggatacacactcccgcagtccagcgaagggaggtcagaggtgtcagggctgtggaagtctgcgcctgggtggagagccacacctggaggctgccagatctcccgggggcggggaaggaagcaggcaccggtttgtccacagctcttctgggatccatagagctcagggaccctgtggcaagtaggtgcaattaggcctgaaggccgaggaggggctggcagtggggagtggggggttggaggctcatggctggtgggtaaaggtggaagaggttaaaggccttggcagagtgaagctaagccagggtggcggatttgccacctcccctggccgcacccaggaggaagccgtaaaggccactcccttcctctgtcccttggcccaggttgcgggcccctccgtgcccctccaggtcggcaagcagctgagcttccctgctcagaatctaggacagccgggatcttctctggacccagcttggacccttatgtgacctgtgtccacttataatcaggcactgccctgggtttaggcggccaggtcacagccctgacctccacagaatgtccagtctgtgggtggacaggcatgaccagggctttaaggacagttgttagacatgggaggcagtgcttcctaggtctccaagagggacatgagaaccctcccagga

SEQ ID NO: 90725 - DNA, 1066 bp, Homo sapiens
tctcatttcatcacggggttctgatggttccctttaacgatctgtattctggccccgacacgttctctgaattcatatctgcttcccactccgcggtgcctttccgcggcccgcccttacttcttcctccactccggtggggacccgtaggtgcgcgtggaattcatggacgacacgagccgatccatcatccgcaatgtaaaaggccccgtgcgcgagggcgacgtgctcacccttttggagtcagagcgagaagcccggaggttgcgctgagcttggctgctcgctggtgggtgcaaagaggacacccctttgatagacctttggttggtggtagggaggcttcgttaagcccagggtgagagggtttgggaggcagagtctacatacagagactgacaagagggaggcgggagtttgccaattgctgcggggcctgtcaacatctcatgtttgggtctgtttacagggtcttggatgtcgggttcgaccacttggccgatgggaatggtctgtcacagtctgctccttttttttgtccgccacacgtaactgagatgctcctttaaataaagcgtttgtgtttcaagttaactcaggttcttgtctgggttatacgactagggtttctccaggtttcttgagtggctcccaggcggtcaccgatcctccgcactctggaaatcctggccgtgcggtcttgccaaacgaagcttttcctttttgaggcggggggtcgtgtttgtcgattgcaccctctaccccaaacaaaacacaagcgtagtaggaatgttttattagcaaagaagtttcagagagtgggtggatcagggctctatcacttggtccccacctcaccttggtggggccagagtgagccccttcctgccacagtcaccccaactgaaattgcctttctcttcggccagtgttagcctctgagcaggggaccctggacccttctgtgcgccaaaggctgaggtgactgacgaggagatctccccacagctaggtgtagtgagccagacgaggcagcttactgaacctgggggttctctccattgtc

SEQ ID NO: 90726 - DNA, 1084 bp, Homo sapiens
gactcaggagagctcgcccggatccatggacggagacagggccgtggcgcccgcgggtgagtcccgaccccgtcgctgggccctggcttactcggcgccggactcgaactcagtgccctcatctcatccccgccaggcatcctcaaatccatcatgaagaagagagacggcacacctggtgcccaacccagctccggacccaagagcctgcagtttgttggggtcctcaacggagagtgagcgcctttcccctcctgtggcagcttctgccgggacatagactggggttggaaccccagctctgcccctctactggcagcgtggtctgggcaatcctcagtttcctcatcgttaaatgggaacggccacacccacatcgcaggactccagaacgagcccacaggggaggtttagcagacacctcccaccctgcccccaggtacgagagctcctccagcgaggacgccagcgacagcgatggcgacagcgagaacggtggcgccgagcccccgggtagctcctcgggctccggggatgacagcggcgggggatccgactcgggcacccctggccctcccagcggcggggacatccgggaccctgagcccgaggcggaggcagagcctcagcaggtggcacaggggaggtgagcggcgctcgctagttgtttggagaggaggcggctgccctcctcctggtcggcgctgtccccgatccatcctgagtctctcctggcctcctctgcaggtgcgagctgagcccgcgtctgagggaggcgtgcgtagcgctgcagcggcagctgagccggccccgcggagtagccagcgacggcgtgagtgccccgggagcgcagcaccagggagtggcgtgggagcctccaaggacctctgacgcccacttaggggagcacaccgggttccatcccttcccgccaggcacctcgcctgaccccaggctctccgaagggatctccttcccaggacagcgccgatctttccttggtttccccaaaaaggcccggccccagccccactcccggactccccaagggcaagcgttcattgcctttccccgttccatgttc

SEQ ID NO: 90727 - DNA, 1041 bp, Homo sapiens
ggaacggggaaaggcaatgaacgcttgcccttggggagtccgggagtggggctggggccgggcctttttggggaaaccaaggaaagatcggcgctgtcctgggaaggagatcccttcggagagcctggggtcaggcgaggtgcctggcgggaagggatggaacccggtgtgctcccctaagtgggcgtcagaggtccttggaggctcccacgccactccctggtgctgcgctcccggggcactcacgccgtcgctggctactccgcggggccggctcagctgccgctgcagcgctacgcacgcctccctcagacgcgggctcagctcgcacctgcagaggaggccaggagagactcaggatggatcggggacagcgccgaccaggaggagggcagccgcctcctctccaaacaactagcgagcgccgctcacctcccctgtgccacctgctgaggctctgcctccgcctcgggctcagggtcccggatgtccccgccgctgggagggccaggggtgcccgagtcggatcccccgccgctgtcatccccggagcccgaggagctacccgggggctcggcgccaccgttctcgctgtcgccatcgctgtcgctggcgtcctcgctggaggagctctcgtacctgggggcagggtgggaggtgtctgctaaacctcccctgtgggctcgttctggagtcctgcgatgtgggtgtggccgttcccatttaacgatgaggaaactgaggattgcccagaccacgctgccagtagaggggcagagctggggttccaaccccagtctatgtcccggcagaagctgccacaggaggggaaaggcgctcactctccgttgaggaccccaacaaactgcaggctcttgggtccggagctgggttgggcaccaggtgtgccgtctctcttcttcatgatggatttgaggatgcctggcggggatgagatgagggcactgagttcgagtccggcgccgagtaagccagggcccagcgacggggtcgggactcacccgcgggcgccacggccct

SEQ ID NO: 90728 - DNA, 1046 bp, Homo sapiens
gccttccggggggagggagaggaagtgcctctacaagggcctagagtcgtcctgtggcactgagggctctggcagctgcacacaggttgataatgtcactggtgggtgaggctctgtggtcagcaggtgcccggcccaaggtctcgcccctcgtggcaggaggaagctttggaagggttttggagactgggattctaaggggccgtctggagacagggggactaaactttgggtcctgctgatcgggtgccatctccactcagcccaccgtgaggcagctgctcccaggtcctggctgggcacccacccagacgtggcactgccagggcaggggtgttgctccccacatgccccatccaggtttctgtggttatcccctgcttgttatttttgcccttttgctgtgttaaatgacccagctccgagtgcttgctcaagtcatggttttgccctttagattatttccttgaagtgcgttcccagcagaacagttactgggtcaggagcaatggagaggctgtgtggttcccgggacttgtctgcagagactgcttcctggaaacactgatttagcttctgcggcatctggcatttggcgggcaggcggtgtggggtgggggggggcggtgcctgccctgctgccctccccacactggcctccttttactgagtctagcaggtgccctgctgaccttctcaagctagttggtagcaaaaatctaacccacaagttcagcttttcccaaactggtcatctgccgtctcaccttcacagctgtgcctcatcagaggacctcctctattctctttcaatatttttcttttcctttttcttttcttttttttttttttttttttttgagacagaattttactctagtcacccagcctggagtgcagtggcgcaatctcggctcactgcagcctccgtctcccgggttcaaacgattctcctgcctcagcctcccgagtagctgggattacaagcacccaccacacccggctaatttttgtattttagtagatacggggtttcaccatgttgg

SEQ ID NO: 90729 - DNA, 1616 bp, Homo sapiens
tttacatctgtccctggggcagccctgagaatgtggacagctgaggcctgcaaagcactggggacccagcctggccaaagtgcttgagggcaaaactgatggggctgggtgccatggctcacgcctggaatcctagtactttggaaggccgaggtgggtgaatcacttgaagtcaggagtttgagacagcctggccaacatggcaaaaccccacctctactaaaaatacaaaaattatctgggcgtcgtggtgcacgcctataatcccggctactcgggaggctgaggcaggaggatctcttgaactcaggaggcggagagtacagtgagctgagattgtgtcagtgcactccagcctgggcgagggagattccatctcaatacaaacaaacaaaaacaaacaaactgatggggctgaggagccactaaggctgtacagctggggcaaggctggaatggtgtgaaggtgtcgggaatgcctgggcagggcccgagtttcctgtcttatttcctgaggacgtgagaactgagcagacctccctggccttggccaggctcccgtagctgccgtggaaaggaggttaaggttggtggtgtagatgggggccctcacagtgagtccatcttggcccccagtggcctgggagccgattctcatccctactggcttggttgggaggtgctgggccacacgcctacattcactccacctctttccatctttcttttttttttttttttttttgagatggagtctcgctgtgtcgcccagcttggagtgcagtggcacgatcccggctcactgcaacctccgcctcccaggttcaaatgattctcttgcctcagcctccaccaccacacccggctaatttttgtatttttcatagagacggggtttcaccatgttagtcaggttggtctcaaactcctgacctcaaatgatccgcctgcctcggcctccccaagtgctgggattacaggattacaggcatgagccactgtacccggccatctttctgtctttctctgaagtccacttggtagccctgtgcggggcacccatggtgacgtgagagaatgccagccccgttgtcttaggtctttcacgccaggccaagcagtggtctttggggagaggagaggtctgagccgaggggtcttgaaggatgagtaggagtttgctggccgccccagggggacaggctgccctatgcggtgggagctggggtgcccagagcctcaatgcccaccccataaggcagaaccacgactcccgagccacgtgctggggtttggggtaggacagtgagtgtggcagtgagttgcgaaggaagaacttggactgtggatgcagaagacctgggttcaaatcctgcctggctcacttcccaggcggtggctccagacaagtcacttggggagcaccgttgggaggtgagggcgagcccacaaacatgcatagcttcagggtcctgctctgccccgcaccccgttccccatccaagcctcagtttcctcatctgtaaaaatgggctacaggaggcttctgcgaagtaacgcacatcaagagctttgttagcacaagctcatcgaatattctccttgttcttgttatt

SEQ ID NO: 90730 - DNA, 1562 bp, Homo sapiens
tgatgtgatgggggcgctgtgggggtctggagagggcctctggagtcctgcagggaggggttcccctcggcaggcagggcacgtgctggctcaccccacgtccccctgtaccccctttgcagagatctaccgcatcgtgtcacagaaacagatcgcagaccgcgctgcccacgacgagtccccggggaacaacgtggtggacatcagcgtgccgcccaccacggacggacagaagcccaacaagctgcagtgctgccagaacctgtgacccctgcgcctccacccagcgtgcgtgcacgtcctccgcccgcccccgccacggtatcctctggcccctccctgctgtccctctgtggccggctcgttccagccctcccagtgagctctgcacggccgggccggggcccaggaaggacaggagccagtgctaccccgtcctgcccggggaaaagctagaagccccggtttgctgcacccatgaaactcgggtccccacagcgtcttggcggggtggggagggcggcaggatggacggggctggccagaggcgaggaggacgggcggacggcgccgccttctccccttttccttggccgactctagggagcgattgcctccctccctccgtgaccgggtggcccagccagcccgtcgtccccacccagaaccgtgctctgggccaaagcccgaagaaccaggcagcgggggccggggcaggcggaccccccgggctctcagcgcccacccgctcctccgcacacagcagctcgcacaggcctcccacctctgcctgttgattgatgcagggagaagcccgtccccccctctcccctctcccctcccctctcctgcacgcaacgcgccctctcggccctccctgtccccctcctctgtctcgtctccccatctggtctggaacctgtttgcaagtgaagcaatatctccgtgttttgtatatacaaccgctcttgtagcctttggtttttgttaatgtagagaaacacagattctttatacactttgtaagatttacgccaaaccccagctctcgatctcttcttctccctgtggcccctgcgctgttgccccgtccccgtcaccccgcccgttactgaaatgtataatctgacttcctgtacagaaacctgccgctgcgcctctgtcttctttcttttccgccaggcgccagctcctaggctgaggcccctctcgctgcacgttccccaatgcaggccagaccccccgtctccccagcccaccccacaggaagcgagaggaccccagcacctgccaagggcagcgtggaagtcagccagcgcagttggggtgggccctggtcaagctgcccctgtggcagggagggatggaaggctgccgcttgtccttgactttaaactcctgggtcctaggacctcaggcctgcgggcgtcccctgatggggatgggagccaagagcagtggccagggttcatcactttgtctcctgccagggcctcccctcccctggggtcctgacgagggtgacttgcccagtggatgttggtgatgccagatgtctccac

SEQ ID NO: 90731 - DNA, 1044 bp, Homo sapiens
gagtttaaagtcaaggacaagcggcagccttccatccctccctgccacaggggcagcttgaccagggcccaccccaactgcgctggctgacttccacgctgcccttggcaggtgctggggtcctctcgcttcctgtggggtgggctggggagacggggggtctggcctgcattggggaacgtgcagcgagaggggcctcagcctaggagctggcgcctggcggaaaagaaagaagacagaggcgcagcggcaggtttctgtacaggaagtcagattatacatttcagtaacgggcggggtgacggggacggggcaacagcgcaggggccacagggagaagaagagatcgagagctggggtttggcgtaaatcttacaaagtgtataaagaatctgtgtttctctacattaacaaaaaccaaaggctacaagagcggttgtatatacaaaacacggagatattgcttcacttgcaaacaggttccagaccagatggggagacgagacagaggagggggacagggagggccgagagggcgcgttgcgtgcaggagaggggaggggagaggggagagggggggacgggcttctccctgcatcaatcaacaggcagaggtgggaggcctgtgcgagctgctgtgtgcggaggagcgggtgggcgctgagagcccggggggtccgcctgccccggcccccgctgcctggttcttcgggctttggcccagagcacggttctgggtggggacgacgggctggctgggccacccggtcacggagggagggaggcaatcgctccctagagtcggccaaggaaaaggggagaaggcggcgccgtccgcccgtcctcctcgcctctggccagccccgtccatcctgccgccctccccaccccgccaagacgctgtggggacccgagtttcatgggtgcagcaaaccggggcttctagcttttccccgggcaggacggggtagcactggctcctgtccttcctgggccccggcccggccgtgcagagctcactgggagggctggaacgagccggcc

SEQ ID NO: 90732 - DNA, 1569 bp, Homo sapiens
ttacgaatcgtgtgccggaccgcgggttgaacaagcttcatctaaaacttccaggaatctctagacaggatcattgcttcccctctgctccagctctggttacagaaagctgagagtgactaggtctaggtgtttgtgtggggtggggtggggagatgcctcctctatcggactcagaggacgcgcgccgggaacagccagtcggtgcctaacgcgagtgtatctcgagagagaagcgatcaacagctgccggtctgcgcctgcgcgcggcgggggcgtggcccggggcgagtggggccaaggaggcagccgggagcggcgggcgcaggtgttactggttgcgtcgggtcacgtgggcgcgcaggcgcagcgcggtgcagcccgttcgctcacacaaagcccagacgcggagaaaatggcggcaggggtcgaagcggcggcggaggtggcggcgacggagatcaaaatggaggaagagagcggcgcgcccggcgtgccgagcggcaacggggctccgggccctaaggggtgagtatcccacggtcctttgccacgggtaagggttcctctccgcggccgacgcgggcggcggctccgttaggtctgttggcggcctagccccggcgcggcctcggccccggctgttcccgtaccgcctgctcagggtagcggcgtctagggccgtgagcggggagccgggggagcctccagaatcgtcccctacaccgggcctcgagcctcgccaccctcagtccctccaggccggggccaaccccgtagtcgaggcctcaggcccagctgctgcgcatgggggttgatggcgcgggcccggaccggagagcctccgaggcctacccgaccgctccccgggagggtgacctcgggggccgggtttcagccccccgtcccctctcctcccggggtctgttttctgatccgtaacgtggggggaggagagagggtgcgcgcccgggaggcctcgcgcgcagtcagcccgagtcaacggtaaccgagcgagggaagcgtcaggaagggccgcgaagccgggtcggggggctcccctcctgccccgccccttagtccccgcgcgccgaccgcgctccgcgggaagtgcctccctcggaaccgcccctcgccccacgctctggccctggctcaagtccctcgccgtttcccgctcctcctccccgggtgcgccgcaggtattagtggagagatgggatctgctgcttagcgttcaccctcggaagcagacagatacgaagtcgggggaggaatcccctttttcccgtgtttcggggaagctgttctgtcaggaggcgggttcatttacttccagacttcatcagcttttcgagtcctgcttggggctctttgactccttggcttttaaaagtttctttaaaggaggaagcatcgacttgtgccccggtgaaactcattcattctgattacagacacttaagagagacagagaggttttggctccaagatcagcggccgggaaggaaggggaagcctgggtacacattgaatttcccagacatttatttcattgtggtaaaatag

SEQ ID NO: 90733 - DNA, 1079 bp, Homo sapiens
agttgagcgcttaggttaagaacgttccctaagtgctagctatattggtagataataaatccggagaaaattccagattctttccctccttaagtagggagaaataaaataccatggttactggcccttagaaatgagaaaaacttcctctattcccagcattttactattgaaaactctgggaaggaatgtgttaattttgactttttcagcgtctatctacggaagctggtaggatttctgagggtggtatttggagggctttaagataaatttatttaccgtatgcaggaaggagtgctggtagaaccttgctagatgatagggtaaattaatagattacaaattttcccttttcccctgtccattttcaaatagtcattttgtgactgagtcattttacaaatacatgtggactgttggaacctgaaaattgtagaataaaatagccgttgtgagaaagaggctcaaagtctcaaagtctagtactagcttcatagaggatagtttaggaagctggcaacacttggatatttttgatagggcctgtggaaaacttttttttttttttttcattacaagtcttaaggaaatctctttagaagcctatacttttgcactccatgcagagtggagaggccattaacatatttgtatgttatgtatgttatgtaattaccataacataaggtaattatgctgtgatagaagttagtggagttgcttggtagaaagaatggaggaggtgacctccgccacctgctgggggcagggacctgttcctccatgacaggaagacgtgtggaagtggaggagaagaagatggttggggaggggcagggaagagagtatccaaagagcagagatttgagtgtatgctttatcgagaactgaagttgtgctgggtgtagtggctcacacctgtaatcccagcactttgggaggctgaggtgagaggactatttgagctcaggagttcaagaccagcctgggcaacatggtgaaaccctgtctctaccaaaaaaaagaaaaaacaaaacaggctgggcccggcggctcacgcctgtaatctcagcact

SEQ ID NO: 90734 - DNA, 1072 bp, Homo sapiens
aattttgtgggtgaataagaaacagatggattggttatttataaaaataaaaatatatatttagggtagattcctgaggaggtactgttagagttgactccatttgacaatcaagaaaactttcgttttaaacacttaaacccaggttcaggaacctgacctaaagactccaggggaggccctcctgactcccaggcagcttgctgctttcatgatactaccttggtaaccactcagtaaacagccgtttgaattgttttatttaaatcagattctctatacaatgcatttgagtgtttgctgtactttaaagagtgattgtttattcaaaaaggattttggagacacgtcagattgtgagctcaagattagaagacagggttttggattatttgaatgcatgctgccaggcctttgctttcactcagctctttgattttattctggttagggaaagagatactagcctgcaaagattagcttgcttgtttttttgggagggggggttctccaatggacttccccattaccatattttgcagtcatagggttgaaagctaaattgtccctttgctagtctgtaatgattatgatgcctaggttttctcagccttggctctggtttgctagttttaaagcctgaacagtagaaggctaggagtgaatcagtccccctctctacccttctcaataaaattattggtagaaaaatacatcattgcctcactgtgtgctaagagtctcttttttttttttttttgagacggagtctcgctctgtcgcccaggctggagtgcagtggcgggatctcggctcgctgcaagctccgcctcccgggttcacgccattctcctgcctcagcctcccaagtagctgggactacaggcgcccgccactacgcccggctaattttttgtatttttagtagagacggggtttcaccgttttagccgggatggtctcgatctcctgacctcgtgatccgcccgcctcggcctcccaaagtgctgggattacaggcgtgagccaccgcgcccggcctaagagtctcttttaaagctgtaagcgtgta

SEQ ID NO: 90735 - DNA, 4019 bp, Homo sapiens
ttccttgggaatgctttctgccctgtggagccttgagtttgaatgtcttaattcaaaaccaacattagtcttgtctttgctttttttgagacagggtctcgctctgtcaccctaggctggagtgcagtagggtgatcatagtttgctggagcctcgaactcccgagtttaagtgatcctcccatctcaccctccctactagctagtactgcaagtgcaccaccacacctggctaagttttatatatatttttttgttgttttgacagggtcttgctatgttgcccaggctagtcttgaactcctggcctcaaatgatccccccttcttggcttcccaaagtgctaggattacaggtgtgagccaccgcatctgaccaatactagtcttgtgtcatatgtaactttgtgtggaattgtaaacctggcaaatcaaataattatctttcacattgtgctgacatataaaccctttacctttttttcctctctctcgaattcagtgaaggagaacgacctgctcagaatgagaagaggaaggagaaaaacataaaaagaggaggcaatcgctttgagccatatgccaatccaactaaaagatacagagccttcattacaaacataccttttgatgtgaaatggcagtcacttaaagacctggttaaagaaaaaggtaatggtactggtgattgagtagggtgagaaggttggtgtgtcatcttttctgtggctaattccttggttatttttggtcagtggaagcggctctgggtagagcatgttctttccaggcttaagagtgaagcccccttaccccacctcagttttttttttttgttttgtgttttttttttgttttgttttgttttgtggtcatacccctgtgtgtcaaacaggatggtttgtatggtcctttggcctacagatgattttactggcttagtatggttaataaggcttcgattaggcttccggggagccttttcgtgttgaaattttttgaattttgcacgttaggtgggagagatttttcctttctttccttttttttttttttttaagctttttaagtttcacaggaagatagcttgtttaaaattttgtggatgtcttcctgggatcaaaatgtggtagctggaccttatgcttctcagattccaaactataaaacattagcttgtattttaacttttaggctttttcccctctgggaaaaaatagagtagactggccattggagagctcaaaataaggtatctgctttgtaacgcggtgccttaggatgtggattgtcatagcctaggtgtccaccttccagccgagggcaggggaagcagccaagctctgctgccaccaggaggcccgaggaggcctgcctctgtgatcctcacccccgtgcacactgtggtgtcctctctctctccttcttccctcctgtgctgctatcgtcttcctttctttcctgattcttggccctgctggtggcacttaggactaaagagactgctcagccctgggttagacaacaccgtggtagagaacaatttgtatattgccttgaggcgccctccccgcaccccgacctagactcaaactacccttcatggagtctttgcatgactgaaaggtattggttttctggagcattcattatgaaaagagatgtgagcttgatttgtcaaatgatttaacatttcagtgacagagatgccccgtggataggccattttggtatgtgtactggtgctccctgcattggattttgaaattatgaatggcactgccatcattgtcccatcccttattttgaccatgacatgcaagaagcactaggcactgtgaacctctccgtacagtcacgcgtgctgctcccacgtggcatttctccagataacacagatggaaaaacgttttggtgtgagattgatgtgcctgccttgatcagccaaatcattcctgccaatgctcctagggcaagagtgcagtttcttctttttgtctgagggtgtgtcatgctgcatcccagatgcagtgttcttggtttttgggactgctgcttcaatagaagcttagaatttctgtacagtacagttgggcctcattcgaattagcttttggaataacctccaaatttgtgttctcgtgatttggttgaaccgctgaattgctatttccattgataataaggtatagtagttccaagaaccaggaatgtggctttgaaaatgcaattgttagaattttgtaagagattgcaggccaaattattttttcatttttaggagtgtgtgaaccagttttgggacatgctggatgaagtaggtgacatttttactgctttaccattcagtaattcggtttgggaaaccttaaagctggtagtagcagcagcagccatggtgtttctggatgtagaagcagttcacctcaattcactattttgcactcttaagtgtggagccagcctggtggttgattgggatacttccaaactggttctcatattcccctggcatactgctacgaatgcctgggctcagccctctcagtgtatttttggtggtgtaatttagaattacaggtgtgcagtaaatcagttatttttaatgagccttaaaatgttcttgtttagagctcccctgtactggttaaattaattactttgctgtttaattaaattattagcggtataggattgtgggtaaagtgactcagaaaggtaatctttttatgataatgcttatattcagtatgtgaggtctaaagaaatttactgtgtttacatacatatgacttcttaagaaatactcttcttattacgtgctttcaaaaagacgtttttattcccgttttggtgtacaaaaaatgtttaagtggttagtttaaatctgaaatatttacttgaaatttgttgcgcataagttttaagtgttttgaagactttatacataggaagaactggcagatagaggcacttacaaccctaaaagtattagtctcaattccaaaacacagagatctgggctgttgtaacctaagcactctttatcagtctgtgttttaaggtctgatgaatcttagccttgtttcaggaaatgagtagaacaagaactggaattagttgtcctcaactgaaattttctgtcattatagcactatctaattgcagcctctcagaactaaagtagctagctttgagaggcccaagaggggagctttttttctaaggatactccggggggagattgtctcacatgctcctccctcactcttgatcctcttccccatctttcataccagctgcatattctccagctttaattttagcatttagcagcattctagcatttcctattaaaaatccacataggaagtaaactggtcatttatgcctttgaaagtgacttaacaggccacagctccccaggttgtatcctgacaggtaaagggatacacatcttaaagtgattgaccataaggactgggtggaaaaaataaagatttctgtgagaaaaggcgatcttaggcttttaaacttagtgtcgtgctacatttgtttgagaccaagtcctgtatgagtggaggaagctccttgctgggctgcttctcttgacctcaccaggcagccggcagcacccaggtggggcagtgccaccagagcaggactgagctgcacctgcagtgagtaaatagagcccaggttgaggaagaaaggaaggtcagggatgtagtttaccctcagtcgatccgaagtttagcagcagtcagttcaacttgtgtaagcaaagatttcttttaagcacttaatccttctgttagtataatacaccactttaagtaaatttcaaattgcatctgacagaaaactaaggcccagagggcaagtgtagtccagtagaaaacctccatcttggctcctggagataatttgcattgtgggtctattaggcagaactgtattttcaatttaaatgatattcctacccagtctacttgcttcttcatattttcctctgttggaa

SEQ ID NO: 90736 - DNA, 4351 bp, Homo sapiens
ttcttagagcattttaaatagaggtagataacagttggtgttagattttttaatgtcttagttttttcaatattttgatgttttaagctgcagtagaatttgtcttagcagcctactcttgggattccatgaattccatccatgtttacacagggggaggagcaaccgtattttttattaataactgtgagtgccgtttctgtaagactgctgctactgccaagctgtcacctctacccctgagtcctgactgtgtgatctgctctggatggtttgctcgttaaacttcacttcatggaatgtgaccagactgtttacttgacaaattttgccctcacattcttgtcgatagttgtactgactacataaaataaatctttgctttgctattgtagaaccaaaagggaggtggtcttttaaaggctccattttcctataggaaagtatgaattagcagctattgcagatcccttaacacttaatggatggtctctcagggtagaggttggaattttatgagtttgtgaggaggatgggcattactgatgatctcagggacagcactactcatgctggacccccgggtgactgctaaatgatgataccacttgaggtaaaaagagggagaacgttttaagcaaatttttaatacaaaggattgagtcaggtgtgctatttctagactagactgttacgtggaaaaagtcctaatttctaaacctctctttttgttaaagtggttatggccatgggaaaaagtttggtttggatttgcttggtttctgggttgcaattacagctttttgatccaagcgtcttatggacacagactagaaacttcccatgcaactgggacttgaatttcggcaacatggttgcagctgttttgaattaattattgtgagtcttttattttttaaaggttattaggtggtagtcatagctggtaggaaatcaacttggggcctcttcagtcactattttgacactatgtggcattttcatcaaagtggagacaagggttggtggtccttgaatggctgctgctcttgaaacaaatggctttttaacatggcctcagggcggctgcatttttggaactgctttactttttaagggttaaataaagccgctttgtacaactgtcccttggctgtgatcatttttcagtttgccccacaggagtacatactctaaaagtaaattgtactgatccctcatatttccgttcttcatttctttgcactgatgattctcctgttttgtacaaagtgtcagtttcgttctgaaacatttcaggagaggacaaagagggtgaggctctagatgtaaactttggacacttggctttcttgccttcaaccaatgtgcagagccattaataaatatgtccttcagatctttaaattttttgtaaaataattttaccttgtttttcattaaaaatttttcttcctatagcctcataattttaatgtcctttaaacaaaagagttggaataggcatgacttgttgaggccgttaagcgggttatttttacccttgtactgctaaaccaaaccgatccagaggacaacaaaagcccattttttgcctttggagagtctggttagagatagttttctccagggtaacactttacatttgttttctgtgtgccatcttcaagttcagcagccattttggtggttgtcttgatggattctaacatctggtcatggtggtcatgaattggcaatccaaaccttgaggaaaatctgcagaaacttttgaaatgctttggttttttcccttttgtgtagattagaatcatatgagtctgtttaactgtttagatacaaaatctgagccctaaatttgaatttatttgtgtcctttaaatggggaggtttagaaagcggcaagaatgaagcctggcctaattcactgaagagaatccagatgctgctctggttttgtgatcttattatattcaaacattctgcctctacagatgtggagcctagtgctgtgtgcaggaccagctatagaatttgtggggcccaacacaaaacgaaaacaaggggcctcttgttaaaaaaaaaaactaagaatgtcatggcagcgataacagcattaaaccaagctcagggcccctgagtgcggggctctgtacaattgcacgagttgctcacctgtgaagctggccctgcggccgtgtgtgcctgtgagcttataccttcgcatacgtgcgtccttgtatttatagcatgtgagctcagcccgatggcatcgcaatttgtatgcatttcacctgcttgccaccaatgagagcgtatgtgtaaaacctcctcccttccccagaaaagtaaatcacgcagacttctttcctatagatttggattgcctctagtcatgaatgagtcttccagacagggaaattgatacggaaatctgtggaatagcttgtttgtggtgggaggaaaatcaaggacatattgttaacgtgttttcacctacttttactgcacacctgtaatgcctagttcggtggtttagagaatatggagtgtttctgggctttcttataaggcagaggctccatacaaggttgctgatgattgttctaaattcccattgttttcttggcttttctcccttggtttatgtgtcgtctggaaactgatttgtagttggtgaggtaacatacgtggagctcttaatggacgctgaaggaaagtcaagggtaagtgtctgagagaatttcttctgtggatttactacatgaaaaatgtaactgtatggtggcgtggaatcgaatgaaatcaggaaggcagtgagtgctcatgttacagtagctatgtttgattttgccaaacatttgagtggggtgggaggggatttgcaaatgggagtcccgcttttccaaatggctggccaaagagctttttggtattctgtttggatgcccaatttggataactggggaccaatagcagcattgtctctttgttaacagaggaattggctgtgtgtgaattatgcatggaattttagcggtggtataattaatgtaaaacgtgtgttcttgtctagaaaatgttactcttggttgtttgctgaatttgaaagttgtgtgaaccaaagattccgaaaagttgcctttgtgccagtaaattgtaaaccaaatattaaaaacctgaatgttcaaaattggcctagtttaaagagaacataaactattttctgtcgtgcaatagaatggcttagaataatcaaaaggatgagcttaacttacggaagggatggatttaggaggaatatggtaaggactcgattgagtacagagggaagcagatctaaagttggtgtgatttcttggagaccctgaatttaggtctgcttattaaatgtcagcagctctagtgcaatgctggtaacgcgtaggagaaggagatattaaggagcccagcttttaacaaggaaggcgaggcgaggcacttctgtcagcttccccttagaagggttcattttaaaagactaactttgtgacataaatcatatttttagtttgtttataactgtcattgatatttactatttttttcttttctttttccccttccttgctcttctgactggtctctggcttcctccaaagggatgtgcgtaagtatcgtctagttacttattggtatttgagccttctaacttgtaggactggtttcactcgactcgtttccttttgactctatagtgttgttgaattcaagatggaagagagcatgaaaaaagctgcggaagtcctaaacaagcatagtctgagcggaagaccactgaaagtcaaagaagtaagctcttgcttaacactgcggatactgtgtgtaattgttgagtgatcctactttggaattagggaaagacggtcatggtcccagacggcatttacaaagcaagtgccagcctgttgtttctaatgaagagtgtcggtcatagcctacagcagccattccctgcaaggactttggggtggtggccaagcagatcctgagtggctgctgaccaccttctaatatctgtgatttgtctgaggccttgttgtctcagggactctcaaaccatgagcccgtgggtttgtgccattaagttttactccatctgacccttcttcttggcccatcttttttctttttttaaaaagtgagtttgttccagcctgggcaacatggtgaaaccccctctctacaaaaggtacaaaaattagccaggcatggtggcgcatgcctgtagtcctagctacttgggaggctgaggcaggaggatcatttgagcccaggatgtggaggttgcagtgagctgagattgcaccat

SEQ ID NO: 90737 - DNA, 4462 bp, Homo sapiens
tgattaaatccctcttggctgggcgcagtggctcacgcctgtaatccccagcactttgggaggctgaggtgggtggatcaaggtcatgagttcaagaccagcttgaccaacatggtgaaaccctgtctactaaaaatacaaaaaattagctgggcgtagtggggggtgcctgtaatccatctactcgggaggctgaggcaggagaatcgctggaacccaggaggcggaggttgcagtgagccgagatcgcgccattgaactccagcctgggcagtaagagcaaagctctgtctcaaaaaaacatccctcttaacttcttttcacctcttctcttggggaggaagatgagtagattcagagtgaagcttggtagggtctaaggtctctcatgtgttatgatgtcttttttagtgctgatggtggtaattgacaggacagagagttgaagaagagagtcagtacagagcttcacagaccttcccagatgttgttttactgcgcagccctcacacacacgcctccaacacctgaaggacttgaaggatgggggcgcttgtgtggtctagaactgtttctcaaacttctggaagccattgacggggtttgcagaagttacaaaaccccattgatgaattagtaagattcagctataccaagcccatgaagctctaatttcagtctggcggttctacattatatcagctaatcatgtttccctccctaccctgcttttcttttttacttagtgcaattgagagctgtgtttttagtgctacacttcatgccttttcttcctttcctatttctttagctggactcttctaagctggtagttgagttcatttgactttcttgttaatagatttgagagatgctttccaaacaacctttcagtttctaagtcttgagaatatcatttactgtgcaagcatggtttgcgttgtactgggtcagttaaacgtaacaccttttgtgcttgttttaggatcctgatggtgaacatgccaggagagcaatgcaaaaggtgatggctacgactggtgggatgggtatgggaccaggtggcccaggaatgattactatcccacccagtatcctaaataatcccaacatcccaaatgagattatccatgcattacaggctggaagacttggaagcacagtatttgtagcaaatgtaagtaaacagaaccatcgtctaaagtagaaaatcagaactttatgaaatgaccttgtcaatatgttataaaagtaattctcacatttgagaagaaaaatgtaaagaagggttttgttcttgatttctttaaaaatcagccttataggcgggctttgtctgcattcctaagtcacaggcttgaccgtggtctcgttggggctgtgattcctgagtttcgcaggtgtttccgcaagcagtaaccgagtctgcattctccgttggtttattttatgcagttttggtgcagagtaagactgtacgagcagaagtgcactgacaccttcctcttgttgtgtctggggtgaatgataatacctccaccatctgcaaggggaaatatttttagaataaagtaggttgggtggggtggggagtggtaaagcttatcagggaaacaattttttaaaaatgttcagaaaatgagtattaatttgaagtatgaggtgacttaagtttctgagaaaagagacaatatatttactataggtacagtttatttacagtgaaggccaggctttataatcctattttaaaatttccattgcagttgattagtttttgtgacattatttcctaatacttttttccaaccaaagcatgtatcattcatgtagtaaaaatgttgtgtttcttaagatgtttacattgaggtttttaccccgttctctctcgattagctggattataaagttggctggaagaaactgaaggaagtatttagtatggctggtgtggtggtccgagcagacattcttgaagataaagatggaaaaagtcgtggaataggcactgttacttttgaacagtccattgaagctgtgcaagctatatgtatccttctgcaggaattcaacttatgaacagtttgacctaaattgctgtgttagtaatgtaggtttgtgtgaggaagaggtgactgtgtgtattcatgttttttatgtgactagggggagtgcattactgtggaattaagaggttctctgggccggaccggtcacggtggctcacgcctgtaatcccagcacttcgggaggccaaggcgggcggatcacttgaggtcagttcgagaccagcctggccaacatggtgaaaccccggctctactaaaaaatgcaaaaattagctgggcgcagtggtgggtgcctgtaatcccagctactcgggaggctgaggcacaagaatcgcttgaacccgggaggtggaggttgcagtgagccgagattgcgccactgcacaccaccagcctgggtgatagagtgagactcagtctcaaaaaaaaaaaaaaaaaaaaaaaaggttctctgggggtggaattgattcaatacagtgtggatagaggggatggttacaacatgggcatatgcccatgagtctttctactgttttcttttcagaagagtctaggtttgaaggaggaagtccaaagaatgtgctactagagagaaagtggggttgttgtttcatgtgtaatacatccttataggacctcactctttccagtgagtagacatcattttggaagaggccacttctccttgaccctaggcttagcctagagtttttaatcccttggagagtaccccacaggagcacattcatacaactcagacaagaccgtcactgcatgtcttacccagaaaacatggtccttcagtttagatagtggtagatgcctggcccattggtcacattcagagaaccttgatgccactgcttaagaggatggtttggtgaaattgtaaggttacgaatgaagcttcacacctaaggaataagcggaagttgtcttgtcctccccgccagctttatttattgttccttttatgtttattgttgaaagtataatgaagaattgaaattgctcataaattcatcacttagagggactggtagcagttggagtatttttctttctttttgtatttctcttgtgcacatttttagaattgcaagaaatagccttaattgtaataccagctatgttcaatggccagctgctatttgatagaccaatgcacgtcaagatggtaagtcagtaggatctttctctgtgatatactcaagtctagcaaaaacatggaattaataagagtgtacatatagccactatgaaatatttgtggattagtctaagttaaatagggtgcagtatgttgagcaaaattgtgagagaaataacattttgctggtcaggcgtggtggttcacgcctgtaatcccagcactttgggagtctgaggcaggcggatcatgaggtcagcagttcgacaccagcctgaccaacgtggtggaactcctccgtctctactaaaaatacaaaaattagccgggcgtggtggcacgcgcctgtagtccagctactcgggaggctgaggcaggagaatcacttgaacgtgggaggcagaggctgcagtgagccgagatcgtgccactgcactccagcctgggcaacagagtgagactctgtctcaagaaaaaaaaagaagaaaaaaaaacattttgctcatggcagctcttgactgcattagatatttttccttttgcacagttgactgttcatggcgcattcaggaagtcacctgggtatcctggttgagcaagtgatccgtttcaaagaatggttatatatgtggggttccagtttttcaaagtattacagtataatgtttggttagcatcaaatctgttgtgaacataattaagtcattgattcagacagcttttaaaggtctgttggagcacttcaatcttaataaacatttgctctgccgtaactgtgccaaagataataattactacaggcatgactggaacatgctgagggcagtctagttgggactcaaattcaggaaaaagataaactataaagcaattttttcattactctaaatagagtaggtaagttttttgaatagatgatagattcacgtgactcaaaagtcaaaaggcatgaaaaggtagtgtgaagatagtgtgagtcctacttggacttcttgcccaggtccccatcatcccccacaataatatccatgtgtcttttcccttgacataaaataggaagcatgctccgcatgcctttctacccttgcgtattactccatggcgtggataatgtgtttagctggtcctctcttgatggggggccatttcagtcttttgctgttgcaaacactgctgcactggatactgagatttgtttgttttctttctctttcaggatgagagggccttaccaaaaggagat

SEQ ID NO: 90738 - DNA, 2131 bp, Homo sapiens
agcttcattgttactaaaaccacccagattcagagagtagtggacacccaggatgttgattggctggtttgtaacgtgttttttcatgagaaacatcctttgggctactagggattgggcacatttgtgctgcttgccacctgatgtcttgagtcaccttttttgatcagacagttctcagtccatgggttagtgaaacaaataggctctcaagaatcttagtgtgggggttgttaactttcccgtgttggttttcagccgcctttgttgtatacacacatatcccaaacgccggaacaaggctctgtttccaagtgtgccgatgttgaattttgcattgggccctgaggtcactggtgggtgggggtgggtaggctgaagtggatagctgcaactcactaaacactcttttcctttgagggtcaaggtttgctaaataggggaaaactaagcttctttctcttttctttccagatggccttggtggtattggcatggggttaggaccaggagggcaacccattgatgccaatcacctgaataaaggcatcggaatgggaaacataggtcccgcaggtgagaatgacagtgcaccttgcttggtggtttggggaagtgaaaattattaattattgggacaactggactttgagtagtttaaatggaataaatatttaactgggacaaaattccctccttattcatctctgcctcattttgaataaaggcagtattttgtatttttatcaagttgagtcattttttaaaaagtcattatgctttttcattgtaacctgacaacaaccttctaagctgaaatagttgtgccatttgataagaggaggcaagccagagagttgatcttgctcaaggtcacactgtcagttactgacaggctgcaggtctcctgaccacgggaccatagcactgccgcagtgccctgaaaagtgtcttaccaagacccctttgggccctcctggtgtttgcacagctgctgctagagagctaggggcattgatagatgcaaaaaaggtggagaggccaggcacggtggctcacgcctgtaatcccagcactttgggaggccgaggtgggcggatcacaaggtcaggagtttgagaccatcctggccaacatggtgaaaccccatctctactaaaaataaaacaattagccgggcgtggtggcgcacgcctgtaatcccagttactcaagaggctgaggcaggagaattgcttgaacccgggaggcggaggttgcagtgagctgagatcacatgactgcacttcagcctggcaacagagcgagagtccgtctccagaaaaaaaaaaaaaaaaaaaacctgcatgaaagctttgatgtgtagaataaactcaggctttgctgtttagcattttcattgctgtgtaatgatgtattttgattctattaaggaatatgtcatttttatgaccttagactttggtctttgttggaatcctttgaaattggaatatggaagcccctctatcccaccattgtcagtgttgcatatccctagactctcttccagagtcaccctggggctgacttaaattctgggccacaacttcaaatggctgttaacgtttcccccgacccaaaacacacacaccccatgtctgacatctaaacagaaagactgggggttggggaggaagtcttggtgtttttaggaactggtttttattttgaagattttacctttaacagggattgatttattgagacggaattttgctcttgttgcccaggctggagtgcagtggctcaatctcagcttaccgcactcaatctctgcctcctgggttcaagtgattctcctgcctcagcctcccaagtagctgggattacaggcatgtgccaccacacccagctaattttttgtatttagtagagacagggtttcaccatgttggtcaggccgggctggaactcctgacctcaggtgatccacccgcctcggcttcctgaagtgctgggattacaggcgtgagtcaccacgcccacccttaacagggattcttaaaaaaaatctacttctgttccctaaaattttctaaaaagtttatgttccatagaatgtgtcttataattctatttcatgtttaat

SEQ ID NO: 90739 - DNA, 1075 bp, Homo sapiens
ctaggcgacatagactccatctctacaaaatataaaaaaaatcagccaggtgtggtggcgtagtcccagctacttgggaggctgaggcaagaggatcacttgagcctgggatgttgaggctgtagggagctgtgaccatgccactgcattccagccccagtgacagaaggagaccctgtctcaaaaacaaaaaaaacacaaaaaccctgcccgactgggtcattaaagtatgtagatccctcagaaaaagattagccaggcgtggtagcaggcgcctgtaatctcagctagtcgggaggctgaggcaggagaattgcttgaacccgggaggtggaggttgcagtgagccaagattgtgccattgcattccagcctgggtgacagagcaatactgtgtttaaaaaaaaaaaaaatagctatatgatatttgacagttgaaatggtaagggctttttttcttgctgattaaaatatataaaatatacttgtcatcagggattttcttttgagttcttttgctggtttggaattatgctttttaagttcaaacgttatttactgctttgacataattttagtttgcattgactttttctttttaaggaatgggaatggaaggcataggatttggaataaataaaatgggaggtaagaaatttaaaatgaagtacaagcataatcacttttaggcatagttttctctctttcctcttttctttcttgtttaaaccctgcatgaaattctctttggtttcagtttgagtctagaaatgacttcctcctgcctgtccatccttccagcgggtgtcttggcttttggttctggctgtctcactaactagctctgtgaccttgggcagaccactccatctctatgcctctttttgcttgtctattcattgagggggttggatcagaccagctttttgaagatgggtgatttttaaacaagggtgctagcattttttttgtttttcaaaagcctttaaacttggtaagttcttggcagaagataccccagttgaaacatgtgatagaatttttctttccctgcttagtctaagcagtcttgttg

SEQ ID NO: 90740 - DNA, 1145 bp, Homo sapiens
tggtggtgcatgctgtaatcccagctattcaggtggctgaggcagaattgcttgaacctgggaggtagaggttgcagtgagccgagatgacaccactgcactctagcctgggcgacagagtgagactctgtctcaaaattaaaaaaaaaaaaaaggcatctttacttctgtaggaactttttcttgctaagagccttcagcttcttgccactctgcagcacctctcgcctaattccgctttttggagtggcacatgagtggcacagagaggtggatgtgggcttcttgcctttgaggtcacttcatgtggccacaggaaactgttcctgtcctgaccggcagggcgccacctctcccgctgcggttacaccttctttctgattgggactgtgcgatctctgtcccggaattccctcctgccgctgtgatcagacctacatgagtaaggtgatctcgtcaggttctcagagtggttgggttggtttttcaagattcaattcttgacctctttcccgtgtcctttgccatgagaggtgaaccattgtggtgctcctttccatagtgctttcctactcggtgccccttcctgtgcctaggcagtagatctttgcactcctttgtgcaaacagctgtacttgctgcttcaaaaatttggataggcctgtggtctttggccttcaaggatgaggtgtagctgaggcgatactaagggtggcttgggacatcgccagaggtctgtgcatccaagtggcctagtgaggacgctggtggagacgttggttgccagatgctgctcagggcattggctctgctagggggctcagcaggcttggcacaggcagcaggtgtgcgcagatagagcggctggcggcggtgggtgcaggtctctgtgaggcaggggaggagcatgggcagaacaggctccagttgtggtctgtggggaggcctgtgaatgccgatgggagaattccgccattctctgcaaatcagtggcatgttggttgaaagcttttgcagctgtcttgcaggtgtgttagttggaagcttgatctagttcaggggtgtgcacgggagaatatagtcatgggttctcagttggtttctgtttgggtcagtaaagccccttatccctcttttccacttat

SEQ ID NO: 90741 - DNA, 1505 bp, Homo sapiens
aagcttggaaaggtaatgctatgatagcatcagacaaaccttaaagaggtgtgggtgcaccgtgggcaagtgagcagcagcactgtgtttgggatacttggtggggggtgcaatttaggtattttcctgaaaccttatctgttgcctagtcacagcacacccagctcatttcaggcaaggctggcatgctcaaggatttccgcgcagagctcatttgttagcgttgaggttgtccgtggagctgcagctttaatttgctctatgataatgagaggtgcctctgggtggataaatgtgggctccaagtgggtgatgctgggcggtcttctgaacaagaagttggctggggtgggggtgggggcttactttccagctcaggggaggcaaggaagcctcagtcctgagagcctggaccagctttagaaaactgccgctgagcgagacccgatggccctcttcttgctctggctctcagttcatgaatgcatatgactcctatctctgctgggcgcattcgcaggtgaccccgcacgctgggcctcagactctggagctacgtggggtcttggcatcgtgacccagcatcaaggactctcctagttctctgtaaaatgatcttgtctgtgcgtgtgtttctcaaacccctttccctttatcttgtcatttttattagtagtatttctactctggaatctgtaatgagcacatttctattgccatagaggaatttggctaatttttttttcttcctgatttccttagaaatcctaagtaatgcactgaagagaggagagatcattgcaaagcagggaggaggtaggaaccgcttagtttgatgttttgtttttttagaacaggctgttatcgctggggactgtagagcttagtggtgagaagtgcgggttctgacacagactgcccggggtgggagcagctctgcctttttctagctgtgtgacgtttggcaagtcactgaacctctctgtttctcatagcactcatttgtaaaatgggggtgtaatagtacctgcctcagggatgctgtggagagtgaatgcatgtgaaagagtgcttccgcacgtgctgtgcacaggccgaccatcttcattgttagagtacctctcttttgggggttttgttttccacattataaattcctaaaagtaaatatattttccttagacttgatgataagactgaaagcacaccacccaacaagtaataaatgcttgtaaaatagataaatgtactcattaggaaaatatgaagaaagtatggtctgaaaccccatcgcccagtgatgactgccggaaacattttgttctgaatctttcattcatacacagctttatggatactgagaacaaaatgtactttttgagcatttttggagacagtctcgctctgtctcccaggctggagtgccgtggtgcagtctctgctcactgcggcctcaacttcccaggcctaagcgattctcccactttagcctcccaagtagctgg

SEQ ID NO: 90742 - DNA, 2360 bp, Homo sapiens
atcttggcatctcacctcctgacttctgtgttgggctggctctggagctccacgctggtaccatttcctcccatttctttttttttttttttttttgagagacggagtctcactctgtcgcccaggctagagtgcagtggcacgatctcggctcactgtgacctccgtctcctgggttcaagcgattctcctgcctcagcctcccaagtagctgggactacgggcgcacgccaccatacccagctaatttttgcaattttagtagagatggggtttcaccatgttggccaggctggtcgcgaactcctgaccttgttccgcccgccttggcctcccaaagtactgggattacaggcatgagccaccacacccagctgccccacctcatttctgatgcctttgggcaaagtgcccattctcgctaggttccttatactgtggggaagttctgagacgtctcccctctgaaagtcacacattcttagagtcgggcctgctttggccgctcactgtgtgctgtgcagctagagaagcaggcgcggtgtggccagttacagagccagttagagaaactgcccagtttcctcttgaattggtatctttgactaggctgcttgggtcggtcacaggctggctctgggctgatggccactctcagaggcaagcgacagggtttcggggaggagccccaaactcggcatgtggaaaggggtggccttgctgacggagccagaccctgctttccagagttgcaagcaccacgggtgggggcgtcccttcgttctgctgactgacccccagccgctaccagagcccactctgcagtgccatcaacatcttctttccaaagccagcaagtcatttggtttccctgacaatagggtccccaaaagtggccagctgtgtgcatttgtacacagaggatctctcggtgtgtgtttttttgacctctgcttgatggtgtggccgaaaatcctttctctgtgccctgggagcgctgaggaaatgcagccagagtggcccccagcagagcatcctagagggacaggctgggaggggaaggtgggagtgactccgacttgtctccacataactcctgttcattaccctgggtggccccccgagtggggggtgtccatgcctccccctggagcatttctcagtgtctgctgatggagaaacctcagatgtctcaggaattgacgtccatggttcacaaagcttgtcacagacactagcacctcacagacacacatacaggggtgttctttagaagttgtgttatggaaatctcagctgtggcatagagcagagagaatgctgggaggcccccatgtgcccaccacacagctgtagctgttgtcaacatttgaggggtgtcttaatggtaaattatggtgggcctttacccctgatccatgcccatgagctgaagtggtctggcgtgttgtgcacacgcacactcaagttcttgacacccacctgtgttttgtgtccctgtttcaggtggaggtggaggaagcgtccctgggatcgagaggatgggtcctggcattgaccgcctcgggggtgccggcatggagcgcatgggcgcgggcctgggccacggcatggatcgcgtgggctccgagatcgagcgcatgggcctggtcatggaccgcatgggctccgtggagcgcatgggctccggcattgagcgcatgggcccgctgggcctcgaccacatggcctccagcattgagcgcatgggccagaccatggagcgcattggctctggcgtggagcgcatgggtgccggcatgggcttcggccttgagcgcatggccgctcccatcgaccgtgtgggccagaccattgagcgcatgggctctggcgtggagcgcatgggccctgccatcgagcgcatgggcctgagcatggagcgcatggtgcccgcaggtatgggagctggcctggagcgcatgggccccgtgatggatcgcatggccaccggcctggagcgcatgggcgccaacaatctggagcggatgggcctggagcgcatgggcgccaacagcctcgagcgcatgggcctggagcgcatgggtgccaacagcctcgagcgcatgggccctgccatgggcccggccctgggcgctggcattgagcgcatgggcctggccatgggtggcggtggcggtgccagctttgaccgtgccatcgagatggagcgtggcaacttcggaggaagcttcgcaggttcctttggtggagctggaggccatgctcctggggtggccaggaaggcctgccagatatttgtgagaaatgtaagtggctcttggggaacttcttggtggtggtgagcatgaggggacagg

SEQ ID NO: 90743 - DNA, 3051 bp, Homo sapiens
agtgggacaagtaaggaatgtgagaactgtgggttctggaagagcctgggcttctccactgtgctagaatatggagcagacgctgagctcagagactccagtttctgattggttggcttgaagaggcactatgtgttgcacgatggtccagggaaagaagtggctgtaacggaattattttccccagctcagccacccttagccactatttagtgactgtgggctgcgcaccgcaggcctgagtgtcccatcctgcacggtgctcccacaggcagagccccagggagggagctggctgtgccgcttcacagccttgtcccacatgtatctattagtttcctgctgatcgcctcagtctgaagggcagccagcttctcggtatagtgagaaatctagcatggccctcagagccagctgcaaggcatgccttaggatttggtttaatcacgcatcagtctcccttttcttctccccttcagctgccattcgatttcacatggaagatgctaaaggacaaattcaacgagtgcggtaagtgttgggaacggctttgtaggtgcttccctcgtgcttgttggtgacgcagccgagtcagcagcaaaacctccctcccagccccctccgtcggctcaggacccatggccttgccatgttctgcccacgccaatgctcaggcaggttgttgagtgtcctgtgatgtgtcacatgtttttcagctgtgttctcatttcatccttacttccttttttctttttgagtctttgaaacaaggtagtagtgtccccatttcacagatgagtcaggcagagtcttccttctgaggttacctggcttctaggtggcaaggctaaataaatacatcccagacgaggtcgctttcccctcagcacagctggtgtggggcctcggagagaacacagcccagcaggtgccatggggaggcggtgcaggctctgggcacacagcagctcctgtgagggtgaggctaaggtcttgtggtttcctggcacatcgggcaactcttctggagggctctgtctgtggctgaaagcaagttgtcttccttccctgccctccagggtgagcccccaccccgcatgcaccacctctgttctttttagctagaggggcctgagctagaggtctgggcagctgcttccgcactgtcctcccgcttcctgtttcagcagtggctccgatttcaccaccattgctgcttctccatggttcttggggcaagccgttgagtcatgatctgcctctttgctccattcttcacctctttccccactcctgagttcccatgttgtagctagatattctgaaaaggccagtgggatcacagcgcccccagcccccacttttgcaatgcctggagcggccctgtgccttcaagaggaagtccagactcacaagccccttgaagacctggtcctatcctcctccatctccctcctgtcccagaacctgagcggcaagtgctgcacgtgtcccgcaatgctctcgtgtgagccaattactggcaagtcttctttctggtgaatttctgtgtaagctcactcagaacttgcccctgaggacccctccaccctacctgccctgggccctctcttaggcactgagttcccacctctggcattgtggccctaccacctttggtactcctggagtagagcctttgccctctagggctctgtccacggcgttgacacatatctggatgcttaacgggtgctcaaatgaataagtgaaacctgctggctttcatttggacagtacagacgtgtccattggattgcggatggctttgtaaccaggggcggtggcatatcaaaaatgaagactttgtaaaatgtatgggaactttctgcctataaagctggctttacactgcgccttcttttttgaacttcctgaagcgtaaaggcgtgcattgaatccgccaggaaggcttttcatggggcaggggcaggctctgttagcagaagaatggcagtgtggctgagggggccgtagtcattggttctcgccattgtattctgagcctttgtgctctaggcttcagggcctctcctttttgactctgtccaccaaaatctaacaaaatcgggactgagtgtcgtctcttcttccctccctgtcctaggccacgtgctgtacgccgacatcaagatggagaatgggaagtccaaggggtgtggcgtggttaagttcgagtcgccagaggtggccgagagagcctgccggatgatgaatggcatgaagctgagtggccgagagattgacgttcgaattgatagaaacgcttaagcagttgccttttttaaacatcgatacgagacctctgaatttgtattttttcttgttaaccattttaatttgttggctggatgtataaagatgtttaaaaaattcagttgctttttggggtaatttgaattacttttttaatgactggggttccatttgactgtttgcattgagattgcaatgtgcgcaattttttttgtagttgtggcatcttgttgacatcgaatatgactttgataataaataccggttcctgaaaacggcctgcttgtgtgtgctgtgtgggcaaccacgcgaggtgtggggagctggggtcactcgagcttccagtccaagcagcagggatctcatcccctctcttgcttgtctgaggccccaggggtgggtgcctgcccacagatggggggagactcttccctggaaactgccttcctgtgggctgtaatcccccggcttacaatggagcgtttggctgtttagagccttctgaggccaggcgcggtggttcatggctgtagtcccagctactcaggaggctgaggcaggagaatcactcgaacccaggaggcggaggttgcagtgagtgagatcgcgccactgcactccagcctgggcaacagagcaagactccgtctcaaaaaaaaaaaaaaaaaagccccccgaaagccatcctgtctccctgttgtgaagttaacgccctggggcacaggccctgcctgagtcaggcttgttctctggctt

SEQ ID NO: 90744 - DNA, 1087 bp, Homo sapiens
ctggtgcccctggaggcccagcccagcccagccctctgcccacctccaggtgtgagaactgcctcctgcgcttccgcacgcaccgctcgctcttcaagcacctgcatgtttgcgcggagcatgcgcagagcccagccccgccgccacccccggccctggaccgagagccgcccgcgccggagcgccccccggaggttgaccccgcatcagcgccgggcctgccgttcccgctgctggaacccttcacgacccccgcccctgcccccaccggaccgttcctgccctacttgaaccctgcgccctttggcctaagccccccgcgcctgcgccccttcctggccgctgcacccgggccgccggcttccagcgccgccgtctggaaaaagagccaaggtgagtgtggggtcgggggcctccaggagggctggctgggctcgccctgactctgaacttgacccgcccctttaccgcaggtgctggcagcagcccccgaagaccccagggcggctccgacgcgccctcaggtgcgtgcaggtgaccaccagggaggggtggaggggctttctttcctgcgccctgcggggtctggtggataccaggaggcagcagtgctcatccccttcccagggggcacaaatgccaccgtcccgaaatacaggatttttgccttaaaaatgactggcacctgcgccttcatctgcgccggcgttcccgtataaaccttgcgcccctttcaccgttcacctcggagcgggcttctccccaacagtgaatctggggatgatagtaggggacgcggagaagccaagttgggtgcccccaactctaggggcagacagacccgggagaaactgaactaggcgcccggaagctgatggggggcgggaaaaagtcccacccaccctcgccggcgtcctccatccttggcgcacgggtcttctgggctgggggagcccgggactgacggggtcccgcctgcccgcagggcacgcggccccgagccgcatcgtgtgggagcacacacgcggccgctactcgtgcatgcagtgcgccttctccacggcctcgcggcccgccatgaccctgc

SEQ ID NO: 90745 - DNA, 1635 bp, Homo sapiens
tagatagcaagattgcaccagcgtccgacctgagctccagggtgactctgccctcaggccccgccccctctccgagcgccctgcgcaggccccgcccccagtctcgcgagagctgagaggtggaaaatggcgctgacgtgagcgcgaactcgcactgcccagagggtggccgccgcctaagctgcagccgccggagccgcagaaacaagaggccgagccgtgtcgaagatggtgagcgcggcaccggggtcgcgggcgcggcggagctgcggggactggcggggagcggccctgtcgcgcctacagcctccggccgaccccgcccccacatccgggcacccgtccgccgctggctgtcactcggagagcgccctacttccgggcccggcccggaatggaccacgcccgtcaggctaggactccgcccctaaacttcttacatccgggcccccagcacctccaagattgtccacactgctcgaggccggccggtctcggtcctcagacaatccatgtctagctcctctagcatcttcccagtccatgcctgcccatagccccgcctccgtagccttggccccgcccactccctctaggccacgcttgtgtgcatactggggctcccacctatcctagttgaggagagcagatgtttctcccgtatgcataaggagctcaatccgggccagtgcagtggctgacgactctaatcccagcactttgggaggctgaggcaggaggatcacttgagaccaggggttcaagaccagtgagggcaacatggcgagaccccatctttataaaaagaaaaaaagagcttagtccacccttacgtattcccctatcctctcctgctggtgattccttaggatgggggccgactgggttgacccagagcccagaagggttctctccgcctcttccttccaccaggaggagaaaccctcagggcccatcccagacatgctggccactgcagagcccagctccagtgagaccgacaaggaggtgttgtccccggctgtgccagctgcagccccttcctcctccatgtcggaggagccaggccctgagcaggcagccacaccgccagtgtgggaacgtggaggggctggagggatgcagcagggctcctccccagccccagacagctgccagcctggccccggacccagccctggcctgaccagcatagtctccgggaccagcgaggacctgcggcctcccagacgacgcccacctccaggtgatctgtgatggggtcttctggggaatcacagtccctgaaacaatagaagcgagacgtagagaatctctaacctcagggcctttctagagggatgccactcatcattttacggagcagccggtggatgccaggctgtggctccaatggtgagcctggccagtccagcccctgcactgtggcagaccagtctgttgtggtaggcagagagtaaaggccccagcacatcatatttgcttctctggggcagaaccctggggtcagggacagcactagtgaggaagggaccagtgaccactgttctgtgcgtcctgcagggaagcaaatcccttgctccagccctggctgctgcctcagttttcccagcgtccgtgacctggcacagcatc

SEQ ID NO: 90746 - DNA, 1067 bp, Homo sapiens
gattctgtctcaaaaaagaaaaaaaatgcaagcaagcaagaaagattccatagcctggaaccagaaacccaggtgtgtcctgcccagctcaccctcagacctctaatgagggatccagtcctatcccagatgtgtctacacgcccagcccaggctaccttccaggcctagtctcacgcagaccaccacagcctcctccctggcctccctgcctctagcctccctcctccagcccatctttctctgagcaccccttttctgactccatccccccaagcctggcctccctccatctctcctctcctgcccccaggactgtccccctggctcccaggacttcagagaagtgcagtgttctgaatttgacagcatccctttccgtgggaaattctacaagtggaaaacgtaccggggaggtgagtgtgggactccaaaggctgtggggccgtgaagggcagccgtgggagtgtccagcagcaggtggatgaatgcagcatcccggggtctgccctgagccctgtccccacccggggagacagagtacctgggatacggtaccatgggggttcaacgtgacgctgggagcccccactccctctgcccaagctgcccttcctcttgggtctggggtctgtccctcttggcctcactcccccagggagcaagcaaagagttccggggtggcctggcccgtggtgtgacggggccgtgccccccagggggcgtgaaggcctgctcgctcacgtgcctagcggaaggcttcaacttctacacggagagggcggcagccgtggtggacgggacaccctgccgtccagacacggtggacatttgcgtcagtggcgaatgcaaggtggaggggactcccagggaggtggagaggggatggggagcgggggtgggttagggggtcgcctcactcacgccttctccacgcagcacgtgggctgcgaccgagtcctgggctccgacctgcgggaggacaagtgccgagtgtgtggcggtgacggcagtgcctgcgagaccatcgagggcgtcttcagcccagcctcacctggggccggtgag

SEQ ID NO: 90747 - DNA, 1024 bp, Homo sapiens
agcccgcggcccaggccgggcggcggcaggcgggcggggtttctggccgcgcgcagtttgggggtttttttataaccctggcaggcggctcaggaagtgccttccccgcgccccctcccctggccacgccgccgcgctcgctcgctccctcccttcctgcgcgcgcggggcggcgagacagcggcggcgacggcgcggaggccccgggcgcggcgcaggtagcggcgcgggcggggggcccgggggtgcgtgattcagtgggactttgtgtgtccgcatcgggctgtgagggcgtggggctgtggtgccctggatgggggagggcatcccgctgtgcgactccggtcggtgcctgaggtccgcaagtgcgcgcgccactgatcacgcccggggttgccgtgggtttgtttgcgctgtgtgtgtgtgtgtgtgtgtgtgtgtgtgtccgtccacgtaggggcagagtggttgtgcattacatgtgtgtgtcagtgcctggggatgagtctcttgtgtgtctgtgtgtttggacagtgtgtgcgcataggggtttgctatgtgcgcgcagatctggaggcgagtgtgtgtgtgtctgggtttgtgtgtgtgtccccaagcatgtgtgcgtttgtctctgaccgtgatgagtgtgtaaatacctgtgtgtgtgtgtctggtgtgggggggtgtctaggtctgtgggacttgtgagtttgtctctggtttggtgtgagcatgcaaatgagtgtgtatgtgtcagcgtgtaggcctgtgtgtctgtctccttgggttgtctgtgtatgtatgtgtgtgtttctgtttgtgtaggccccgggtgcgtgtatttgtgtgtccgcgtgtttctctgtcttgtcccgtgtgtgcgcgtgtaaatgagtgtgtgtttacacatgtctgggagtgtgtggttgtgtgtctccatgtgtttgtctccgggtgtgtgagtgtgcactgagcctgtcggcgtgtgtgtctgcggtggaggcgtcctgcgtcttttgtg

SEQ ID NO: 90748 - DNA, 1114 bp, Homo sapiens
ctgcccaatcagcctcgccctccaggcctggtacggcctcagccggttccccgccttcagccccgccccggaactgatctccgcccacaaccagccccgcccccaggcctcgtgcggctcacagcctggccccgcccccagggccaaccttacccccgctactgccccaggccagggcccaactttgtgcccactaagcaaactagaacacctctgcccaaggctggggttcgcggccgccgctcccgcccgccgcgcctgtcgcctaagcgccgaacccccaacacgctcgactctgcgaggctgcccgcgcgagccggaaggggacgtgcagcgcacctctccccagaccggaagcggaagcgcggggcggtaccgtgggaggggccgcgcgtggggcagcggggagcgagtccctccgtccccgcgagtcggcgcttttggccccgcgggaggggccgggctcggtgagcgactggcgggggctcgggtccgagtccagggggcgacgtgggccgcggacaccgccagccacgggccctgcgtccctccagggagccgtgtttcggttcatgaggcctcgggctgtgagcttaggtcagcacgaagctgctgcttgctcctgggtcggggccccgcgccgctgttgcctcctcagggaaccccagtcgccctcacccggggcgattccgcaccccaggggacttttggctgtagctggagacgactgtggttttcacaaattgtggggaggggaggctgctactgtcacctagagggtggaggccggggaagagggacgctgcttgctcttaaagatcctacgttgtacaggacagtcccccacaacaaagaattatcagtagtgccaggttgggaaaccctgctctagggccttaaaaaaaaaatctctgcagttctgaataaactacataaattgttaaaaattcagtttagtcacttaatagggcctctaagtgacaagatatttttaaagcctgtggagtcaccatagaatctctctccagcgtagtaagttgagcaagtcaaatgcacacagcgttaagctgctttctcccctcttacggagcagatggccagatgggaatcaggt

SEQ ID NO: 90749 - DNA, 1051 bp, Homo sapiens
taatgagtgagggggtttaacagagttgtacttggtggaaaatcacttaggaagagtaattctgaacccacttatagcagatcaggggctgtccccccaccacatcaccacattgctgagagagtttacctaagtaagataaaagtccaggatcaggcagatcttgctgctcaaaagaggaaatgccaaaaaacaaaactcagagttttctttggtgagcaggagagacagatagcctttcactactcccgatgttctttcatttgctacagatgccagcttggagagtcacgtgagagcaagagagtagctttctggttgtcctggtgccctgctcaggcaaactgactgccattctctgaggatggcagctctgtcccccacatttggtaagttcttgggtcagtgcgtgccctgagaaagtgagtgcaagtggcccctgccacttgatggggtgaaagatacgtacaccatagagggctgctgggagaggatgggcaagtggaaaaggggtgggaacagagccccagcagccaccccagtgactgtgtctgctgagggtcttggtgggtctgggagcaggccagtgtccttatcattcatgcatgaagagggtgcaggtaatgggtaaccctgagttatctcatttattattttgatcactttcagcaaggtcacaactctagctctcagaacttgcatttcttcactcctaggttggaactatgtcacttcttatgagtatgtagcccaccaccctctttatgtttttggtggaacagggctgctctgacttgttatgaaactgatgtgtgcaagagaggtggggggaggaagagagagagaggattgaggatgtgaacactcagaatcagtgtggagcagtttcctggtttacaagtgttgtattatgagacagggcaggctctgattctcatgaaccctgttttctcctccagccacgtccacccaggattccacctgtctccaggactcagaatttcctgtttcttcaaaagaccattcctgtccccagaatttggacctgttc

SEQ ID NO: 90750 - DNA, 1007 bp, Homo sapiens
cctcccagagtgctgggattacaggcgtgagccactgcaccaggcctgaattgacttaaatttctacccctggcattgccaaatatctcacatgaccagattttttaacaattgcttttgcaccacttttccttacatagccttaggatctgccaagaaatccacctgtcattgtcaccatcatcccaccattttccttttccaacaattaatacttttccaatttgtttcagattgggagactccatctaaaaccaagtggtcacttcttatggaagatatttttgggaaggaaacgcccagtggtgtgacgatggtaagatttccgtgggataattctggatcttccttccacgtctgaggagactggggcagcctaggttagaaaagcagttcaacaccagggcaagcagcttccctcagaggagactgtgtttcagagacactgggtattaccaagatggagacaaccctaaagctaacctcaagctactttacctagagtgtctctgagtgaagatttttatagctgtgtctcagatattgagtgttggggctcaatgcagtttttgttttattttatatttatgctgtacacttacttatcaatttagttttggtggtgtttattttttggggggcagacagtcttgctcttgttgcccagtgcagtgggcaacatcttggctcactgcaacctctgcctcccaggctcaagccatcctcccacctcagcctcctgagcagctgggactataggcgtgtgccaccacacttggctgatttttctattttttgcagagacaggatttcaccatgttgcccaggctggtcttgaactcctggagatccatcagcctcggtctcccaaagtgctgggattataggcttgagccaccatgcccagcctcaattcagtggtttttgtttgtttgtttttgttgttgtttttgttttttgtttttttttttgaggcacagtcttgctcttgtcacccaggctggagt

SEQ ID NO: 90751 - DNA, 1569 bp, Homo sapiens
tgatggagctcaaatggggcagggacagcacgtttgcacggcagatggttacagctctagtcatagtaatgtgcttctatctgttcatagcagtgtatgtggggatgacgcttagggttgcaatgaatatgagaattgcctttgtcagcacttacgtcttaaccaacaggaaagagccggtcttggagagaagtccactgaatacgctcacttgttcgaagtctttggcatggaccctcatctcactcagccaatgggaaggcacgctggcaagaggccctatcaccgccgcgactatggggtagcgttcaagggcaggccgcacctcactcagcacatgagcatgtacgacgggagaaaaatgcatgaatgtcatcagtgccaaaaagccttcaccacgagcgcgtccctcacacggcacaggagaatccacaccggggagaagccttacgagtgcagcgactgcgggaaagccttcaacgacccttcagcccttaggagccacgcaagaactcacctcaaagagaagccctttgactgcagtcagtgtggaaatgcattccggaccctctcggccctgaaaatccacatgcgagttcacactggcgagaggccttacaagtgtgatcagtgcgggaaggcttacggccggagctgccacctcatcgcacacaagagaacgcacaccggagagaggccctacgagtgtcacgactgtgggaaagctttccagcacccctcccacctcaaagagcacgtgaggaatcacacgggggagaagccctacgcgtgcacgcagtgcggcaaagccttccgctggaagtccaactttaatttgcacaagaagaaccacatggtggagaagacctacgaatgtaaagaatgcgggaaatcctttggcgatctcgtgtcccggaggaaacacatgaggattcacatcgtcaagaaacccgtggaatgtcggcagtgcgggaagaccttccgaaaccagtccatccttaagactcacatgaactctcacactggagagaaaccatacgggtgcgatctctgcgggaaagctttcagcgcgagttcaaacctcaccgcacacaggaagatacacacgcaagagagacgctacgaatgcgccgcctgcgggaaagtcttcggtgactatttatcccggcggaggcacatgagcgttcaccttgtaaagaaacgagttgagtgtaggcagtgtggcaaggccttcaggaaccagtcaacgctgaagacgcacatgcgaagccacacgggggagaaaccgtacgaatgcgatcactgtgggaaggccttcagcataggctccaacctgaatgtgcacaggcggatccacaccggggagaagccctacgaatgccttgtctgcgggaaagccttcagcgaccactcatccctcaggagccacgtgaaaactcaccggggagagaagctctttgtgtcatccgtgtggaaaaggctccagtgagcgcgcctgctttagagacacaggatgattcagaccggaaacagacctcgtgggtgtaagaggaagcctctgtgagctcg

SEQ ID NO: 90752 - DNA, 1138 bp, Homo sapiens
gcaggcagatcatgaggtcaggagttccagaccagcctgaacagtatggtggaaccctgtctctactaaaaatacaaaaattagctggctgtggtggcacacacctgtaatctcagctacttgagaggctgaggcaggagaaccgcttcaacctgggaggtagaggttgcagtgagccaagattgcaccactgcactctagcctgggcgacagagccagactctgtctcaaaaacaataacaataacaacaacaaacaacccaataacaacaaccaaaaatcccacatcaagcacattttttaaaagagaaaaagagccggatatttaaacccacaacatttgccttaggggtacgcagtgtgtcctcttagttctgaggccctgatttgtcatggacaagagtcggccctgctgaggagtctttccagggcccccttcacatccttgttcctcaggctgtagatgaaggggttcagcatgggggtgaccatggcgtacatcactgaggcggtggagctgctctgggaagaatgggtcacagcagaactcagatagaccccaagtcctgttccatagaacaaggagaccacacagaggtgagatccacaggtggaaaaggctttgtacttgcccttggtggaggacattcccattaaggaggagacaatctgagagtaggagaagaggatcccagctacaggaaacacacccagcagtgccgtggccacatacaagacaatgttattgaggagggtgttagagcaggccaccttgaggacctgagccggttcacagaagaaatgcggaatctcagtgcctgtggagaaggtcaacctcttcatcagtagaatatgaaccagggagaaccagaaaatgatgaaccaagatgccagaaccaggaggccacagaggcaggggttcatgatgaccgtgtagtgcagtgggtggcagatggccacaaaccggtcataggccatcacggccagtaggaaagtatccattccagcaaacatcattaaaaaatacacctgagtgaggcaccccatgtaggagatgtctttgctccgtgcctggatgctcactagcatcttggggactgtggtggagatgaaacagatgtcaacaaaggacaggttg

SEQ ID NO: 90753 - DNA, 1028 bp, Homo sapiens
atcgcttgaccccgagaggcggaggttgcagtgagccaagctcatgccactgcactctagcctgggatacagagtgaaacttgtcttaaaaaaaaaaagcccatgcgcgttcctcaggtcttgcaggcagcaggcgtgggtgaacgcttggcacttggtggagacagagaggccggcgggatatcagcagcgcagccggggtaccggaggtggtctcgggcgaggcgctccgggtctgaagggctccagccaaacggagctcgcagccaaacagtgctggtggctcctgagctgagtgaggcctaggcttggaggctgtgctcggagtaacgcaaaagagaatgaaagacgtagataatctcgaaagtataaaagactgggtttgtgaaacaggacctgacaatcaaggtcttggtgataatcaataaacaaattgtgaatagtttgttgatagcctttttgaggaagctcagaaggttggttccaaatgcttgtctcccacttaacaaaagaaacaggtagacgtaaacataaaattatggaaaaatggattcaccgtcaacaattatttcagaagttattcaaatggtgcaagtcagcagtttctgaactccatcaaaaagggggaattaccttcagaattacagggaatttttgataaagaggtgggtgttaaagttgaagacaagaaaaatgaaacatatatgtctacgaagcctgtcttccagctcttttcaggacagggtcaccaagtaggaagggtaagccatatcaaagacttcattgaaaactaccaaggatctcaaaagaagtcctcccctgtccctggcaacagtttgtcctatcctcagattgttagatgagacactcacactggaagaagcagatttacagagttttgttgtcagagactccaaaaaactgctgcaccattgatttttgatagactaagtggaaaatctgcagagaaatgatggttgtaagcagacatgcaaaccaaattggggactgggtaagtcagattcact

SEQ ID NO: 90754 - DNA, 1080 bp, Homo sapiens
atctacttggtgattctcaaaatgtggtgtcagatgaagagcatcaccagcactgttggagatgtatgttctcagtctccacctttgacatactcagtgagaaactgcaacagggcccctgtcatctgtgttttaacaagctctcatgaatctgatgtgctataatgttgaagaatgagatgtatagttgtttcccatgagaatgaagatctctttgtttcacttaacttcctatttggataaaagtcttagtgctttgtaagtgtgtacatcagcctggatttgggcttcagggatcagagatcaccaatcttttgggggcacagacagacgatatttgcatttttagcccttttaaaataatttcactgcttccattggaactatatctcctgagttgtggaaagatttatcatctcttgcatgagcctcttctggtaatgtatctttctttgtgcacaggatatcagctcttcaaacccagtctgatctcttggctggaacaagaagagtctaggacagtgcagagaggtgatttccaaggtgagtgttcacaaaggaccgccctggtcaataagttcagtatgtttataagtataatgaggaaacttttttttttttttgagatggagtctcactctgtcacccaggctggagtgccgtggcacagtctcagctcactgcaacctccgcctcgcaggtgcaagcgattctcctgcctcagccttctgatctcctgcctcagccccctgagtagctgggattacaggctcacgccaccatgcctggctaatttttgtatttttagtagaggcggggtttgaccgtgttggtcagtgtggtctcaaactcctgatctcatgatctgcccacctcggcctcccaaagtgctgggattacaggcgtgagccaccacgcttagccataatgaggaaactttttaagatgtgcttcatctcacagtgttgaggccattattttttttatttttatttttttctgagacacagtttcactgtcacccaggctgtagtgcagtggtgcgatctcggcttactgcaacttcagcctcccgggttc

SEQ ID NO: 90755 - DNA, 1798 bp, Homo sapiens
tcggctcactgcaacctccgcctcctgggttcaagcgattctcctgcctcagcctcccgagtagctgggattataggcacacaccactgcacctggctgattttttgtatttttagtagagacggggtttcaacattttggccaagctggtcttgaagtcctgacctcaggtaatctgcccgccttggcctcccaaagtggtagaattacaggtgtgagccatcgcgcctggccaagaaacccattttatgtaaggaatgaggaaaatccttttggaagtccatatgccttaatagtcacattgtaattcacactggtgagaaaacaatgtaagcactgtgtcaaagtgctcatttgtccctgttcacttcaaagataggaaagaacttacactctgatgatgctccataaagttaaaggcatgtgggagaaccgttggaatctgctgacaatacactgtgtaagagttcatcctgaagctgtacaatgttagaaacatagagagctggccaggcgcagtggctcatgcctataatctcagcactttggaaggctgaggcaggtggatcacgaggtcaagagatcgagactatccaggccatccaggccaacatggtgaaaccctgtctctactaaaaatacaaaaattagctgggcatggtggtacacccctgtaatcccagctactcaagagcctgaggcaggagagtcgcttcaaccagggaggcagaggttacagttagccaagatcatgccactgcactccagcctggcgactgagcgagactccatctcaaaaaaaaaaaaaaaaaaaatcaatagctttcactgtttccttgggttcttggaatggagataaaccctttttatgtaagatgtttgatgtaagatatgttcagaagttttattcttgccaaatactttggtgtttacctgtaattttatagtggagaaaaacttcatgaaggtaataaatgttggaaagtaattttttatattcttcgtcctttagtgaatatgaggggcattcacacttatgagaaactgggcatgtatggaatatcaggattgcttctctgaaacctgtcaaagcctggctttctgggtggttctatagaactattttggaagtttcttacaccccgctgctcattcctggcatggtatgtctttctcctatagcaacaccactctagttgctatacatcctctgggttacaactgacctaaagtgggccttcaggattcagacaatcctgttttaacagtgtagattctctttttggtttgtcatatttttagacatggtccacctgtagtggctcacactggccaaggtaaaagttataatacagctttaaaatgtaaaaatactcttgttcctcttttcaaacctgatcttttcagataaatggtcagggttgaagaagggtctgagtggagaaagggtgcactaacagatagtaacttaagataccgtgatttcatggccgtggagggacacccataacccttcacctggagaggtgggaactcttgtactatcaggcagtgcagagaggtggtgggaaccacgaatgttgtctttgatgccactgtttggcaaagcagtcatatatgcctgactcagttaactgctatgattggcagtatgacctatttctggggtttcattttgcccatgtgctatgaaaacagaaaaactcctgtgaacatggatgatcatgatattctgctgtgcttgacaccatcactagcacttcctgaacatggccctggaatacacacacacgcacaa

SEQ ID NO: 90756 - DNA, 1050 bp, Homo sapiens
acctcttctgcctgtcttcgtattcacatgcgaactcacacagaagagagactctatcaatgtaagaaatgtggtaaagctttcactaagtgctcatatcttaccaaacatttacgaacacacgctggagagaaaccctatgaatgtatgaaatgtgggaaagccttcactgagcgctcataccttactaaacatttacgaagacacagtggagagaagccatatgaatgtaagaaatgtggaaaagccttcacagaacgctcagatcttactaaacatttacgaagacacactggagataagccctatgaatataaggactgtgggaaagcctttgttgtctcctccagtctagttgatcatttaagaactcacactggatataaaccctataaatgtaatgcatgtgaaaaagcttacagtaggtcttgtgtactaactcaacacttaaaaactcatgcagcagagaagacctctgaatgtaacgcatgtggaaattcctttcgaaattccatgtgctttcatgatcgcttaaaaactctcaccaaaataaaaccctataaatgtaaggactgtgggaaagccttcacttgtcattcagatcttactaatcatgtgcgaattcacactggagagaagccctataaatgtaaggaatgtgggaaggccttccgtacatcctcaggacgtattcaacatttaagaactcatatgggagagaaaccctttgaatgtgaccagtgtgggaaagcctttgcttctttctcagctcgtattgcacatttgaaaacacactagagagaagccctgtggatgtgaagaatgtggaaaaacctttgctgtttcctcaagcctaactgaacatgtaaaaattcacaggagaaagtaacactatcaatgtaaggaatgtgagaaagcctgaacagttgaatctttctagatatgtacaaactcacactgtagagaaaccctgtaaatgtaagggatgtaggaaaacactagttcttctctctctctttttttttttttgatgagtctcactctgtcacc

SEQ ID NO: 90757 - DNA, 1043 bp, Homo sapiens
ttggctggaggaagaggaagagttgagcacactgccaagagttctccaaggtgagtgtttgtgaagaacaaccctggtccatgagaagttctcagtacgtttggaagcacaatgaagttttataagatgccctttgaatcagaaggctgtccactggacttggatgttttgggatatcttaacttttcatcctccattgctttgcatctatccagacttccctattacctaacaaatgaccttctttatgtttatggatttattgtatgcttttgttccaatttttccgacttttccttccctggtagtattgcttctgttaaccatcatgtttaattttcatagaataagttgttttaaaaattactaaaacttgaccccatatgattgccaaattttagacatatataaattgttcaaatctatctgctttttatttaacctaccatttcatgtgtaaactctcatgtatatttttctcttttatttcagaatggaaaatgtgcctgaaaaccaaagggccagccctttggcaagataatttttgtttaaaaacattaaatgggatacagttggtaagattaacaaaagaactttcttatttttcacattcagagaagactggtattgcattatagaaatcagcagaaatggccaggcacggtggctcatgcctctaatcccagcactttgggaggctgaggcaggcggatcatgaggtcaggagttcgagaccagcctggccaatatggtgaaaccccatctctactaaaaatacaaaaattagctgggcatagtggtgtgtacctgtagtcccagctacttgtgaggctgaggcagaagaattgtttgaacccaggaggtggaggttgcagtgagctgagatcgtgccactgcacactacagcctgggcaacagagcgtaaccccatctcaaaaaaaaaaaaaaaaaaaagaaatcagcagaaatgatagatatttgagagaagtggcattcacccaattcacccaaggggagaaatatctggagagagatcccatacc

SEQ ID NO: 90758 - DNA, 1034 bp, Homo sapiens
aggcatggtggtgcatggctgtagtcctagctactcaggaggctgaggcaggacgatcacttgagcccagtaagtcaaggctgcagtgagccatgatcacaccactgcagtccagcctacgtgacagagcaagaccctgcttcccaaaaaaaaaggctaatcattcatcgctgtttatcaagtatatgatgcagtgtactctgggatatcttttagtagagggaaataagttgagaaagcactcacagtctgcttgtgatgagaagttcatgattgagatgtgccattaaagccatacaactggaattgttaagtagtgaaagagcaaggatagagagaggaatacctgagatttacctgggattattaagctttgggtagataatgagagacctcacaactctttataggcattggggtctgttaactgattcttcagtgaacactggttaatctgttacttggctcaaatcaacatgtatgtgatggtttagtactccgtgacctttgaggatacagctgtggacttcacccaggaggagtggattttactggacccagttcagagaaacttatacagagatgtgatgctggagaattatgagaacgtggccaaagtaggtaagactgccatcattttatgcagcctcttagggaagagatatacattgtgtacttgctgtgttccagaattggtttgttcaacactgaattcaccagagacgttgtccctgccataataggtcttaattactgtggtcgttttcaaagtgtggtccagtttcgacagcatcactgttactcccttagaaatgtacagtcttagtctctgcctttgacctactgaatcagaaactctccacttggattgtcatctgtgtgttaactatccttccacatcaatttgatgcactataatattaagaatcactggtgtagttgtattctccaagtatacaagggtctctttgtttcactttttttcttttttttcttcattcaggagtttgacaacataccttatttctgtgact

SEQ ID NO: 90759 - DNA, 1310 bp, Homo sapiens
gaggcaggagaatggcatgaacctgggaggcacaggttgcagtgagccgagatcgcagccactgcattccagcctggacaacagagcgagactctgtctcaaaaacaaaactaaaaaaccctattttcacatacagtcacattgggatttggagcttcaacatatgaattttcagggttatcattcagtccaaagtacttaatatgattcttttccgtttccacatagacaatcacataatctgtaaataatgactcttacttttccactttagtcgttaggttatacctatatatatattttcttgctttactggactaatttcaacctccagcacaccaccaatgaatagcagtaataccagcataattgtctgcagttctgctgagatacgtgctctattttattggcttggctgtaggtttttattttattttttgaagaggctaatctcttacaggaaaggtttctttttatatccagtttttacatgatgaatgatttcccagtatttcataattcatgaggctgaattcctcttgaatttattaaatgcttcctgtgcatcctctgtgatgatcatgtttatttactgctagaactcaagtacctagaactgttcctggccaatgatggtatgtaataaatacttcaatgaaatgatgtggtgatgcatgtctatagttctagctacttgggaggatggcctgaacccaggggttctagaccagcttagacaacatagcaagaccacatctcaaaaaacaaaaaacaaaacgaatgaatgaatgcatggaaggactcatctctaaaataaatgtggtcaggttgggtgtggtggctcatgcctgtaataccagcactttgggaggcagggatgggcagatcacttgaggtcaggagttcgagaccagcctggccaacatggtgaagccccatctctactaaaaatacagaaattagctgggtgtggttgtgtgcacctggaattccagctacgcaggaggctgaagcaggagaatcgcttgaacctgggaggtggaggttgcattaagtgtagattgtgccactgcactccagccttggtgacagagtgagactccatcagaaataaaataaaataaatgtgtttttgtatttattacatttctagtgttacatcaaccttgcattcctggataagcccaactgagacataatggatcattttaaaagactatttgattacctttactaatatgttatggagctatgtttgaataactgcaatttttttttcttcttgtccctgaatgatttttttttttttt

SEQ ID NO: 90760 - DNA, 2907 bp, Homo sapiens
cagccaggagtttgaggttacagagagccatgatcacaccagtgcactatagtccaggcaatggagcaaaaccccaactctgaaaaaagtgaaacatactgggtgtggtgggtcatgcctgtaatatcaccactttgggaggccgaggcaggcagatcacctgagcttaggagtttgagaccagcctgggtaacttggcaaaaccttgtttctacaaaacagaaaaattagccaggtgcagtggtgcacacctgtattcctagctactcgggaggctgaggcaggagaatcagttgagcctgggaggtggaggttgccgttagctgagagtgtgccatgcactccagacagggagatagaacaagactttctctcaaaaagaaaaaaaaattaaatattaaaaagtaaaatcataattgtcatcaaaatgcttctgtgttcagatgggtgaaatctcttaatatgtctgaaaatgttttaaaacctttatctcgtcatcaacagacaagaggctacagtggatggaaactctgtgactgtaagaattgtggagaggtcttcagggaacagttttgccttaagacacacatgagagttcagaatggagggaatacttctgagggtaattgttatggaaaagacaccctcagtgtgcacaaggaagcctctactggacaggaactttccaaatttaatccatgtggaaaagtctttactctaactccaggtcttgctgtacatcttgaagttctcaatgcaagacaaccctacaaatgtaaggaatgtggaaaaggctttaagtattttgcaagccttgataatcatatgggaatccacactgatgagaaactctgtgaatttcaggaatatgggagagctgtcacagcttcttcacacctaaagcagtgtgtagcagttcatacaggaaagaaatccaaaaagactaagaaatgtgggaaatccttcactaatttttctcaactttatgcacctgtgaaaactcataaaggagagaagtcctttgaatgtaaagaatgtggaagatcctttagaaattcctcatgccttaatgatcacattcaaattcacactggaataaaaccacacaagtgtacttactgtgggaaagccttcactagatcaactcaacttactgaacatgtaagaactcacactggaataaaaccctatgaatgtaaggaatgtggccaagcctttgctcagtactcgggcctttctatacacatacgaagtcacagtggaaagaaaccctatcagtgtaaggaatgtgggaaagccttcactacatccacaagtcttattcagcatacaagaattcacacaggagagaagccttatgaatgtgttgaatgtgggaagaccttcattacttcttcccgtcgtagtaaacatttgaaaactcatagtggagaaaagccctttgtatgcaagatatgtgggaaagcatttctatattcctcacgccttaatgttcacctgcgaactcataccggagagaaacccttcgtatgtaaagaatgtgggaaagcatttgctgtttcctcacgcctaagtagacatgaaagaattcacactggggagaaaccctatgaatgcaaggatatgagtgttaccatttagcccatcggttgccatctttaattattggcaatgacaccaaagattatcagatttgtcctaaatgccttttggaggttgtaatgactcatggattggccttagataccatcctgagggtctgaaattaaacctacaggttctgaatacaacatcatggttgcctgagtctgggcatctgtgaagaagggtcatggatggtgaggtcagtactgcaggctgcctcaccttggtgattagattcctaagatcatagcattaacaagttgtgtatgagataaatcatgcagattgaccccagcccctgttggttagtggctgccagtgtggcacatttatgtcaaaatttaccagaagccaagatgatgtaggaccccaaaggtgggttgttaagagatgctcctccaagggtctcttctgatcccacggatcctgcagagcgtgtcaggaatgaaaccatccataactgccagtgccctttcacagctgattatttctgtgtccccttgtaaaatctaagaagtgtgacagccttgcctgttctgccttgtatgtctattttagatggcacaatgtaagtggcaatgtctcttctagtataatccagtctctcttctcacttctgtcaaggtggctgatatagtccatgaatcccactcatgatctctttatcagatgatcgttcagccacactttgaggattctcttcagtacaagttttctaatttttgcattatggataggctgagaattttccaaatctccaagttctggttcctttttccttaacaattttttctgcaattcaggtctccttttgcatttttgctgagaccagctgggtcatggagaccctgacccagcagctctagaggaattaagacaaagacacagaaatagagtgcagagtgggaatcggggctcacagccttcagagctgagagccttgaacagagtttgacccacatatttattgacagtaagcctgtgataaacattatttctatagattatagattagctaaaagtattccttacaagaaagaaagggacaggctctggcttgttatctgcaacaggaacatgtccttaaggcacaaatcactcatggtattgtttgtggtttaggaatgcctgagcagttttccagttttccaccgtgggtgggccaggtgttccttgccctcattcgggtaaaccagcaacctccagcatgggtgtcatagccatcacgagcatgtcacagtgccgcagagattttgtttatgg

SEQ ID NO: 90761 - DNA, 1027 bp, Homo sapiens
taataataataatgagtgatgatacgcacctatggtcccagctattcaggaggctgaagtgggaggatcacttgagcccgggaagtctaggctacagagagttgtgttagtgccattggatttcaacctgggcaacagagtgagaccctgtctcgatagatagatagatagatagataggatagatatagatagatagatatagatagatatatagatagatagatatagatagataaatatagatagatatagatagatagaggtaatgatagctactgggaaggatggctatgataattaactgagcatgtatatataaagctactagagctacttctgacatatcagtcctcagtaaatgtcagttactgttattaatacttttgttactgagtgacggtactgagtgggcaatttttggtggccttcacatctgtcacctgcagagacaaagctcaggcataatgtttgatgactgatgtttcatgcttgttgtttgatgattgatatgaacaggaccgcaaataaccctgtacaaagaggaatggagattgcctctatccacctagattcataagctggcctgaggtgatcttggcatcaaggaagggatgcacatcatcacaccatcagcttcagagaatggcagccatttatttgtcccgtggtaagtctttgttgatgctctttttcagagattctgctttaggtcaccctccacaacacaagcgtccagtgagctgagcctgagcaggcatgcagctggttcttttaggaggaattgaagtgaaccacagaacagaatgctgttttattatttatttatttatttatttatttttgagacagaatcttgttccgtcacccaggctggagtgcagtggtgcaatcttagctcactgcaaccttcacctcccaggttcaagtgattctcttgcctcagcctcccaagtatctgggaccacaagcacatactgccagacctggctaatttttgtttgtttgtttgtttttgtttttgagac

SEQ ID NO: 90762 - DNA, 1032 bp, Homo sapiens
ggtttcgcctttatggtggtggagtctgcccaggctgtggtgagttccacctccttggcggtcccggggatagcagggggcggcaaaggaatgattgcgcgctgtcgcctaggagcctctcagatccgcttcacttcactcgcttctccagggactatcagtcctccctgtgcgtccagttcggagaggctgcgcgctctctcggctcactgcaacctctgcaacctctgcctccagggtcaagcagttctcctgcctcagccttccgagtacctgggattacaggcaagtgccaccacgcccggctactttttctatctttagtagagatggttttgccatgttggccaggctggtcttgaactcctgaccttaggtgatctgtctgcctcggtcccccaaagtgctgggattataggtgtgagccactgcacccggccgacttttgaaaattttagattttgttcttaagtcatcttaggtacgtaatgaagttatcaataacacacgtggctggtgactactgaattgttctgtgcaggtctgcactgtcttctggtcatatggcgggggggtaacaccatatacaggagatcaggctctagggacaagtatcagaccgactactagggttgtttgagtgtaggtttttttcagtattaaatagaagtaatgggccaggcatcgtggcttatgcttattatcccagcactttgggaggccaagtcaggaggattgtttgagcccaggagtttgagactagcctaggcaatctggtgaaaacttgtctctactaaaactacaaaaaattagccggacccagtggtgtgcacctgtagtcccagctagttggggggctgaagtgggagaatcacttaaggccaggagttcaagaccagcctggccaatatggcgaaactgcgtctctactaaaaatgcaaaaattagccaggcatggtagtgcatacctgaaatcccagctactcgggaggctgaggcctgataatcgcttgcacctgggaggcagaggtt

SEQ ID NO: 90763 - DNA, 1358 bp, Homo sapiens
cgggcgcctgtaatcccagccgcttgggaggctgaggcaggagaattgcttgaatctgggaggcgaaggttgcagtgagttgagttcttgccactgcactccagcctgggtgacaagagcaaaactccatctcataaaaaaaaaaaaaaaaagacaactaaggcttgcataagtattttgagaatattcttctaggcatgtttttatttccaaatgtgtagcaaaaatttatactttttatatttttcatttttgctggttgtataacttcagtctccttttgcattctggaataacttattaattgtgcattctttccctttgcttgtgttaatcttggtagagagtacccaggtttatgaattctttcagatatttcgcttgaaaaatctacactatttcttgcatgttttctgttccactaattctgttagatatttatatagttacatcagcttgattttcctctacttcttagtctttctgtatgctttttaaaaaaatgtgtctttttatacatactttagctggagttttaaaaaatctgtataccgctgggcatagtggctgatgtctgtaatcacagcactttgggaggccaaggcaggtgatcacctgaggtcgggagttcgagaccagcctgaccaacactgagaaaccccatctctactaaaaatacaaaattagctgtgcctagtggtgcatgcctgtaatgccagctacttgggaggctgaggcaggagaatcatttgaacccgggaggcagaggttgcagtgagccgagatcacgccattgcactgcagcctgggcaacaagagtgaaactctgtcacaaaaaaaaaaaaaaaaagaaaaaatacttgaataataccaattaacaatccttttatgttgcacatttagtgcctgacatttaattagtaataatttggattaatttctagcatctaattttttttgtttgtttcattgtgttcccctctttgtactgatgtgtattgatcatacctttaatttattttattcttgatgtttgaaatttgtatgttacttttcgttgttaccataaataacaattttaaatataagtcttccttaataccttttctttctaactaagtgcactacactgtttgaataaagtgattcccatatacacttactacacttggagagagacccagaaggaagtgcattgtcacacaagctattagacagatctggtggcagaaagaataggctccttgacagaggcccagtgacaccctgtggtagattacagatgtcttgagattactctctgaaggtgcaatctctctcctttttatgtgagccagtccttgctttgaccagtagaa

SEQ ID NO: 90764 - DNA, 1019 bp, Homo sapiens
caaataaatgtttcattacaatttttttttttaaattgagacagagtctccctctgttgcccaggctggagtgcagttgtgccatctctgctcactgcaacctccgcctctcagattcaagcaagtctcatgtctcagcctcccaagtagctgagattacaggcatgcgccaccacgcctggctagagatgggggtttcatcctgttggcctggctggtcttgaactcctgacctcaggtgatccacctgcctcagcctcccaaagtgctgggattacaagggtgagccactgcgcttgacttattattacaaattgatgagagttttggaagtagaggacagtattgttttctatgtgtatatatgggaatagatgaatgtaagaaaagtgagttctatttaaggtgagaccaaaaagatggtgtctaaataagccatattgaaaggaaagggagtaggagttaaggaaagcatcatataaattggctgattacatatctacggagagaggtgagtacatcaagggtttttcttaggtttgatagaattttctttggggattaaaatgagggatgaatctaatctacaacattataactacagaaaaaatgatgtctaatcatcactttattctactcatgaaaaactaattttcttaagtaggaaattaattgaaagaatcagaatcagtggctggctgagcacttgaaaataagttctacatgaaaattcacttaattaccaatcttagcaaatatgtgttcatatatggaggggcaaggctctccgtggtattcagttcaactttgggttcttcctacccaaagtaggactccatttcccagaagaaatgtacagagttaccagtcccgtgtgagactcctatgtcaccgacacatctactcactccatgggtaaatgaaatcagaagactctcttgctgacatgggctgccagaaagctctgaaggaaacatgaggcttaaaaatacccacattgggccgggcacggtggctca

SEQ ID NO: 90765 - DNA, 1015 bp, Homo sapiens
tgccccaaagagtctatggactggtggatgtaactactccacctgcccttgggacccatcccagttttcatcattgagccccagaccctctgagcagcaccttgaagagggcagataatcagacttgaggaaactgaaagccccaggttgagagaacagaggcctagggacctccagaccattggaatcactgtttgccagctgtgtggccttggtcatatcatcagcctctgggaagcctagttcccacatctggaaataaggatgatcatagctacctcacggttacattgcaaagccttactctaaaagctcccagcctccagaggctctcaatgaagagtcaccttcatggtcgtcttcaggaacaggacggatgaagaaggggtggggttaagactcaggggcacctgagggtctgagcccccttatgagtacccaagaaggactgtctatgcatgcacacccacaagcctatacaccatttatatacctacacgcacgcaagagacgcggagagataggcgatgcagactcgcgattcaatgatcgatatgctcataaaagtgctcaattatattttctgtattttgtatgctgtattttccaagacgtatattattttactattaaagaaaaaaatcatttttttttcccgagaagtattcagtttattcattcaaccaatctttcttgagcttctgctattttgcaggcactgttctaggttctgggaaactgggccaccacagtgaacaaaactgacaagaccctgccctcgtagatctcatagaggagaagacaggacaacaaacaggtaagccagtccatgctttagtttttttgtgtggggacagagtctcactctgtcacccaggctggagtgcagtggtgcgatcttggctcactgcaacctccgtctcccgggttcaagtgattctcctgcctcagcctcccaagtagctgggattacaggcacccgccaccacgcccagctaatttttgtatctttagt

SEQ ID NO: 90766 - DNA, 1050 bp, Homo sapiens
tcaatcgcatgctccttgttctgcagcttggtgcggatggacatgataacttggccaatgtcaaccctggccacagtgccctggggctttccaaaggcacctcacatgcctgtttggagcctacattgtggtagtgcaaggttagaaacatgaacatccatcggaaaggcctgtctccaaggtcccttagagcaacccatacaaccaacaggctgcgtacactaccaaggaagctgctgtgtgcagccattgcacacacacatttttatagtttcttggtggacttgccaattcagaaaatatctgtagtatcaatgaaagtgaaaaattcaacaggtcctttggccacgatattccagtaatacaaatttatccttgtgcatagacatcaagaagcatcattaagtaaaaaaatagagttctctgactctctaccaagccattcgctcggggccagacccacaggcctcgccccgcctcaaccacgccttcatggcgtagtcttctccctgtctccgtcccccgctccccaccttccgagcgtctccatcgctccccagccacgcccttggcgcctggtcctgctgcagcctggtttccgtccagaccacgacctctcggctaggtcctcgtcgtcaaccccgcccccaaggtctcgccccgccccagccccgccttccagcggttgtccgagcctctacccgccctagccacgcctccaaggcgtggttctcgtctgcagccccacctaggcctcgccccgctccagccgcgccttccgggcttgatcctcgccccaccccagccacgccttctggacttggtcctcgtctctagccccgccccctagccgcgccccagccccgccttctggacttggttccgttctctggctccgcccctgagcctcgcccaactccagcgacgccttccgggcttgggcctcgcctctagccccgtccccgggtctcgcccctccccagccacgccttccggacttggtccccgtctctagccccgcctccgatcctcgccccaccccagccacgc

SEQ ID NO: 90767 - DNA, 1045 bp, Homo sapiens
ccccggggttcgcggccctgggacaggggacttggggcctgggagtattcgagtccggggggttgggggcagaacggaaggctcagtaacctggaattttagggcctgggactgggagacttgtaggctggggcttctgggcctgggagacgcctgaagctctgactttgctgcctcccacccaccccccgctttgtgtagctccagctaggatgatcgaggttgtttgcaacgaccgtctggggaagaaggtccgcgttaaatgcaagtatccactggcagccgagaggcagtggtacccgcaggggtgcttggcgtgaggcaggcaactcaatctgtgttgtcggatggttttagttaaacccgggagagggggcggatggggtcctggcagatggtattctgccctagaatgtcctcttcctcgttctaccgcttccatttgccttaactgctctgcgcccagcacggatgataccatcggggaccttaagaagctgattgcagcccaaactggtacccgttggaacaagattgtcctgaagaagtggtgagtgcagcggtagagccactgggtggactggactaggccggaaggttttggttgggggagcgctgcaggcagccctttgcttaggcttggctacctcatttggcctacagactgaagagcctccttagccttatctctgaaatgtctctttttcttaggtacacgatttttaaggaccacgtgtctctgggggactgtatcctttgtgtgactttttgaggaagcatctacatacccagcctcggttatctgttcaaaactaaagtctgcatgagcttatgcatattaagtgtttaacttaatacgtggcacatggtgagcacttagaaaatgggagctaggtaattatttggttggggaggagagtggttggtgaaatagtttgacttcaagttcaaaatatttattactgacctccacctgagtgctggacagtaggtcagggtggggtgagactcaggcatatctattgtgcaaaaggagcagaaactt

SEQ ID NO: 90768 - DNA, 1057 bp, Homo sapiens
cagacgatggcccctgtgcttaggcccgatttaagggttagccacaatgataatattgccagtaacagggcatgtttttctctgtgtcaagcgctttaagttctctctgaattgccgcaactctgggagccaggtagttattacttccaccttaccagcaaggaaactgaggtcagaaaactgaaggaactcgtccaagatcattcatttcaggggccgggggttggattaggacctaggcagtttgcctacaaatccccctccccgtgtcactgcaaactcctgaggagcaggcccagcatctgtgggcaggtcccgagtcactctgctgcctctagagcccatagcaatcgcatttgcaataataattctccttggttgagtgccaggttctggtgaactgtttggatacatggactctcctcattaaccccatgaggtttgatctccttattctctattccccatttttcagatgagaaaactgaggtgcagggagattagagcccattgccaaggttttagagtgagtcagtagctcagctgcatttgcacctggaacccgcgctctcgcccaccctgctctagccctggcctgtggctgggacctccagcataaaccggatgctctgcccagctctgggcccatttctgctgtttctgctcagttcaaccctgatggcttcctttatgggtgacactccatgtcacccaggcgaactgtcagcctttggagtggcacccagtagggtctttacttccagtttcttgttcacagtcttcactccttcatacccctcactccctgggtaacatcgggccaccagtaatgctggttcctagctctgcaacaccatgcacggtgtagtagctaagagcagagctttcgggtgtgaagtacctgagtacagttcctgccttcccctgtgtgtgcctggaacagagtaaacactcaggaagcgttacccactgctgccattcccagagatgcaaaaggtgaggtctccgttttgccatctatacaatagagataataaaggctatcccactcttaatg

SEQ ID NO: 90769 - DNA, 1563 bp, Homo sapiens
cccaggtgctggaggcagactcgagggccgaattgtttctagttaggccacgctcctctgttcagtcgcaaaggtgaacactcatgcggcccagccatgggccctctgagcaactgtgcagcaccctttcacccccaattaaacccagaaccactgctctgctctcctgtgtctcatttctcctcagggaagcatagtggggaagatgtcgtggggaggggatcatagcccccccatcctaagggtcccagctgcaagttctcccccgaggcttccccttgccctgggccagggggagtcacagcagctggctcttggggacatgggcactgtccagctgcccagcaccctgagatctgcttccctgccatctcaggggcttccagaaggttcgtgggtccaacccggcacctggcccagcacccattgcagctgcagttaccatgacaacagggccctcccggactggagggggctcctgcagggagggggatgggagcagacatggcttttagtgcctgaaggtggagcagagggaatcctggggtgggtggcggggagatggggtcccccgccagtgtgggggctgtggatgtggcatgcctgacccccatcccctgttcagtcggggggctgtgggtctgatggagaagtggttattcctgcatgccctgttccccctccacttgatggggaccagcccagattgcgggggtgcctggctggcagagcttagggacctgagcaactaaagcccggccccaggggacctcccctcccccaagcgctgagtttctaataaaggccaagcctcataaacaatcacctgtgcccgctcccatctggctggcttcgggagcaatcgctcattcgcctgctgcctgcctgccggagcatttgtcattaggaaggtttaatgggtttcctctcagctccagagggctggggagagccggctgcatggatacaccgccaggcagaatgttctcccatcgcctggtggaggggggttgggagtgaggcagccatgccaccattcacaccaacagttggatgtggggttggggaagtgactgcacccctcctggaacagtagaggccctgggtctggaaggatcggaaattagtggctggggcccagagggtttgctgagttccactccagggtgaagaatgggctttgtgtcctgaccatcagcagcagggcccagggaaggctgtgcatcgttctgtgtgggagccgctgcccccacccgtgtgtatgtgtgtctgcgtttgcccaagaatgtgtggggccatgtgactggtcgtctctctgtcctgtgcattttgggagtcctccggttctgagagtcctccggttctgagtgtgaccacctgcccctccaggtacccccttcccttgtctgtctgtgcagtggccaaaacccaaatgagaatgtcgctgttaggtaaacatgcctccagagcccacttcggggccggtgattcattattaagcagctgcgcattccctcacctcccacccaccccctcaccccctcctgtctagaaccagggcat

SEQ ID NO: 90770 - DNA, 1039 bp, Homo sapiens
ggccatcacccgttgctgcaggtcctcatacccgtaggcacccatctcctcctgaatggccgccagactgccggagagattcctcacctcctcccgcaagcgtacaatggtccgcgtgtctgccttgtactgctccaggaccgagctcaggggcaacagttccgtcatcctgtccttcagctcctgtgcatcaagatggaaccatggccaagcctgacccctggcctttgacccagacatgactccaacctctgactcataacttcaccctttgtctttgatgcacacctggcccttgacatgtggctcatattggaccctagattcttcccagacatgactccattgtaggaactaatggataccaaatcccagtcatttgtttgacctctggtctggacacaggaggacccacctggaagctcttggccgagagggacccatcagctgcccggagccgcgcatccaggctccgcatgagggtctccatgccgcgtacatactggaggtcgcgatacgtccgcaactcaaggacctccatggactgggagacgttctggacctaggaatggggacaactgaagggaccagacctccttccccaaatcccaacccagagatgccacagacaagagctggcaggaacagaggctgtacaaacaccacaccgacgaggccaccttctcctcccctgagcttaccagcagcctcccaattgcgtgcccaatccatccatccatcgctccctccctactacccactggctcccatctggtccacctaccaccacctctcacctcctccctagtctcccagttccaccttcatcccctgtagtcaattctctacacagcagacagaaggaactttcaaaacagagattagatcaccttcctcctccacagatcctgtgctggctggtcctgcccaccccccccgcccaacccacttcctctctctttgttctcacagactctaagctccttccttctgcagggtctttgcacttgctggtctctctacctggagtgctgttccc

SEQ ID NO: 90771 - DNA, 1021 bp, Homo sapiens
cttccaggcaaaaccccagttctcaggctgagggaggccccaggcggttcccaggcttccagcatggcgcgggtgaactaatatttttttttttttcttttgagacagggtctcgctctgtcacccaggttggagtgcagtggcgtgatctcggctcactgcaacctctgcctcccaggctcaggcgatcctcccacctcagccttctgagtagctgggaccacaggctcgtgccaccatgcctggctaaattattttgtatttttggtagagacagggtcttaccatattgcccaggctggtcccgaactcctaagctcaagccatctgcctgccttggcctcccgaagtgctgggaatgcaagcatgagccacagcgcctggctgatatcttctttaaggcctgtcaagcttatcactcaggggatatttgcccaatacctcaaggtttgacaagagcaggctgctattatctcaagctttccaaagggacgtggccccctgtcacggctcagacatagcagacaggcacattctccatcattcatcacggccctcctgccattctcgcagtcagagagaagccacagcctctgcctagcctactgggcacctgtctgcagcctaatctcaggtgatccttccctaggacgaacaacagaagcaagctccgtggcagaaaggagaaattcacggtagacctgtgaaggtgtttgctctctgtcccactggttcatcagcatcctcattcaacaaacataccttgtgccaggttctgaggatcacggatgaattgtttgcacagcaaacaaaactccccgctcccctgtggtttcctttcccagggtagaggcaggcctggagccagcattcccacccgtgaggccctcctaatggcgactgtgatcagggcttggaggaggacaggagaggtgccgcaagccagtgtagactgtgtaaccagatggcctgtgttcgaattccagctacatcacttacaggcagtgatgctttggcaaag

SEQ ID NO: 90772 - DNA, 1003 bp, Homo sapiens
cagggtttcacaatattgttcaggctggtctcgaactcctgacctcaagtgatccgcctcagcctcccaaggtgctgggattacaggcatgagtcactgcacccggcccacattgtttctgttcctaatttctctagtaatttctatgagaaagacactgatagaggcactcactcactcaggagggacgtgacacagtccgctctgaatggctgtcagttgccaaatttgggagacagatgcagccgacacatggtacaaagtgccagatgtcaagagtcaagtgggcttcctgggggaggtggcatttgagatgggccttgaaggatgagcgagtgaagactggagggtggacacagaagaaagtcattggtcatgctgacaagacctggtgggtttacccttattttacatgattctaaccatgtttaaaagaggggaagtttctggaaatgggaactagggtaagtgtgtggttgatgcctatggtgggtgcagataggagaagggaagtgagcttgaaaaggttgtgatctgactgtaaaggcttcgaaagctgggttaaggattttagaatttatttattcatttatttatttatatttttttcgagacagagcctcgctctgtcgcccaggctggagtgcagtggtgcgatctcagctcactgcaaccctcccctcccaggttcaagcaattctcctacctcagcctcccaaggaactgggttaacaggcgcgtgctaccacgcctggctaatttttgtatttttagtagagacaggatttcaccatgttggccaggctggtctcaaactcctgacctcgtgatctgcctgcctcggcctcctaaagtgctgggattacaggcgtcagccaccgtgctggaccttatttatttatttttagagatagagtcttgctctgttgcccaggctggagtgcagtgacgcgatcacagctcactgcagcctcaaactcctgtgctcaggcaatcctcccac

SEQ ID NO: 90773 - DNA, 1065 bp, Homo sapiens
tctcagaaaaaaaaaaaaaagaaagaaagaaagaagaaaaaataaaaagaaatcttctccaggactatcgcaggggttgaaatgagccccctgctgggcctggcttggggcagaccactctgccttagaacggctgtggttctgagccaagttccggccgcatggccttagatcagggccctgctccttcctgctttggtaaggctgggaagcgttcctgggtctccttgtcccgccagctcatgcctcaattcccaggcccctaataggaaccacatgcgctggatgcctgccctcctcccccttccctcctcctcccccagagaggcctcctgagtcatcctctccacctcactccctccttgcagcctcattcccacgctgccctggcctggcgtcctcgtgtcagagggctgtgtcgtgggtccccgcgggtctgtttgtgtgtgaactctgcctctactgtgcctttgtgggcgtgactccgtgtctgagttatggatcagacactgtgagcgtgctctgtacaaattccatgcttctgtttgcgtgtctgtgcaagagtgtgttggcatgtgaactgtctgcctgttttatgtgattgtattgtgagtgtttgagtaaacggatgtataaatatgtctatgctggagacctgtgtgtgagctgtgtgtctgaattgtgggttttgtggagttgtgtgtgtgtctattttctttctctctctctctttccttccttccttccttccttccttccctccctccctcccttccttccttccttctttccttcctcccttccttcctctttttctgctgctttctttccttccttccttccttcttgctttcttctttctttctttctttctttctttctttctttctttctttctttctttctttctctctctctctctctctctttctttctttccctctctctttctctctttcgtcttattctgtcacccaggctggagtgcagtgatctcagcttactgcaacctccatctctcggtttcaagcaattctcctgcctcagcctcccgagtagctggga

SEQ ID NO: 90774 - DNA, 1052 bp, Homo sapiens
gttctcctacgtggacgccgacgggtccccagtgaatgtcgtgcagctgaacttcctgaaactgctgagtgccacagctcgccagaacttcacctactcctgccagaatgcagctgcctggctggacgaagccacgggtgactacagccactccgcccgcttccttggcaccaatggagaggagctgtctttcaaccagacgacagcagccactgtcagcgtcccccaggatggctgccgggtaagagggtggggcagtggccagctagagaggggaggcaagatgtcggccaccttcccggtaactcaccgtctctgtcttctctggggacagctccggaaaggacagacgaagacccttttcgaattcagctcttctcgagcgggatttctgcccctgtgggatgtggcggccactgactttggccagacgaaccaaaagtttgggtttgaactgggccccgtctgcttcagcagctgagagtgtccggggtgggagggaccatgagggagccccagaatggggtgcatttggtgctgaggctttgaagccaccgtatttttcgttacctgtgactatggagccaatgggatgtgacttcgctcatcacggacagtcattccttctcctttccagggtgctgggggctggggttccctggcccaagggtccagcctcctctcaccccattccaggtggcatactgcagtctggctctttctcccctccctccccacccaagcctcacctccccaccccttgaacccccatgcaatgagcttctaactcagagctgatgaacaaaagcccccccacccccaatgcctgcctcctcactcctccgtcgctgcccttcacaccttttggtgctacccctccccagagttaagcactggatgtctcctgatcccaggctgggacccctacccccaccccctttgatcctttctacttccacggtgaaaggactgaggtcggactacagagggaagagggacttcccttgactgggttgtgtttcttttcctgcctcagcccagctctgcaaatc

SEQ ID NO: 90775 - DNA, 1687 bp, Homo sapiens
gggttcattctccaagtgacttctccctacaggggtccatgggcccccgtggagacactggacctgcaggcccaccaggccccccggtgagttccccggggggcgggggaatggacaccaaaacctggggggagagcaaggactatgtctgggtgtccccagagggtccttccgtgcgcagcactgggccaggcacacactaggtgttcagaggatgtaggtgaagagggtagttccctgtaaaaccccaaggaaggtctggcctgggaggggggacttggggggacacccatgggggctctgacctgggtcttgtctcttggaccccatctctccctccctgtctctgtccatctcccttatctgtctctgtctatactggcgccactatttcatcttctgtctctctccctgctctctctccctgtctctgctattcttgcgctttctcttttgtcctcttacaacttggcttctccccatctctgaatctgtctctctctttcctgtgtgtctctccctgtctgcttatctctcctttctctatctctgccccttgtttatctctctccctcctctttctcatttgtgtctgtctgcctcttcatctctgcctgtctctctttctccctctctctccctcccccatctcccctctcttctccgtccccatcccctacgcccagggtgcccctgccgagctgcatgggctgcgcaggcgccggcgcttcgtcccagtcccgcttccagtcgtggagggcggcctggaggaggtgctggcctcgctcacatcgctgagcttggagctggagcagctgcggcgtcctcccggcactgcggagcgcccgggcctcgtgtgccacgagctgcaccgcaaccacccgcacctgcctgatggtgaggtccggtccccccgccacttggatgggcggagtgggggtgtggggggggttggggtccgtcgggtcccatccggactcacccaccctgcctggctctgcggcaggggaatactggattgaccccaaccagggctgcgcgcgggactcgttcagggttttttgcaacttcacggcgggaggagagacctgcctctatcccgacaagaagtttgagatcgtgagtaacccaaacctctcatcgcctcccccaggaagtgctgtcccctgctccccacacccacaaccaccttgtctgggacgttatccttccttcaaccggcatttattgagcacttactgtatgccaagtcctgcctcaagagctgggactacagcagaggatcaaaaagaaaaaaaatcaggccagcctggtggcacatgcctataatctcagcattttgggaggctgaggcgggaggatcgcttgaggtcaggagttcgagaccagcctgagcaacatagcaaaaccccatttctacaagaattaaaaaactggcgggcatggtggtgcgagcctgtagtcccagctactctggagactgaggcgggaggatcctttgagccctagaggcagaggttagtgtgagccgagattgtgccactgcactccagcctgggagacagagcaagtctccttctcagaaaaaagaaaggaaagaaaacaaactatctctgcttttatggaactcataccttccatgggaagacagacaaggaaaactccaaaagaaatcaataggctggat

SEQ ID NO: 90776 - DNA, 1046 bp, Homo sapiens
gggctctgatgaggaaattcggcagcgaccacacgggagtggggcgctccatcgtgtacggtgaggctgcaggggtcccgggcctggtgcggggaccgcgcgtgggagcgccgagggggcgtggtctagggagaggcgttgagatcacctcccccggaggtcccagccttggggaggctctgcgtcgcggctctgggtggcctggaactcccacagacccttcaagggcccttcccttatatgcactctcccccgcaggggtaaagcaaaaagatggccaagaactaagtaacgatctggatgcccaggtaacctatcccctcccctcgcaaaggaccgggtcacgggagggagagcaagaggggggacccgacccgttcatggtgactgacccccctctgaaacaggagggaccaggcattgtcggtccataactcatcacccaatctcactttttcacctctccatcatttgtccggccagggagcctgcaaacagtaggcgctcattatgtgctgattgtattcaatgggggagagagccatgaaactaagcaatgaaaggagccaggattattgccatcatagcgggggcgcagaggtcagagaaggcttactggaggaggaggtaccaagtcttaaaggatggggaggagtgagccctgggaggggaaagggaaagaaaggcaggggtcttggggtgggggagggaatggcataagcaaaggctgggaggtggggaagggttgttagtggcagtctctagaaaggctaggatgagcagaggattggggaggagagagaggcaggggaatggaacccttgtgttgaatgaatgaatgaatgaatgaatgaatgaatgaatgaatggctttgaagcacaggtgcatcatggctactttgcttctttgacagctttggtgatgggaacgctgtggatttagcctgcctgaaaggcttagtgtagggctgttaaagagtataataggccaggcgcggtggctcacgcctgcaatcccaacattttgggaggccgaggcgggcgga

SEQ ID NO: 90777 - DNA, 1010 bp, Homo sapiens
caggcatgagccactgtgcctggcaaaaaaaaatttttttaattagctgggagtggtggtgtgtgcctgtggtcccaactactcaggaggctgaggtgggaggatcgtttgagcctgggaggtcgaggctgcagtaagccatgatcacaacactgcattccagcctgggtgacagagcaagactctgtctctaaaaaaaaaaagaaagaaagaaaagaaaccaaatctgacctcaaaaacacagccccaaatctggcttctgaacctcctgactagtagttcacttctggtcaatgcttaactagttcttgcaaaagaggcaggaagccaagatgtgtagtgtttgccaatttctgtggtgtaaatattcccaccatggtcaatatcaggctacccacgtgaagtcactgattgagttgggttgctcaagctgaggccagccgctgcagcacactgctagccctgaccccaacctcagacacctctgacaatccttggtcccctctctgtaccttcctgcccaccaccaccaggtatcccggtgccggaaatgccggaagcgctacgagccagtgccagctgacaagatgtggggcctggctgagttccactgcccgaagtgtcggcacaacttccggtgagggcgctgacccccagctccccctcagccctgccctaccccagccctgcccctccctgccctggccccaccctggcccagcctcgccctcggaccctcacagccctgcccgcccccaggggctgggcacagatggggtccccgtccccctgctacgggtgcggcttccccgtgtatccaacacggatcctccccccgcgctgggaccgggacccggatcgccgcagcacccacactcactcctgctcagctgccgactgctacaaccggcgaggtgaggctcttctcccccaacagcctggacagtctttgtccccttctgtgcctttaagtccccaaatctccactcagtccactttgtctcccacag

SEQ ID NO: 90778 - DNA, 1278 bp, Homo sapiens
atggcctctgcccccatggtctctgggtttggggcccctgttttgtcccctgtaatctcaggtgacccccatgtccccaggtctcctgtatcttcaacacccctgaatgtccagttgtgctggtccccgtatctggtggtctcagctcctccctagagccccgcgtggcctaagtcccctcctccccagactctcatgggacctccagccccatgtctgcagcacctctccctccctagagccccacgtgcctgggacatcctgtgctcaccccaagagccggaagcagaaccacctgcccaaagtgctccaccccagcaaccctcacattagcagtggctccactgtggccacctgcttgagccagggtggcctcctggaagacctggacaacctcatcctggaggacctgaaggaggaggaggaggaagaggaggaggtggaggacgaggagggcgggcccagggagtgacccctgccaggtgcagatacaaaccagacacggtctgtggctactttgtgttattataagatatgagctcaaaccgagatatgaatgaccttggggagccatctgaggccaagatattgacgggggggattcctgggtcccattttcagcgcccagggtcacagatccacagtgggaagttctgtgggacacattggcactgagccacaaagaaggtgtggccagaacaacttgggctcctgctgaccaatgtcctctagggcctaggggacagaggaacacagagtcacagcttcaggggccgaatgagcatggcggccttcctgagagaatatgccccaccacgaaactcagcccagtagacaccatcctggtagcggcttcggtagtggccgccgtggtgccacacaccgttgaggttggagtgggcacaggcatggtaccaccagcctccccgctggtacagggcacagttacctgaggggagagagagagtccatgtcctctcaccagaataaaagcctctacctgcacctcacagtgcaaggcttttgccaggcatcccctggcccctcccattcttattgaatacaagccctgatcttccatctcctcagcaaaaaaataggagccctggccccccaactttcttcagagtaatagccttaattccttccctatctccttaccaaagtacaagtcacatctttcccaccttttctgcaaactaggagtctaccgttcattcctttatcaaagaaaagtatctacttcctttctagaataagagtactagctctcaccct

SEQ ID NO: 90779 - DNA, 1473 bp, Homo sapiens
ctttacaaaaaatagaaaaattagtcggatatggtgttgcgtgcctgtagtcccggctactcgggaggctgaggtgggaggattccttgagcccaggaaattaaggctgtagtgaatcgggatcgtgccacttcactccagtctgggcgaccggaggagaccgtgttagaaaaaaaaagactagaatctggaggcagcaaagcagggttggaaactgacttctccccagtatctgatgcaagttacttaacctctctgggcctgagttcgctcatttgtcaatgggaagatgcgctgtgagcaagagacagagttagaactcaaatctgcgtccgactgactctaaaggctaagatccttttgctcctctgggcttgttgaaagggtcagatgcaagacagaccataacaggatctgcaccgtcagcttatagttgtcacaacaagggataagctatgttttctttttttctttttgtcatttccaggttcgtaagaagaactcgctgaaggactgcgtggcagtggctgggcccctcggggtcacacactttctgatcctgagcaaaacagagaccaatgtctactttgtgagtagacgccctcacccttcatctcccccagacccccccttcccctatctctcatgatgaacacatatgcctctgagctgctgtgatttctggcttcaaagtaaacgctctgaagaagagatggggcaaaggtgcctactccgggcacctctgctagacccctccagagtcactgatcttttcttctcctgcagaagctgatgcgcctcccaggaggccccaccttgaccttccaggtcaagaaggtgagaggggtggaggtggtacaaagccatgtggggtgggagctggacttggggttgtccgcagccatgtgtggttggtggtcaccccctcctctctcctgtcctacagtactcgctggtgcgtgatgtggtctcctcactgcgccggcaccgcatgcacgagcagcagtttgcccacccacccctcctggtactcaacagctttggcccccatggtatgcatgtgaagctcatggccaccatgttccagaacctgttcccctccatcaacgtgcacaaggtgggtctggcctggcgaggtggcaggtatgggggggtgcagcggatagaggtgccacaggccctcagatggattgctcactcctcccagcgctgagactgggagctcctgggtctgctgagtcctgaggtcaaatcccactcctgtgtctgatgatgctgggcaaaagtgtccagagattcccccagcggtccacaccccgtgagctgcaccttttccagccggtggaaagaaatactgatggagctctgtttcccacgtgtgttgagtgctgggctgagcaggatcgtagcatctcttcttagggccctgttttacagagggaagctgcgggcccagtgctatggcttcggcct

SEQ ID NO: 90780 - DNA, 2529 bp, Homo sapiens
ctaattttttgtatttttagtagagacaggatttcaccgtgttagccagggtggtcttgatctgacctcgtgagctgcccgcctcggcctcccaaagtgctgggattacaggcgtgagccaccgtgcccggccttctttactttttttttaagagacggggtctccgtacgttggtcttgaactcctgggcacaagcaatcctgcagcctccgcttcccgagtagctgagactacaggcgtgcaccaccacatccaactcatttttccatctactttttgtagacatggagactcgccgtgttgcccaggctggttttgaactcctgggctcaggcagtcccaccacttcagcctctggagtagctaaaactgcaggtgcgagctggaagcagcatttctagccagtgccacagtccacgaacagtgtgtgtatcccccaaagcccccacttccccaaactttgccatgagtctactggactatgctctcttcctccccttccaggtgaacctgaacaccatcaagcgctgcctcctcatcgactacaaccccgactcccaggagctggacttccgccactagtgagtgtcccagcaggatgggagacgagggggtgccgggtgggggcctccacatgcggctgatgacagcacttctgctgagacgctgtgattgctctgtccaaagtaaacgccctgacgcactgtgggaagggtgagatgggcaccgccagccccatcacgtgccccctgaccacccccttgccgtccactcatgttcctgcagtagcatcaaagttgttcctgtgggcgcgagtcgcgggatgaagaagctgctccaggagaagttccccaacatgagccgcctgcaggacatcagcgagctgctggccacgtgaggagggcatagggcgggaggccactgcggcccggggaccccagaacaggaccgggagcctgagctcccccactgagccctgttatgtcctacacacaggggcgcggggctgtcggagagcgaggcagagcctgacggcgaccacaacatcacagagctgcctcaggctgtcgctggccgtggcaacatgcgggcccagcagagtgcagtgcggctcaccgaggtgaggcccagggcagggggacccccgggctccaccagtcccaacggtgggctgacgcttcttcctcgtcccctcagatcggcccgcggatgacactgcagctcatcaaggtccaggagggcgtcggggagggcaaagtgatgttccacagttttggtgaggccggggccgccgggggtggggggtcatgggtgtggagctgcacccggatcttggtgacccgcgtctcttggctcagtgagcaagacggaggaggagctgcaggccatcctggaagccaaggagaagaagctgcggctgaaggcgcagaggcaggcccagcaggcccagaatgtgcagcgcaagcaggagcagcgggaggcccacaggtccaggcagagctgggaagggcagggccaagggggggtccctgggatgggcggctatgttgacccccacgccctcctccagaaagaagagcctggagggcatgaagaaggcacgggtcgggggtagtgatgaagaggcctctgggatcccttcaaggacggcgagcctggagttgggtgaggacgatgatgaacaggaagatgatgacatcgagtatttctgccaggcggtgggcgaggcgcccagtgagggtatggagtggggtctgcagcagggcacccagagcctgtccttgtctctgggggccctgacactgtctctccccacagacctgttccccgaggccaagcagaaacggcttgccaagtctccagggcggaagcggaagcggtgggaaatggatcgaggcaggggtcgcctttgtgaccagaagtttcccaagaccaaggacaagtcccagggagcccaggccaggcgggggcccagaggggcttcccgggatggtgggcgaggccggggccggggccgcccagggaagagagtggcctgagcccaagccgcaccggagcagcggctggattgaacgccccagattggggcccgagatgtggccctcggtttcctttcataaaggagttgtgtccccagcccttccactccagtaaagaactgaattggccaggggtccacgtcagcgtttgggatgggggattctggagccatacaaagcaacccagagagtcctgggccggccacacccgagagtccctcccacctggtttcttcctggaagctgggtctctcccctaccctgcacggggttggtttcattggtggcagcagcagccatgagtggcccctccccccagtcccaccaaagagccgtgcaagcagacaggtcacactttcagcagatgagcttgaacctcaggagggttgtggcacaatgaggaaggaaacgtgggtggaaaggcacgctggcctgctctgctggctgggccagtaactggggatggggctggggcagggcccactaagc

SEQ ID NO: 90781 - DNA, 1618 bp, Homo sapiens
tctactggcgagaaggagaagctgccgggaggtgtgggggtgggagggtcctgctgtcagtgcacgggttctgtccccactgctgccttcgtgctgtcatctcccgcacgacagtgcagcgggtttgatggtgccagactctcctcggggcgtctgtgccttcctaattggctgtacctcctatggttgggagacgggcgtctcccatatatgtgcgacttggcagctgtgactttgctggtggccctgtgactgtcctgatgagctgctgtctgtcggccccagggtgctgaccaccccacatcgtgtgtgcgcactgtgtgtatagtgtctccgttgcatgcctgtggctgtaccgtccgaattctttggtgggatttgctggtggcgagtgtgagagtgcagacgtgcacttgtcgcctgccacgcgagggggacctgggcgctgttcctgttgtgtgtcccatgtctgccgttgctgtgcatgtgaggctgctgcccctgttgtcctcccgccctctctggggtggggtcggggctcctcctcctcctcctccaccagtgtcgctggctgggagctcaaatggtgtcagcttctcaggtgtcaccttggtgtcctcgtggccaactggctgcctgtggtttggcacacagtgcctgcgctggctcaacactgaagcccgagcttcctggggcggctctgtccccacgcctgcgccacagtgaggttgaacttgactgtcttttggtccccagagctagagccggtgcaggccacgcagaacaagacagggaagtatgtgccgccgagcctgcgcgacggggccagccgccgcggggagtccatgcagcccaaccgcagaggtgaggggcaccccgacgccaggctggtgggtgggcacctcccggcacctcgtaattatccccgaagcgtgcacacgagggctgggcagcacacgagggctgggcagtgtcctccccctcacagccacctcccctctcccacacagccgacgacaacgccaccatccgtgtcaccaacttgtcagaggacacgcgtgagaccgacctgcaggagctcttccggcctttcggctccatctcccgcatctacctggctaaggacaagaccactggccaatccaaggtgggcaggcaggcaggcacggtggggctgtgtgagggtcacttgtcctagggtcgcctgtcctagctcgtgcccgaccccatcccgcccctccacagggctttgccttcatcagcttccaccgccgcgaggatgctgcgcgtgccattgccggggtgtccggctttggctacgaccacctcatcctcaacgtcgagtgggccaagtaagactccatccctgccccagcccctgctccctgccttgtcccagcaccttcacggagtgttgggccaaccaatagccctgagccaatttaacagtcccccggctggttttgaggggacagtcctttattgtttttttccaaaaccgggcagaggggtggcagctcttgtgcctggggtccctgccagtccgtggaccaggcctggagactggccatctggctccgtgcccgcttcgtcctcacattaccccgtcctctgccca

SEQ ID NO: 90782 - DNA, 1051 bp, Homo sapiens
tctcctgtttctctactggcgcctggttggcttcatggcctggcacccaccttcctacgagggatctcccatccttgccactccgagtccccacagggccatcccagtgcgttgcctggccagccctctgcccttggcctgcctttctccgcttttgctgtaggcgtcatcccaaaagcccttccatcgcagctggggagctcctgcccctggagctgactcctccttcctacgctgccttttgcagacaaatgtgtcaccagcgagctcctcaaggggatccctctggccacaggtgacaccagcccagagccagagctactgccgggaggtgagtgaggactgccgggaggtgagtgaggactgccactcggtgtccgggctgcctctccctccagccctgccgctcctgatccccatgacccagggctcagtctttctctgtttttccccttctgccagctccactgccgcctcccaaggaggtcatcaacggaaacataaagacagtgacagagtacaagatagatgaggatggcaagaagttcaaggtgagggtggggggtgcagggagtggggacccttgtgcttgggggcccatagaccggaatggggtggggtgtgttgaggaggttgataaaggagatcccttggtcccaggagcctgacccttctcccctcccatcctcagattgtccgcaccttcaggattgagacccggaaggcttcaaaggctgtcgcaaggaggaaggtgaggctcttcttccccagggctaacctagaggaattggaaaaccgtgctcccggactttgtgtttagagatggggcttaactcttttttttttttttttttgagacagagtgttgctctgtcccccaggctgaagtgcagtggcacgatctcgactcactgcaacctccgcctcctgggttcaagtgattctcctgcctcagcctcccgagtagctggggttacaggcatgtgccaccacgccagctaatttttgtacttttagtagagacggggttttgccatgttggccaggctgg

SEQ ID NO: 90783 - DNA, 1250 bp, Homo sapiens
ctgcacacagcaggcctttggtcaggttggctgctgggctggccctggggccgtttccctcactcctgctcggtgaatttggctcagcaggcacctgcctcagctgctcacttgagcctctgggtctagaaccctctggggaccgtttgaggagtgttcagtctccgtgaacgttcccttagcactctgccacttattgggtcagctgttaacatcagtacgttaatgtttcctgatggtccatgtctgttactcgcctgtcaagtggcgtgacaccgggcgtgttccccagagtgacttttccttttatttcccttcagctaaaataaaggaggaggaagctgctaaggactagttctgccctcccgtcacccctgtttctggcaccaggaatccccaacatgcactgatgttgtgtttttaacatgtcaatctgtccgttcacatgtgtggtacatggtgtttgtggccttggctgacatgaagctgttgtgtgaggttcgcttatcaactaatgatttagtgatcaaattgtgcagtactttgtgcattctggattttaaaagttttttattatgcattatatcaaatctaccactgtatgagtggaaattaagactttatgtagtttttatatgttgtaatatttcttcaaataaatctctcctataaaccaccctgggtgggtattcgtgatttgcacgggacttctggctgaggtcagacaggaacaagctcttccatgctgaaggcgacccacgtggagtttgaagctagcacgtttgaagctagacactccgtgtgtctgtctgtgtttgttcagaactgagtcacgtgagttgatccccatgacatgcaaatggaacttgctagtgtagcttccaggaaagccttttaaaggaagtcttggctggccttccccgtggctggtaggccttctttggtctgaagtgggttgtgatgcctggcagtggagcagccatcctgtgaccatgaggcagagctctgtgctgcaactggtggaataaggagagagaagtcaccactgagctgcccttggagccccggccaccccatccccaagcaaaacctctttagttgggttttttttctttccaaagaatttttttttttttttgagacagtcttgctctgttgctcaggctgtagtgcagtggggcagtctccgttcaatgcagcctctgcctcctgggttcaagaaattctgcctcagcctcccgagtagctgg

SEQ ID NO: 90784 - DNA, 1021 bp, Homo sapiens
agcactttgggaggccaaggcaggcagatcacttgagatcaggagctcgagatcagcctgcccaacatggtgaaaccccatctctattaaaactacaaaaattagccgggcgtggtgtcgcacgcctataatcccagctatttgggaggctgaggcaggagaatcgcttgaaccccataggcagaggttgcagtgagccaagatcatgccattgcactccagcctgggcaacagagcgagacatataatactaataataaaaacagtgcccagagaacgaggattgttggctgctccaccccagggggccccttgcacaggaggtgccatctctgcctcccaaagctctaagagccactgtcccaagcctataccccatcccacaactgcagcctcatcactgtcctgtcttccagccggcaaagcctgcgaccccgcagccaggcagttcaacaccctcatcccctggtgcctgccccacaccgggaaccggcacaaccactgggctggcctctatggaaggctcgagtgggacggcttcttcagcacaaccgtcaccaaccccgagcccatgggcaagcaggtaggtggggagggggcatccgagggcctgggtcaggccctgtacttggcggcctaactaggtggaagtgtgggtttagccaagtgggggacagcaccccaggaccccaggcacctggcctctgcctcctgcccctccacgtccacgggacaagctcataggccaaggccatggccgtatgctgtcacagtgccatttccctccctgtccccgacggtgacccggcctgggtgctactgccctcgcccaccgcgcctctttcccccagggccgcgtgctccacccagagcagcaccgtgtggtgagcgtgcgggagtgtgcccgctcccagggcttccctgacacctaccggctcttcggcaacatcctggacaagcaccggcaggtcagtggggcggcgcccgctgggtctggacaggaaggaggcttctgtgcctg

SEQ ID NO: 90785 - DNA, 1387 bp, Homo sapiens
gccagctgagcgtggtggtggatgacaagaagtttgtgagcaacataaccaggtaggtggcccccgtcgctcctccacacactgccgagcaggcctcagtagctcatggggcccgtgagtactccctggtgaggcttggggaggagaggatggtacagcatctgccctgccacacggtgctctgccacatggcactctgccacctgtggtctccagttctgaccctgcatcatctgcttccctagtagatagcatgtgcagagcggccagccgcatgcttggctgtggtcatccacaaagcccacgccatagccccatccccccttccagatggcatccaggcacactgccacccatgtgacctcgggcagtgctgtgatctcgggagaaggccatctgagcaggcagggggtggcacctgtgatgaggggacagctgctgcgtgcatctccagaggtgttgacctcctcctctgttgcaggttgagctcgggtcctttccggaccatcacggtgcgagacacgatgtccgacctgccggaggtgcggaatggagcctcggcactggagatctcctacaacggggagcctcagtcctggttccagaggcagctccggggcgcacagtaccagcccatcctcagggaccacatctgtaaggtaatggcaccctgacagagcggctcctcctcgaggcccagcccagcagcctcgtgggaacagtcagcctgcccaagactcaggggagacatggaatctgatcccaggctcctcctcccgagtcctcagcctttgtgtgacccctggtctctcttgcatggtcatgggaagtgtcagagctcccgcagtcctggacttggtctggaatggtgtcaagccactgcccacccaccactgccttcccccttgctgcctctccccgcatgttttcccaggatgccaagaccagccctttcaccatcccctggcaccactccccttcccccaccctaaaggctcagcttagattcccacgctctcctacacctgcgctgcctcaggtccctgccgtggcctcgagccaagtgcgatatccctgactgtctctttcccgatgggcgtgagccccagggggcttcctggtcaccatggtgttcccagctcccagcccaccatggatgctcggatgctgctcacatgaggtgacagctgggccccccacactctttcaggacatgagtgcattggtggctgcccgcatgcggcacatccccttggccccagggtcagactggcgcgatctgcccaacatcgaggtgcggctctcagacggcaccatggccaggaagctgcggtatacccaccatgacaggaagaacggccgcagcagctctggggccctccgtggg

SEQ ID NO: 90786 - DNA, 1050 bp, Homo sapiens
gccaggcacggtggcgcacgcctgtaatcccagcactttgggaggccgaggtgggtggatcatgaggtcaggagtttgagaccatcctggccaacatggtgaaaccccgtctctaataagaatacaaaaattagctgggcgtggtggtgtgtgcctgtagtcccagctactcaggaggctgaggtgggagaatcgcttgaacctgggaggcagagcttgcagtgagccaagatcacaccactgcactccagcctgggtgacagagcgagactccatctcaaaaaaaaaaaaaaatcttctggagagttgaaagcatggcttcgtgcttgatctgccaggcatctctgacacgctgtgggccatcgagatgtgggaccctgcggcccaggcgttccggctgaacaaccccggctccacagtgttcacagaggactgcaacatcctgctgaagctggtcatggctggggagaccaccaactcccgcggccagcggctgccccagaagggagacgtggagatgctgtgcggcgggccgccctgccagggcttcagcggcatgaaccgcttcaattcgcgcacctactccaagttcaaaaactctctggtggtttccttcctcaggtaaacgggtagaagccccccagtgttgccagacggcccggggctgtgccgcatgtcagcagtggtcattttcgccctgcactgaggcctctgccccccggaagctcacagctcagctctcaccagggagagactttgataacattcgtgaggggcttccggcacagtgggtcgtttcttccctctgtctgtggaggtgactcctgcagtctctcctgccccctacagctactgcgactactaccggccccggttcttcctcctggagaatgtcaggaactttgtctccttcaagcgctccatggtcctgaagctcaccctccgctgcctggtccgcatgggctatcagtgcaccttcggcgtgctgcaggtgggccctggggctggggcgggcagacagatgtggccagcacgtgacccggccagcag

SEQ ID NO: 90787 - DNA, 1136 bp, Homo sapiens
gtcttgctctgtcacacaggctggagtgcagtggcacaatctcagctcactgcaacctctgcctcctgggttcaagcaattctcctgcctcagcctcccaagtagctggaattataggcatgtaccaccacacccggctaatttttgtatttttagtagagacagggttttaccgtgttggccagggtggtctcgaacttctgaccttgtggtccacctgccttggtctcccaaagtgctgggattacaggcgtgagccacaatgcccagcctaaatcatttcttagggtacacacctaccttaattcatcaggtgcttgactttaaatggttattttcactggtcagtcatgcctgactgaccactgcaaggtggaaggttcattgatgtcaagtgggtgcttctctgcagcatcaagctgtccagtcccgtgaaacgcccacggaaggagcccgtggatgaggacctgtacccagagcactaccggaaatactccgactacatcaaaggcagcaacctggatgcccctgagccctaccgaattggccggatcaaagagatcttctgtcccaagaagagcaacggcaggcccaatgagactgacatcaaaatccgggtcaacaagttctacaggtcagcagaggcctctgttcttccacgaggccacagactcttctagaaggctctgcctgaaacaaggttgtggcatagcacccacagttgttctaagagttaggttgaagtagctgtttttccaagtgtttctgattatcggtgggcactgataatgactagaattctagttcccagccctcacttttaggtccttattttaatgttgcagagccctttttccaaaagaaatccttaagctggctgggcactgtagctcacgcctctaatcctagcactttgggaggctgaggcaggaagatcacttgagtctaggagttcaagaccagcttgaggaaacgtagtgagaccccggccctaccaaaaaaaaaaaaaaaaaaagactagctgggcgtggtggcacacgcctgtaatcccagctacttgggaggctgaggctgaagggatcactgaaacccaggaatttgaggctgtagtgagccatgatcccaccactgcactc

SEQ ID NO: 90788 - DNA, 1023 bp, Homo sapiens
ctgacgtgcgttctgttttgttttgatttgtatttttttttaatttggttttttttttgtttttttttttgttttgagactgagtttcgctcttgttgcccaggctggagtgcaatggcatgatctcagctcactgcaacctccacctcctgggttcaagtgattctcctgcctcagcctcccgagtagttgggattacaggcacccaccatcacgtccagctaattttttgtatttttagtagagacggggtttcaccatgttggccaggctggtctcgaactcctgaccttaggtgatccacccgcctcggcctcccatagtgctgggaatacaggcatgagccactgcgcctggcctgacacgcattcttatctcccaagggaggcatggatcccgagtccctgctggagggggacgacgggaagacctacttctaccagctgtggtatgatcaagactacgcgagattcgagtcccctccaaaaacccagccaacagaggacaacaagttcaagtgagcactggggctggactcggggtcagcaggcactttcagcccacatcactcccttttcccgtgtgcttccgtctggttggcttccgccaacggccccccagtttgtgtctcttgctcgtcaaaggccagcctgactatgaatgatgctcaagtgtgtagatggcctggagttgctttaagtgtgtggatgacctggcgttgtctttgtaagagggttccctacccaggaacagggttcgtcttgccatttcaagacttcccgtgtgttcttcagtgtgtgcccagctcttgcatgtttttggctgtttcttagatattttctcctgtaaatgagacctcttatttgattcttttctttcctttttttttttctttttttttttttgagacggagtctcgctctgttgcccaggctggagtgcagtggtgcgatcttggcttactgcaaactcagcttcctgggttcatgccattctcctgcctcagcctcctgagttgctggg

SEQ ID NO: 90789 - DNA, 1022 bp, Homo sapiens
ccttgcagaggtgacacctgggctgagatggagaaggtcaggtaggacctagccacacgacctgggggagagctgcactgaggtggcagtcagcttactttgttggagaaaaggaaggaggcccctgcagctggagtggcttgagccaggggatgatgggcaggacaggggtcagggttcaggctgtggccttacagaccatggtgaggtattgtgggctgtgctgttaaaatcaaatcctgggacccgagtggcagagcagaagtgggagggacatggatgcccttggccacagcatctggccaaggaaggtggatgttcttcttttttcttattattgaagcccttgtagaacaggatgttctctttagcagcaactcttcattgacttcttaatgaaatcgagtcatgtcttactttaagtaacagaggaccatgcaagtcaaggccagcaaagaccctcagaatgatcctccatgaacttatgctctcattttcagactgatgggaagaagagttactataagaaggtgtgcattgatgcggaaaccctggaagtgggggactgtgtctctgttattccagatgattcctcaaaaccgctgtatctagcaaggtttgcatctttctttttgcttgacttctgcatgcactttctcatcaagtaggagatgcctgttttgccaaaatagcaccagcagctttttgccctagatgaaaactgaaaaggacgagtgctcctgcatagacttggtcacatatctgctggccaagtcagaactttctccccatgcccgtcttctgattccagggtcacggcgctgtgggaggacagcagcaacgggcagatgtttcacgcccactggttctgcgctgggacagacacagtcctcggggccacgtcggaccctctggagctgttcttggtggatgaatgtgaggacatgcagctttcatatatccacagcaaagtgaaagtcatctacaaagccccctccgaaaactgggccatggaggtgagt

SEQ ID NO: 90790 - DNA, 1449 bp, Homo sapiens
ccagcctaaaagtcttaattcaccgtttgtttcattgttgctaagggctgtgtgactcactttttttttttttttttaattttttgagacctaaaagtcttaatgcatcatttgtctcattgttagtaagggctgtgtgatttgccctttttttttcctttttttttttttttttttttttttttttgagatggagttttactcttgtcgtccaggctggaatatggtggtgtgatcttggctaactgtaatctccacctcccaggttcaggcaattctcctgcctcagcctcccaagtagctgggattacaggcacaccctaccatgcctggctaatctttgtatttttagtagagatggggtttcaccacgttggccaggctggtctgcaattcctgaccttaagtgatctgcctgcctcggccttctgaaatactgggattacaggcatgaaccactgtgcccagccctgatttgcctttttaatgccattttttaggtgtgtcagcagcctgagtgtgggaaatgtaaagcctgcaaggacatggttaaatttggtggcagtggacggagcaagcaggcttgccaagagcggaggtaggtcaggccgagtcttcctcctgtggcagaggacttgccagctggtggcagatgcactgtggagaagggcctgcatgtgtgggacagcaccaggattccttcgttaggcattgtctcaggacctgtccctgttatgaagaaaacagccccggttggtcttacttagaaaaggggccttaggtataaccagtgacattgcaggtgtcccaatatggccatgaaggaggcagatgacgatgaggaagtcgatgataacatcccagagatgccgtcacccaaaaaaatgcaccaggggaagaagaagaaacagaacaagaatcgcatctcttgggtcggagaagccgtcaaggtaacccttggagccccttggtcagctcactgccatgttcccaataagcaggttgccctctagtatctcgccaacctgacctctcaggcagcctgagccccggcactaagaaacctgtctgtttgcccctgagaagagcgggactggccaagagaccatgttccatggctcagtaccagcaaggcatttttgtgtggccacaaggctcagttctcctaatgtcccaaaatgggcatttgacacagttctaggggcatcaggcaggtgagccctcatagcttgtttttctgttttgttttgtttaagatggaatcttgctctgtcacccaggctggagtgcagtggcacgatctcagctcgctgcaacctctgcctcccaggttcaagcgattctcctgccccaccctcctgaatagctgagattacaggcgtgcaccaccatgccaggctaactttttttgtatttttagtagagacggggtttcatcatgttgcccag

SEQ ID NO: 90791 - DNA, 3223 bp, Homo sapiens
acatacacttgatgcttaggtgggagaataaggtagaaactctgggtgatagaacgctgtcttaatccagtgttcccgcaaccaaaaaatgagtgtcggggccaggcatggtggttcagcctgtaatcccagcactttgggaggctgaggtgggtagatcactggagataaagagtttgagaccagcctgctacacatagtgaaaccccgtccctactaaaaatacaacaattagccgggcatggtggttcaggcctgtaatcccagctactcgggaggctgaggcaggagaattacttgaacccgggaggtggaggctgcagtgagccaagattatgccatcgcgctccagcctgagggatagagcaagactctgtctcaaaaacaaacaaaaaaagagtgtcagacttgtacattctctcattgcctcgtgcctgatctgaagtctgcacgaagacccgccttcacggcttagctggtaagcatgtgctttgtttcctgtctagtgtgtactgtaagcacggtcacctgtgtcccatcgacaccggcctcatcgagaagaatatcgaactcttcttttctggttcagcaaaaccaatctatgatgatgacccatctcttgaaggtaaggaatagtccgggattatgtttggggcacactttaaaaacagccaggcagggtggctcacatctgtaatcctagcactttgggggtctgaggccagaggatcacttgagcccgggagtttgagacgagcctggacaacatagcaagagcctgcctctattaaaaaaaaatatatagcatatatatatagtatacatatatacttatatatatgtataaataaaaaacatacttatgaagcaatagtcagctggagttgctgctgcctcttaaagttagggtgtgagactttgtgccaggagcagctgtaggccaagtcattgtgatgactgaggagcacccgacctggctgatgggatgtctgctgagtgggcgcttagagcgcctcctgggtttgggatgtgagtcagagcctttagtccatttcctttttctgctctaggtggtgttaatggcaaaaatcttggccccataaatgaatggtggatcactggctttgatggaggtgaaaaggccctcatcggcttcagcacctgtaagtgtgtggcccatcataggctggccggggtctgaaaggggccttcatgttctccttcctgggggctgacggggctctggtgggaattctcagcaggcttgcagaaggccatgtgactgggaaccttagcaggttcagttggggtagcctcttgtgttagttatgactggctctggaactgactctccagttgtaagagcaggtcttggccggatatggtggctcacacctgtaatcccagcactttgggaggccgagttggggggatcatttgaggccaggaattcgagaccagcctagcctggccaacatggtgaaaccccctctctaccaaaaatacaaaaattagccacgcatggtggtgcatacctgtaatcccagctacttgggaggctatggcaggagaatcacgtgaacccagcagacagaggttgcagtgagccgagatcacgccactgccctccagcctgggtgacggagcaagactctgtcctcccctgaaaaaaaaaaaagagcaggtcttattcttgcaacccaaacccagactgaattccaaacaccagagatgagctcaatgaaggcctactcagctagtcttcgctctctggctggctcagacaggcttcttcagaacaagccagctatgatgtgttgtgccctatgtttctgacatttgggtacgggatgacttttagactgttgggtgagtttggtagactcctccatgccctgtggccactgtaggcgccatcagattccagccccttttccacacctcctctgttcaccccagcatttgccgaatacattctgatggatcccagtcccgagtatgcgcccatatttgggctgatgcaggagaagatctacatcagcaagattgtggtggagttcctgcagagcaattccgactcgacctatgaggacctgatcaacaagatcgaggtaagagatcgagggtcctcagcatccgggattcccactggaaacttgccttcagaaccagcagacactgttcttcagttggatttaggccagtttggcttaagcatgagagaaacctgttctctttcaagaccacggttcctccttctggcctcaacttgaaccgcttcacagaggactccctcctgcgacacgcgcagtttgtggtggagcaggtggagagttatgacgaggccggggacagtgatgagcagcccatcttcctgacaccctgcatgcgggacctgatcaagctggctggggtcacgctgggacagaggtaaggatgcggcagggaccagagtgaagactggagaccggggagggtagagcatggcccacatcctctgtcccagtcctctgagatgctggaacctctcccgtaggcgagcccaggcgaggcggcagaccatcaggcattctaccagggagaaggacaggggacccacgaaagccaccaccaccaagctggtctaccagatcttcgatactttcttcgcagagcaaattgaaaaggatgacagagaagacaaggagaacgcctttaagcgccggcgatgtggcgtctgtgaggtaacctcacctgtgggtgctcccgctcccctaaggtggcccagcctctggcctgatctgaggactgctccatctttctctctgtggcttgagactctggctgctcaaatgtgacccctgagacagaaattagttagtggtctgggaggaccctgcatacttcattgaacgtcaataggacagatgtccacagaggcatgcttgggtgctttgctgataatgccactgtccttaattgaagagcctggcttctgggtggctctgctgtgcctgcatctcacagtctgaaggcccctgttggactgctaaaggggtattcacatctaagtgggcactttgtccagcttagatttgaggccctcaggaggcgtccctttctgtgagtttttaaaatatatgtttacttcactcaggaggaactaacttcctagtcctatgacccaaagaccaggactattttgatacctattacctgactttcttttggataaagactggct

SEQ ID NO: 90792 - DNA, 1019 bp, Homo sapiens
cgtaagaatttattcttgacattatcgaaagcagatggtaatgttaaaatgatggttctagaacaaaagggaaggggtttcagtaattgccagagcaaccttaggctcattttggatcgggttggtgaacataggaccaaggtgcgtcaggcaggatgcccctgcggtgaagagccactgtgaccacgcgcctgggcctcactgccacagccggtgcctccctgtgccacaggcacctcaggcagaaacctcacaggggcgattttgatattttctgaaacaattaaacaaacgatcttgtgatttttttttttcccccagaacggagaaaaaaatggctcgcgccaaaacagtcatgaactccaaggtaaacatctgccgggaataaagccggtggcggcgctcacgaggcggctgggagctgctctctgagtgccatcatctgtgttcctgctcccacagacccaccctcccaagtgcattcagtgcgggcagtacctggacgaccctgacctcaaatatgggcagcacccaccagacgcggtacgtacagctctcttcccagccttcctctgcctgtcccttgtcccactgctcaccagccccgtgtccttcaggtggatgagccacagatgctgacaaatgagaagctgtccatctttgatgccaacgagtctggctttgagagttatgaggcgcttccccagcacaaactgacctgcttcaggtaagtgcactttcgtgtgcatgtttgcttcgtggaaggaggcacatccccagaggtgcctgcgggctcacgattctggtgatgttttttagtgcctgacctgcaacatgtcttaagctaacacttcgtggataagagccaccgtggagggctgggcgcggtggctcatgcctgtaatcctagcactttgggaggccgaggtgagcagatcacttcaggtcaggagttcgagaccagcctggccaacatggcgaaacctaccgaaaatacaaaaagtagccaggtgtggtgg

SEQ ID NO: 90793 - DNA, 1077 bp, Homo sapiens
agatggggtattgatggtgttcctgaagaccttgagtcctggagtagtaaatgccctctgggcttcctgcagtgaagacaggagaggcagcctgtcctctgaacctggggaggagcttgtgtcagcccttaggagctgttggccccggtgcagggccccccgagctgaccagcctgtgtcatatatatatatagtatattttgcagagatggggtctcagcatgttgcccaggctggcctcgaactcctggcatcaagcaatcctcctgccttagcttcccaaagtgctgggtttacaggcacatgccactgcacacagcctgtaaataaagttttattggaacagagccacactttctcatttacattttgcctgtgggtgcttttgtgctaccatagcagagatgatcatcctgacacagaccacgtggtcagcaaagctgaaaatactgatcctctggctcttacaaaaacagtttgccaagccctggtctaggaggttctttagtgccctcttgttagtttcaggtggggaattaagtgagggaaagtgaagcctcgtgtctacccggtagatctgcccaggcctgcctgtcttccagctccacagtgctgggatccctaacctgtaacttcagtgtttgcattttatctcactctggctcagaaactaattttttcccttctttatctctctacctcccccttatttttctgtcaggatgagaagaagcacagaagtcaacccaaagatctgtaagtgtttaaaatgcttgtgcttttgtgtcatctggatcagtagaaagcctgttctaggccaggtgtggtggcttgcacctgtaatcccagcactttgggaggctgaggtgggtgaatcacctgaggtcaggagttcgagaccagcctagcctggccaacatggtggaaccctgtctgtactaaaaatacaaaaattagctgggtgtggtggcgggtgcctataatcccagctactcggaaggctgaggcagaactgctagaagccaggaggtggaggttgcagtgagccaagattgcgccactgcactccagcctgga

SEQ ID NO: 90794 - DNA, 1086 bp, Homo sapiens
ttagctgaagcaaattttgagactgagcctgaatccagaggtgggcagaataccccacctgagcggcagggccctggcagagtgggaggtgaagactcggacccctgtgtgcagtcagctgtccacggtcactgactgacgctgatcgcacatcagcccagctctcaacctaggcaggccagacatgggtcttcctccaccgcaggctggattcccatcaggccacggaaatcatgacatccctttgtctgctttttgtattaaaccactggcatctctgaccaacattcagatggggtattgatggtgttcctgaagaccttgagtcctggagtagtaaatgccctctgggcttcctgcagtgaagacaggagaggcagcctgtcctctgaacctggggaggagcttgtgtcagcccttaggagctgttggccccggtgcagggccccccccgagctgaccagcctgtgtgtgtgttgtcttctgtgacagaacacccaaacagaaactgaaggaggagccggacagagaagccagggcaggcgtgcaggctgacgaggacgaagatggagacgagaaagtaaaggcgggttatttgtttctgaactccccctcattcttctgctcctgtttgcttgggcgggagtgcgcagggtggggctctgggttcaagtccagccccatccacccaggctccatggggccatccagactctgggaaggtcaccttttcctccttttgggggccgggatttgtggctggatgcctgtgctggatgcctagtgaacactcagttgtcctctgtctttcacactagagagggtctgtgtgagcctgggctgagatgtgcatgaagcatcctctcctgaggcctcactgctgagaagccttgacacacagtcagctctgacgcacatgtcagccacacctttgattctttcccagcctcctacgttctgagtctagctctccccctgccagcctccccagtctagtttagccaagtgcatgcgtttaaaccctaaagcatcatgtggaacactgctgggcctctgtcaaagtacaggatggccaggttgcctgca

SEQ ID NO: 90795 - DNA, 1568 bp, Homo sapiens
gagtgcagtggcacaattttggctcactgcaaccttcgcctcccaggctcaagtgattttcccactcagcctcctgagtagctctaactacaggctcaagccaccatgcccagctaatttttaaatattttttgtaaagatgggattttgtcatgttgccccaggctggtcttgaactctggggctcaaagcaatccacttgcctcggcctcccaaagtgctgggattataggtgtgagccactgtgcctggccgacactttacagaagcacagtattattcttataaaccatgatatgtctccatctcacctccagctttcccatttttcaccactttggagacaggagtgaagtgatcctaatggaaattccctgaacacatttcatgactgtttagtgttttgactgagacagcattgcctgccattcactcattgtgatgtgatcaggcagctcaataatttgtgtattagtccactagtgaatagcttgggaatgtgggtactgctaaacctatatccttcccttaggaatgtgtgaaggagaaattgaatctcttgcacgaatttctgcaaacagaaataaagaatcagttatgtgacttggaaaccaaattacgtaaagaagaattatccgaggtaagtcagttctcagcatcctagcctctagaaaaatgtctcctcctagtaacttgtctgtgaccagggaggcagcaagatccccagctgtcctcattgcctgatgatgatgatgatgatgatgatgatgaaggaaacacatgtgtttccttgttctctgacacttgtttacattcactgctacttaaattatcctttcctgctgtaggagggctacctggctaaagtcaaatcccttttaaataaagatttgtccttggagaacggtgctcatgcttacaaccgggaagtgaatggacgtctagaaaacgggaaccaagcaagaagtgaagcccgtagagtgggaatggcagatgccaacagcccccccaaacccctttccaaacctcgcacgcccaggaggagcaagtccgatggagaggctaagcgtaagagcagatgattccttttatttttaattgtttttgagatggagtctcactgtgttgcccagtctggagcacagtggtgtaacctcggctcactgtaacctctgcctcccaggttcaagagaccctcctgcctcagcctcccaagtaactgggattagaggtatgtgccaccacacccagctaatttttgtatttagtagagatggggtcttaccatgttggccaggctggtccagaactcctgacctcaagtaatccacctgccttggcctcccaaagtgctgggattacaggcataagccaccacgcctggccctgcttaactctctttctttctttcttttttttttttttttaatgacagagtcttgctctatcgcccaggatagagtgcaatggcgcgatctcggctcactgcaacctccgcctcccagtttcaagcgattctcctgcctcagcctcccaagtagctagtattacaggcgggcaccaccatg

SEQ ID NO: 90796 - DNA, 1052 bp, Homo sapiens
ggctggtcttgaattcctgggctctagtgatcctcccgcctcagcctcctgagtagctaagactataggtgcatgccaccacacccagctaattactattttttgtagagacaggttctcgctgtgttgcccaggctggtctcaaattcctgggctctagtgatccttccgcctcggcctcctgagcagctaggagtacaggtgcgtgctgtcatacccagctaattactgttttctcgtagagacagggtctcactgtattgcccaggctggtcacaaattcctgagctctagtgatcctcccgcctctgcctcccgagtagctaagactataggtgcatgctaccacagccagctaattattctttcttgtagagacagggtctcgctctgttgcccaggctagtctcgaattcctgggctcaagtgatcttcctgtcctggcttcccgagtgtagagattacaggcatgagccactgcgcccagccatggtctgctgtatttcagacgagcatttctggcgtagaggtgttagagtaatctaacattttataatttcttcctatccaatctatactagatacctctgctgggttagttttcttaacacggctctgatgtcattggttctacttccccttgactgctttggtgtttgttaactatggaacaagatggataagtgtgatgcttttgccctccctccgactgtccccagccacctctctggaggtgcctttccctccctgtatgtggccagtctcacgtttgtttcttgtgtgtttccagaaccagccacttctcaatggtgcccctgtttgagcagcttcctgtgcccggttcacacagagctgtcaacttcttcctgaggctgttataccctttctcttgggaatcccgcaggcgtgagctgtatttgccttattcctctgtggttgtttatatatatctttttttttttttttttttttgagacggagtttcactcttgttgtccaggctggagtgcaatgacgtgaccttggctcaccgcagcctccacctcccgggt

SEQ ID NO: 90797 - DNA, 1742 bp, Homo sapiens
ggaggatcacttgagcccaggagttcaaggctgcagggagctatgattgcgccactgcactccagcctgaatgacagagcaagaccttgtctttaaaatatagataaataaaataaataagaaagagcgtagcctagggcttatagaggccgcagagccagtctctctggccctgccgctggttaaatttgagactttaggaaagtgaattaatctctctgggtttcccgtctgtaagtggggatgatgatgattctgaattcatgtggcccttcctcgaagagtaacagagcaggaaattgaatctcagcccatccgaggccagagcccaggtagcagccacagctctgacctattgtctgtctgtctgtctgtcttctctgcagttctgaaagccccatggccccagcaggcctctgagccccaccatgggcagcttgtactcggagtacctgaaccccaacaaggtccaggaacactataattataccaaggagacgctggaaacgcaggagacgacctcccgccaggtggcctcggccttcatcgtcatcctctgttgcgccattgtggtggaaaaccttctggtgctcattgcggtggcccgaaacagcaagttccactcggcaatgtacctgtttctgggcaacctggccgcctccgatctactggcaggcgtggccttcgtagccaataccttgctctctggctctgtcacgctgaggctgacgcctgtgcagtggtttgcccgggagggctctgccttcatcacgctctcggcctctgtcttcagcctcctggccatcgccattgagcgccacgtggccattgccaaggtcaagctgtatggcagcgacaagagctgccgcatgcttctgctcatcggggcctcgtggctcatctcgctggtcctcggtggcctgcccatccttggctggaactgcctgggccacctcgaggcctgctccactgtcctgcctctctacgccaagcattatgtgctgtgcgtggtgaccatcttctccatcatcctgttggccatcgtggccctgtacgtgcgcatctactgcgtggtccgctcaagccacgctgacatggccgccccgcagacgctagccctgctcaagacggtcaccatcgtgctaggcgtctttatcgtctgctggctgcccgccttcagcatcctccttctggactatgcctgtcccgtccactcctgcccgatcctctacaaagcccactactttttcgccgtctccaccctgaattccctgctcaaccccgtcatctacacgtggcgcagccgggacctgcggcgggaggtgcttcggccgctgcagtgctggaggccgggggtgggggtgcaaggacggaggcggggcgggaccccgggccaccacctcctgccactccgcagctccagctccctggagaggggcatgcacatgcccacgtcacccacgtttctggagggcaacacggtggtctgagggtgggggtggaccaacaaccaggccagggcagaggggttcatggagaggccactgggtgaccccagatagagacttggggctactgagccagatgcccccgccccacagacctgggtgatgttgcaaatatttcacacctggaaaggccagataaggcactgactagtcacatagcagtgttgcagtgcggtcctgagggccagtccagtggctagtgtgacccctttagaactggatcctggggaggcc

SEQ ID NO: 90798 - DNA, 1030 bp, Homo sapiens
cccttcacggctcacatgacttcagcaaagctgccccatcctcccagccaggacctcccagatggggtctctcccatcctgactccccctacatcccgccttcctcacaccggatgtgactgcagagtgaggactccaccctgtttgttccaggggcctcacatctggatttcatcctggctggggagggggtgccagcgccctgcccatcccggcaggaccttctgtcccagggcagagctagatggtgctgatgagaacaggctgttggagatctcgtctggttggcttacatcccttcccttcccaaaggactggaggaaagaggggagctaataacatttggcagtatttgttgagtgcttactatgagctaaacgtgcctcatgcgtcatttaaaaggattttcccatcacccccatgaagtgggctttcttctctctattgcacagataaggaggttcaggctgagacagcgtctagggacttgcccagtgtttcagaggtggaatgggagcaaattctggattgccttcaaggtctgtgtccttgaagatggtgtgacctctgggatgtttgaatctcagggccgccctggtgtctccccaagaccttatcttgggagcacccgtggcctcaaggcttagacccagcctgaaatccagcgttagtgggtggtaatgaatgagcagggcacggagctatcagtggtgagactctccctgacccaggtcagcatgagggcgcaggcgcctgtgtgttccagaaaagagacaaaccctccaggacctgcctagggcttgctctctgggtaggtgggcaaggtttctggaagtccacattatatttttcatgccatttgggggagcttctttccctttgaaagcgtgtagctactcaggagactgaggcaggaggatcacttgagcccaggagtagagacaactgtgagctatgatcatgccactgcactccagcctgggtgacagagcaagaccctatctctagaaaataataatgaaaattaaaa

SEQ ID NO: 90799 - DNA, 1014 bp, Homo sapiens
tgctgggattacaggcatgagccactgcgcccggcctaaacacatttcttatttatccaggaagccacagcaaatctcttggtgagcagcagagggggcggctgcactgcacagcgtgctccccaggcctggaaagggaccttgattctcacttatgaaccccaggaggggcccagcaggccagggcagcctgggggtgtctggtcggggtgacccagaggtcaggctgcggttcaaactccccctagggacgtccacatagcattaactctatcctcagaaagcctgagctcccgtcgcctataaaggaccccatcggtagggctggccgtagagcgcccccaactggaccaatcagaggcagaagatggaaagcccgggccaataggcaaattgctcagtgcccttggattgaaaatgagccaatcagagcatgggctgtttccggcccatcagctgtgtctgatccagccgcagcctgggcccaagcctgcctgggactggctgcagcgtgcagagggcatcaagatgcccggggctgcgtccagcaagggaacaaggggcctctgtgtggctatctgggaggggcagcagtccccggggacgtgcacaagcccttgtctgttcccaaactaggacggatgtccctccgccctgggggagcagctgcctctatccagccaggggccaggatgccccttggagggggcggccagggactgagatggctgggtgactccggaaacctccatcactcctgggctcaggagaactggcctaaccagacttttctggaacggtgcacacagtccttgccagacgtgtttctagggacctgaggaggactccccctactctcccccctccctcccatttagctaaggctggaacttcctctcccttcatgaaaggcatacactgcactggcgcctctgacaacccctaaccctacccccaagctgggggaaggccatggtgtctgcctctcatcctctctgccgaggagcgcctctc

SEQ ID NO: 90800 - DNA, 1159 bp, Homo sapiens
gctccaaagtcacctctgtcaaagccacagtctgttccttccacagccacaagatggcgacatgagcctaagtcaagtcctgtccctcaacccacgcccctcgctggcttccccacctctctcaggatgaaagcccaagtcatcagggtggcacgtcaggccctgcacgatgtgccccgtcacctccctgccctcccgtcatttgccctgggtctcccccaccagaatgggagccaggagtcccagccaggcacaggaccgagcctggctctcggtcagcaggtgatgagctgggagcagctccttggccagaggcttacaggcaacaagcggccaggcagggtctggccccgggctgctgggctcacaaagtcacactagaccacagtgacgatctctgtaagcacaaagggactccgatgtgggtggggtgaggagagaggcagccccggcctgaccggccccccgccccgcccccaccccgcccccaggcctaaatgtgcacagcatgctcaagcaccagacgctggtcctgacgctgcccaccgtcgccttcctggaggacaagctgctctggcaggactcacgttacagacccctctaccccttcagcctgccctacagcgacttcccccgacccctaccccacgctacccagggcccagcggccaccccgtaccactgttgatgtgaagcacctcttctgagccaggccgagcccctggccgacttgggagcctcaggcccacgcccacccttcgaggaaggtgtcacctggaccccttcattccacggaggaagctgaggccacagggagcggccatcgccattgggaaggggcgactccacggaaagcccagacgggcttctgcatccattccctctttttgtttttaaaataaattgtatttttgaatcaaggaggataaagataacttctcagtgtcatttttgataattgcattgagaacgatgagctccttcccaggttctgggcactgttggggatccgccgtctcaagaggctcacggtctggtttaggggaaccccagggctgtttgtggaaattacaagaattcacttacccggtgagtcagactccaggagctcacaggtgcgtgggcgctggcacttcctaggagctgactcctgccacat

SEQ ID NO: 90801 - DNA, 1077 bp, Homo sapiens
tcaagtgggaggatcacttgaacccaggaatttttttgtttttgtttttgtttttttgagatggagtctcactctgtggcccaggctggagtgcagtggtgccatcttggctcactgcagcctcctccacctcctgggttcaaccgattctgctgcctgagcctcccgagttgctgggattaaggtgcccaccatcatgcccagctaatttttttgtatttttagtagagatagggtttaccatgttagccaggctggtcttgaacgcctgaccgcaagagatcctcctgcctcagtttcccaaagtgctgggattataggtgtgagccactgagcctggtcaagcccaggaatttgaggttacagtcagctatgattgcaccactgcattccagcccaggtgacagagagagacactgcccctaaaaaaaaaaaaaaaattgattgatgggaggaagggtgaggttggcagagccttgaatgccaggtggaggagctgggactttccttcttggggtgatagggagtcatggagggtttctgagcaggccagggattagatagctgaaggctggatttactggaagccaatgagcagttggctatggtccttgtccacgcggcccatgttgtgggcagtgaccgtattcaagaagggaaggacagacaagtatttgaatacttcagtgaccaggatttggtaaaggactgcaggtcagggtcaagaagaggtgagagcaggacagacttcctccccgctgcaccaggcagctgagctgggtttcctctaggggctgaggtttgagggtacctcaagttctgcaagagtctataggaggtggtaagagagaagagctggaggtcagagttttcttgactatatatatatatatttttttgtttttgtttttaacagcttaacagctttctgttttatttttagagacagggtctcagggtctcactttgtcacccaggctggagtgcagtggtacaatcgtagctgactgcagcctcaaactcccaggctcaagaaatcctcctcccacccttagcctcctgagtagcagggactac

SEQ ID NO: 90802 - DNA, 1053 bp, Homo sapiens
tcgagatcttgagggcacctacctctgtcgggccaggagcactcaaggggaggtcacccgcaaggtgaccgtgaatgtgctctgtgagtgagccggcgggcagagctgggtgggggcaggggccatggacctaatgcaatcctcaccgcctgttgtatcctccccacagccccccggtatgagattgtcatcatcactgtggtagcagccgcagtcataatgggcactgcaggcctcagcacgtacctctataaccgccagcggaagatcaagaaatacagactacaacaggcccaaaaagggacccccatgaaaccgaacacacaagccacgcctccctgaacctatcccgggacagggcctcttcctcggccttcccatattggtggcagtggtgccacactgaacagagtggaagacatatgccatgcagctacacctaccggccctgggacgccggaggacagggcattgtcctcagtcagatacaacagcatttggggccatggtacctgcacacctaaaacactaggccacgcatctgatctgtagtcacatgactaagccaagaggaaggagcaagactcaagacatgattgatggatgttaaagtctagcctgatgagaggggaagtggtgggggagacatagccccaccatgaggacatacaactgggaaatactgaaacttgctgcctattgggtatgctgaggccccacagacttacagaagaagtggccctccatagacatgtgtagcatcaaaacacaaaggcccacacttcctgacggatgccagcttgggcactgctgtctactgaccccaacccttgatgatatgtatttattcatttgttattttaccagctatttattgagtgtcttttatgtaggctaaatgaacataggtctctggcctcacggagctcccagtcctaatcacattcaaggtcaccaggtacagttgtacaggttgtacactgcaggagagtgcctggcaaaaagatcaaatggggctgggacttctcattggccaacctgcctttccccaga

SEQ ID NO: 90803 - DNA, 1018 bp, Homo sapiens
gaggtctactcctctacgccattcgcatagcagccccttcctgactctgccactcacctgcgcccccttcacttcccacccctaggggcctgtgaagcctccctggcctgctccacctgccatgtgtatgtgagtgaagaccacctggatctcctgcctcctcccgaggagaggtgagtgggtcagccctgtctagctggcagcttcaccctggagcattcagcagcccccaccatcctccccacttccagttcctggaatgggagctgcctcccccaccactaccccctgcgctcagtcagcttcctccctcccccacctctggccccccacccacccagctagcttgccctcggctaacactgcccgtgtcaccaccctagggaagacgacatgctagacatggcccccctcctccaggagaactcgcggctgggctgccagattgtgctgacaccggagctggaaggagcggaattcaccctgcccaagatcaccaggaacttctacgtggatggccatgtccccaagccccactgacatgaacacctggaccattccacattgccatggccccagggcccagattgagggaatagccaggtgccagccctgcccagagtgcggacaggcccgggagagacgtggaagcccctgtgaaggacaacacccctgcttgggagagagtcccatgtccaggctctggtggggacagggcccctagtggggtggccttccccaggcccctgagaatcagggtttgagtaggagtggactcatattggagctgcaataaatcgataacacaggccccagcatgttgagtgtccttgggggacagatctggggtctacaggtggctcacacctgtaatcctagcactttgggaagccaagatgggaggatcacttgaggccaggagcttaagaccatcctgggcaacatggcgagacctcgtctctataaaaacagtaaaaattagcgtggagtggtggtaagtgcctgtagtcccagctac

SEQ ID NO: 90804 - DNA, 1855 bp, Homo sapiens
tttgggaggccgaggtgggcggatcacctgaggtcgtgagtgtgagaccagtctgaccaacatggagaaaccccgtctctactaaaaatacaaaaaattagctgggcatggtggcgcatgcctgtaatcccagctactcgggaggctgaggcaggagaatcgcttgaacctgggaggcagagggaagattgtatacaaagggctgggtactacaattgtctgcttcactccaccggcccttcttctacagatgtcccccccgcccagtggcttcggcgaacggagcagcggtgggagtggcgggggccccctgtctcacttctattcaggctcgcccacttcctacttcaccagcggcctgcaggctggcctcaagcagagccacctcagtaaggtgaggaacctctctggccaagcacaggccccctgggacagctaggatttgggggtgcctgccaccggggctctgtaaccctcggtgcccaggccaaagctggggtggtggcaggggttggtcttgctcagggtggagtagcaacagcctattgtcctccatccactctgcatcaagcacctagcactgccagcattccgggctttctgtcacttcctctctctacagcccaggctgtgggtgctactggccccatctgacagatgagaaaaccgaggctcaaataaaatggagcaattggccctaggtcttatagctagaaagtagcagaagcaagatttgaacctgaaactgttcgctttccctcagggctggggggcagtggcaggggggcggggtgggtgcttcctctggcccccagggagtgacctgttccacctctccatttctcccaggcaatcggctcttccccgctggggtccggagaagggctcctgggcctcagccccgggcctaatggtcacagccacctgctgaaggtacgggcagggggtggggacatgcagggctgggaagccccggccccccagcggcccctgacccgccccgccctgccctctgtctccagaccccactgggcggccagaaacgcagctttgcccacctgctgccctcgcccgagcccagcccagaaggcagctatgtgggccagcactcccagggcctcggcggccactacgcggactcctacctgaagcggaagaggattttctaagtggctggcaccagagataactcaagggcctgcaccaaatcgcttttgggttttctgatgttttgttttgtgttttttttaaaccattttctctctttcggtaatagaaaaatctctgaaagactttactgaccaatcagccggagccccaggagcccaaggggtgtgggggagtctggaggcctcattatgtctctggcttgctccccacgctgaaaccctgcagccttaagagagaggggccccggcctgctctccctccctccccccatctcctcctccgctgtgcccgtctctccggagccctcctgcctcattgctcctgtaattttggcctttcgagtgccttggaggtttccctgacctcccgtgaagatacagagactgtctcctttttttttaactttgacaactgacttctgtttccttttctaagttttatttttcaaaccaccccggacagcccccagctctgattccttcaaggcccggcctgtccgggccaccattccacaccttgcggtttgaaacagctgtttttcccacatttgctgcaggcatggctgtctcctgcccctgcctgcccatctggcctataccccagccgtggggcccggggtccctgccgcagccccctccccttctgatgccttaaaagctgggccccaggccctgctggccagagc

SEQ ID NO: 90805 - DNA, 1658 bp, Homo sapiens
aaagatgcaaatatacacacagagacatagacacacaaagacataagacaaagacacacacatagacacagacacacatatagacacaagacagactcatgcacacagaaacaaagacacagatatacacgcacacacacacacagacacacacacacatagacatacacccatgctccgtcctgtctggtgtggttccctggattctaagtcaggtgtgtctgtctggtggtaactgacagaatatgtgagcctgtgggtctggccttctgtgactaaaagtggctgaaacactgtgtggctgtcccattccatgtggctgcagttgatactgtgctgcaatcattggccagggaactggggcctggagctcaggagaccctcggtcaccatggctgatgggacagtgatagagttggagtgtggcgggcactggggaaccctgtgcctgtctgcccaggatcggccgtgccctggagttggggtgtgtctgccaagactctgggccacacctgtctgcttccctgggccaccctgcccccatctgcaactgtctgtgctctgtccctagaagcccggcatcctgggagactcacccctgggcgccctccagcctggggcccagccagccaaccccctcctcggggagctgcctgcaggtaacgcagaccctgcccacacggtgtcccccagccacttccccttccttccctgctacgtggcctcgggtgagtgacccaacctctgggtcccagcgcccttgtccatcagttgggtgccctccactcagggcccagggatgagctctgctcagtggccagcatggatttgtctcttgacccctgggccctggtccaggtgggagctggagggccctggggagaggggtcctgtgagcctgggcccctgaaatcctccttccctccctaggagggggcctgcccccggagctgccgccccggcgagggaagccaccacccctgctgccatccgtgcttggccctgctgggggtgaccgggaggccctgggcttgggtcccccagcggcccagctcactcctccccccgcccctgtggggctccgaggctctggcctcagaggcctccagaaagacagtgggcctctgccgacgccccctggggtaaggccctgccctgcgcgcggcaccacaccagcctcctgttccgcagggttccctctcccgggggccctctcgaatcctgccttcccgccacaggtctcactgctgggggagccccccaaggactaccggattcccctgaatccctacctgaacctacacagcctgctcccggccagcaacctggcgggtaaggaggcccggggctggggaggcgccgggagaagccgccgcccagctgagggccccccaactaaccccccagcccctggaggtggcagcagcagcagcaaagccttccagctcaagtcccgcctgctcagccccctcagcagcgcccgcctgccccccgaaccaggactgtctgacagctacagcttcgactacccctcggtgagtgcctggctgcagctctctgtcccctaaggccaaatcattctccaaactgatatttctctaggattgactatgccaggccatgtgctagggaggcggcagggaacgtgccagatatgg

SEQ ID NO: 90806 - DNA, 1032 bp, Homo sapiens
ggtgagacttcctttgtctttccctgaccccactatcctgctgtggagagggcagcccccaccagccctggtttttccttctaggtctatcatctcatgaagaactgctgggagacagaggcgtcctttcgcccaaccttcgagaacctcatacccattctgaagacagtccatgagaagtaccaaggccaggccccttcagtgttcagcgtgtgctgaggcacaatggcagccctgcctgggaggactggaccaggcagtggctgcagagggagcctcctgctccctgctccaggatgaaaccaagagggggatgtcagcctcacccacaccgtgtgccttactcctgtctagagaccccacctctgtgaacttatttttctttcttggccgtgagcctaaccatgatcttgagggacccaacatttgtaggggcactaatccagcccttaaatcccccagcttccaaacttgaggcccaccatctccaccatctggtaataaactcatgttttctctgctggagcctgtgatttttggagccctcttcaagaaagctgggttagctgggagtctggtctcctgtggacagcagctagcatgagacagcgcagaggtggctggattcaactgtttaacttttttttttttttctttttgagacagagtcttgctctgtcgcccaggctggagtgcagtggcgtgatctaggctcactgcaagctccgcctcctgggttcacaccattctcctgcctcagcctcccgagtagctgggactacaggtgaccgcctccatgcctggctaattttttgtatttttagtagagttgaggtttcaccttattggccaggctggtcttgaactcctgacctcaggtgatccacctgcctccgcctcccaaagtgctgggattacaggtgtgagccattgcgcctggccaataactacttgttgaatacacaaagtatttggtcggggcggtcacaagccacatagattagactgccagtttcaccctttcacatttgt

SEQ ID NO: 90807 - DNA, 1156 bp, Homo sapiens
gggaccacgcacagccggctcggcccctcccaactcgccctcctgcccagctttgctcgtctagccccgtccctgctttctggctcagcctccttttgcttggtgccacgtgccatccggccctctccagcggccgggtagccaccggcctgacctgactgtcccccagccctcctggctgctcaggtcctgccgccgcccccggccgaaccccgccccactgaaactcacgagccctgccccgtccccagggcatggcctatctgcacgcgcagcactacatccaccgagacctagccgcgcgcaacgtgctgctggacaacgacaggctggtcaagatcggggactttggcctagccaaggccgtgcccgaaggccacgagtactaccgcgtgcgcgaggatggggacagccccgtgttctggtgaccaggcggggtgcagtctgagggggtgctggggtcacttggaacaggcagggtggagtagacggatgctgggtatcatgatagggcatgatcccagtgaagcgcggcggggcctagcggtgcgggggtggggcctatggaggcaaggggcggtgtatagagtgcggcttggcctggtgggcggggttaacccggcctagccaatgagcggcctagccaatgagcatatcaccccgctcaggctgcgctcttaagggtgggtcccaactgagcccagagggtccttcagtctcaggtgagggcttcagcctggtctgatccccaagccctcagtgcagccccccgtggcctgagtgcccccctccccctaggtatgccccagagtgcctgaaggagtataagttctactatgcgtcagatgtctggtccttcggggtgaccctgtatgagctgctgacgcactgtgactccagccagagcccccccacggtgagagccaggcccgcagccccaccgggagtttgctagagcaattagaaaggcataggctgggccaggcgcggtggctcaagcctgtaatcccagcactttgggaggccgaggcgggcggatcacgaggtcaggagatcgagaccaacctggctaacacggtgaaacccgtctctactaaaaatacaaaaaaaattagccaggcgtggtggcgggcgcctgtagtcccagctactcagg

SEQ ID NO: 90808 - DNA, 1062 bp, Homo sapiens
tcaccatattgaccaggctggtctcgaactcctgaacttgtgatccgcccgcctcagcctcccaaagtgctgggattacaggcgtgagccaccgcgcccggctgtatttttttttttagtagtgatggagtttcatcatgttgggcaggctgcccttgaactcctgacctcaggtgatccacctgcctcagcctcccaaagtgctgggattacaggcgtgagccactacgcccagcccacctttctctcttgaacttcaacttcttccgtgccccatcccacttggaccccaatgccctcatccaccgctgcctctgctgcattccgcatttcttctctccccaaactcactttcaacccagaccaaactccacccacacctctgccctgacacctccccagccacatgccaagtccctccctggcgtctcccccaattccccgccatccagagggcagaagcaggcaggttgccccagagcagctgtgtctttacagatatcatggtgacagagtacgtggagcacggacccctggatgtgtggctgcggagggagcggggccatgtgcccatggcttggaagatggtggtggcccagcagctggccagcgccctcagctacctggtgtgtggcctgtgtgtggggcctgggtcggtcagggagggccaggagcccaggagttcgagaccagcctgggcaacagggcgagaccccatcttttttgtttgttttgttttaggtggagtttcgccctgtcacccaggctggagtgcaatggcatgatctcggctcactgcaaccttcgcctcccgggttcaaatgattctcccgcctcagcctcccaagtagctgggattataggctcctgccatcacgcccagctaatttttgtatttttagtagagatggggtttcaccatgttggtcaggctggtctcgaacttctgacctcgtgatccatccgcctcagcctcccaaagtgctgggattccaggcgtgagccaccacgcccagctggccccatcttttaaaaataaacaaatagccaggtgtggtggct

SEQ ID NO: 90809 - DNA, 1057 bp, Homo sapiens
tgctgggattacacacatgagccaccatgtgtggccccccccttttttttttttaagagatgggatctggctctgtcacccaggctggagtgcagtggcacaatcatagctcactgcagcctctaacctctgggctcaagtgattctcctgcctcaacctcctgagtagctcaaattacagccaagagacacacactgcatctggctatccaccaccagtccttttatttattttttttttgagaccgagtcttgctctgttgcccaagcttaaatgcagtggcacgatctcggctcactgcaacctccatctcccaggttcaagcgattctcctgcctcagcctcctgtacaggcatgcaccaccacacctggctaatgaagtgtattaactcatttgatgtccctgacatgcctctgggtttgggactaaatagtcacatcttgcagaggaggaaactgaggcacagtggggttaaggggccgcccaggatcacacagtgatggagctggggcttgaactcagcccgtctggtgccagccttcatgtgtgtaagttactcctctgtatcctctcaggccagcaccgagtgtcccatttggggctgctcctgagaattttctagagaacacaggttcacacacgtgcccaaaggagcgtagaatttttgtggaaagattcccaggaggctgagtgcggtagcctcatgcctgtaatcccagcactttgggaggccaaggcgggtggatcacctgaggtcaggagttcgagaccagcctggccaagatggtgaaaccccgtgtctacaaaaaatacaaaaattagctgggcgtggtggcaggcgcctctaatcccagctactcgggaggctgaggcaggagaatcccttgaacccaggaggcagaggttgcagtgagccaagatcgtgccattgtactccagcctgggcgacaagaggaaaaactctgtctcaaaaaaaaaagatttcccaggaaatccatctcatggttgttttgaggaggagactggctgttccctgaactttctcactcatgaa

SEQ ID NO: 90810 - DNA, 1045 bp, Homo sapiens
atgcagcgctgcattgactctggcctctgggtccccaactctaaggccagcgaggccaaggagggagaggaggcaggtcctggggacccattactggaagctgttcccaagacgggcgatgagaaggatgtcagtgtgtgacctgccccagctaccaccgccacctgcttccaggcccctatgtgccccttttcagaaaacagatagatgccatctcgcccgctcctgacttcctctacttgcgctgctcggcccagcctggggggcccgcccagccctccctggcctctccactgtctccactctccagcgcccattcaagtctctgctttgagtcaaggggcttcactgcctgcagccccccatcagcattatgccaaaggcccgggggtccggggaagggcagaggtcaccaggctggtctaccaggtagttggggagggtccccagccaaggggccggctctcgtcactgggctctgttttcactgttcgtctgctgtctgtgtcttctatttggcaaacagcaatgatcttccaataaaagatttcagatgctctctgggctgctgggagggccgttcaggcagcccatctcttgtaggtgggagggaaacttggtgggatattgggggctgagctgtgcttctctggtcctttgcccaccagccatcgtgggtcctcgcctcacacatgctgttccacaacttggaacagtcttcttccagaggcctcaaaagcccccaaccttcagtctcacccacccactcccttgtccctacttggacctccagaatgcagggtggcccaagctgatcaccaccagagggcagtagtgatctgcaaaccaagtcacattccctagggttttgtggatctggcgcacctgcccgcaccccacacctttccagcttcctacaaccttttggagcagcatcctggatggactatatctccccaccctatggccagcgctgcccccaaacagatttttttttttttttttttttgagagtccagctatcacccaggctggagtgcggtgg

SEQ ID NO: 90811 - DNA, 1050 bp, Homo sapiens
tgttttcgaactcctgacctcgtgatccgcccgcctcggcctcccaaagtgctgggattacaggcgtgagccaccgcgcccggcctagcctctaggatttttaacctgcgtacctggaggaacagggctatccttaccgagattagggagaccaaggacaaggcaggctgggaggtggccatgttgagttagaggtgcccatgcagggacactgaggacatgagtgtctcagatctgcagtagagcagggctcccaagcaggtggtctttggcaaatgccagatgaggtccccggcgggggagcccaggccttggggagcccttcatgtaggtcaggaatagacttggggaaccgtggggcgcctctgaggagctgtggctggagggtcctgggccccccagtccctcctgagcgttgggccaggtccagtgagcactgcccaacccccatagacagccgatcgccagtacatggagggcttcaacgacgagctggaagccttcaaggagcgtgtgcggggccgtgccaagctgcgcatcgagaaggccatgaaggagtacgaggaggaggagcgcaagaagcggctcggccccggcggcctggaccccgtcgaggtctacgagtccctccctgaggtggggctccccggcccaggcgggcagcaggaagaccctgagcgggaccccccagggccacagggacccagcccctgaccccagcccctctgtacccccaggaactccagaagtgcttcgatgtgaaggacgtgcagatgctgcaggacgccatcagcaagatggaccccaccgtgagtaacccccgcgccccatgccttcccggcgggccgtgtgtctcccccagccctgtgtcccaagtctctgaagccggctggtgaaagtgcccctccaaggcttctccaaggagtaaggggggtcgtgtcaccttggcacacacccacatatattgagcacctactgtatcccagtatccagcagataaatgctgagctttgagcgcatgtccttcgtgactgtcactgttactgtgac

SEQ ID NO: 90812 - DNA, 1487 bp, Homo sapiens
aaggaggagcggagctgggagcagaagctggaggagatgcgcaagaaggagaagagcatgccctggaacgtggacacgctcagcaaagacggcttcagcaaggtgtgcggggcgggcggggcgggcagtgcgcatgcgcagccagagagcctgcaaccaggacgcatgcgcacccaatgcctggtcaggggaggaccccggtggtgtagttgaagagtgtggtggggggcggggagctgagggatggacgggggccacgtgggaggggggacaggcttggggggccgggcggatgaaacaccccaccggtcccctcctctgatctgccccaaggcccatgcccacgctcccgccaccttgatgctcatggcttcgtcaccacctccgccgtggatgggatgggcgctgcgaccacggcccgcccggccgcgctcgaggcgctccgcagccttgccccagcccactccccctctcaccctaccacagagcatggtaaataccaagcccgagaagacggaggaggactcagaggaggtgagggagcagaaacacaagaccttcgtggaaaaatacgagaaacagatcaagcactttggtgagtggggcttgtgggttatggggggcaaggtcgaggcaggccctttgcctccagggccctccagcaccttgccagcatcttcccacaggcatgcttcgccgctgggatgacagccaaaagtacctgtcagacaacgtccacctggtgtgcgaggagacagccaattacctggtcatttggtgcattgacctagaggtggaggaggtgagtggagctttccccgggactgtgaaaaggcgctgccatgaggccgccacttggtgacgctgtgcctgttcttcctggcagaaatgtgcactcatggagcaggtggcccaccagacaatcgtcatgcaatttatcctggagctggccaagagcctaaaggtggacccccgggcctgcttccggcagttcttcactaagattaaggtagggtccctgagctgccaggtggctggaggccccctccccagggaaccagcccacaatgctctaggtaaggccgactcctctccactgggactcaagcccctccagtcaccgcatcctagatcaggagagggtggggccagggaggaggagagaagtgggcagattctgccagactttaaaagtggaggccgggcgcagtggctcacgcctgtaatcccagcactttgggaggctgaggtgggcagatcacctgaggttggaagtttgagaccagcctaacatggagaaacctcatctctactgaaaatacaaaattagccgggcatggtggtgtgtgcctgtaatcccagctactcggggggctgaggcaggagaatcgcttgaacctgggaggcagaggttgctgtgagccgagatcgtgccattgcacttcagcctaggcaacaagagcgaaattccatctcaaaaataaata

SEQ ID NO: 90813 - DNA, 1035 bp, Homo sapiens
gccatgatggaccgactgactgacactctggcaaccagtccggtgtctgcttccagatcggattaaccgtttaactccttcgtgcctgtgcgcgccgcggccaagcagggtgctttgaagacagacgagttccagcgccccctcccagcccggagcggggatctgcgtgggcgggaagggcccccctccttaggtagctgccccccgctggcccggacggaggaggaggggggcggcgctgacagccgcggcgggcggggggcggggaggggcgggacggggcggaggagccggggctggcgccgagcgggccgcggaacgcggagcgcggagcgcggagagcgccgccgggcactgagcagagctccaggcgccgaaaggaagctgcagagcccggcccgggggcgattggcccgcagcgcccccgggtctgtccccggggcgccatggccctaccgcggccgggcgcacccgcggggccctgggctcgctggcttgcgcgcagctgagcggggtgtaggttggaagggccagggccccctggggcgcaagtgggggccggcgccatggaacccccgaccgtcccctcggaaaggagcctgtctctgtcactgcccgggccccgggagggccaggccaccctgaagcctcccccgcagcacctgtggcggcagcctcggacccccatccgtatccagcagcgcggctactccgacagcgcggagcgcgccgagcgggagcggcagccgcaccggcccatagagcgcgccgatgccatggacaccagcgaccggcccggcctgcgcacgacccgcatgtcctggccctcgtccttccatggcactggcaccggcagcggcggcgcgggcggaggcagcagcaggcggtaagactccccgcggcggatgcgcgcggaacggatgggcgcgcagggaggaggcaactcgagctgccggccgcagggggcgctaggatgcgggtggggtcggtttggctggcgggggcggagggaattcggctgcgggggcgtctggg

SEQ ID NO: 90814 - DNA, 2086 bp, Homo sapiens
gtggccctcgccaggggcggggtttgctgagttggaggcggtgttggccaggctgggggcggaactaactaggctggaggaggggctggctggcctgggggcggggctggctggcctggaaaggggatggccgggcaggaggcggggctgggggcggggctggctgggctggaaaggggatggccgggcaggaggcggggctggctgggctggaaaggggatgaacgggcaggaggcggggctgggggcggggctggctgggctggaaaggggatggccgggctggggtagagctgactgggctggaggcgaggctggccgggctggggaggggttagctagttgggggcggagctggccctcctgcggttggagctgcacacgtgggccctcccctgacctccgggctgggctgcagattcggagctggcgctcatgtacaacgatgagtcggtgctcgagaatcaccacctggccgtgggcttcaagctgctgcaggaggacaactgcgacatcttccagaacctcagcaagcgccagcggcagagcctacgcaagatggtcatcgacatggtgggcggggctggggcgggacggagcgggaaaggaagcctaggagtcgagggctttggggaggagtgggtctgagtcccagaggaaccctcaacctggacagagcgggcggcttctacctggtgaaaacttcagaggcccgggtcagtctggggggcgggtgtcagcggccccagtgacgcccccttgcccgcaggtgctggccacggacatgtccaagcacatgaccctcctggctgacctgaagaccatggtggagaccaagaaagtgaccagctcaggggtcctcctgctagataactactccgaccgcatccaggtgcccccacgccccatcatctaaggagggaggacactcccccagccacacctttaggtctgggtagctaactgccccttcctcagcctctttctcccaagtggcccatcttcctgtgtccttctttctttttttttgtttgtttgtttttgagacggagtcttgctcttgttgcccaggctggaatgcaatggcgccatcttggctcaccacaacctccgcctcccgcctcccgcctcccgcctcccgggttcaagcgattctcctgtctcagcctgccgagtagctgggatcacaggcatgcgccaccatgcccagctaattttgtacttttagtagagagggtttctccatgtctgtcaggctggtctcgaactcccgacctcaggtgatccccccccgccccccgccttggcctcccaaagtgctgggattacaggcgtgagccaccgcgctcagccctctttttttaaatttatttttatttactttgtatgtttaaaggagagttggggtctcactatgtcacccagtctggtctcaaactcctgagctgaagttatcctcctgtcttggcctgccaaagtgctgggatagctggcgtgagccaccacacctgacctctttctgtctgtccccttctccatcttcactttccaatcccatctctccttcccatctctcccaccatttcctcccatttcccccaattcctcctttcttctcatcaactccttccaggtcccctgtccctctccctaaccatcttctcttccctcaccccccttccgactcctcccatattttctccatctcccacacacctctccccgttacctcctctgttctctgttctccccaccttctctccctactccctccctccccaggtgggagataagaaagcctgaaagctgggtgtggtggctcacgcctataatctcaactactccagaggctgaggcaggaggactgtttgaggccaggagtttgagaccagccagagcaacattgcaagatcctcttttcctttcctttcctgtcctgtcctgtcctgtcctttcctttccttcttctttctctttcttcttttctgtttttggttttttttttttgagatcgggtctctctgtcacccaggctagagggcacggatcttggttccctgcaaactccgcctcctgggctgcagca

SEQ ID NO: 90815 - DNA, 1026 bp, Homo sapiens
gctttccacttccaaatccctcccctcaccttcccccactgccccccaagttccaggctcagtcttccagccgcctggggagtctctacctgggcccaagcaggtgtggggcctccttctgggcttttcttctgaatttagaggatttctagaacgtggtcaggaatagccattctaggcggggctggggccagggtggggggcagtcactgtgggaggtcccagctccagcccccctctggtttgctgcctcctctcccctctaaaaaagtcttccgcttgattttgcacaatcccggcgatactcctggcgatactgactagaaagtcagggagctgggggagctgttcactttaggatacgggggtggtatggaagggagcgttcacaccgccagcctcgggcctgggatttgaggagggccctagacctcctccactctccatcccctttcccttccactttgggttcactttgaattttctccgttttttggggcagtggctctgatccactcacccccccgccccccgccccacttctagctgcttctcctcttgtttctgccttaataattcccacggccacaggcaagggggttgcagtggccgcctgcaccttggatgaggcagggccaggcgcccagaacccccatcctggccgcacccccctttccagggtcctccggaccccaccttccacactctgatcacagcccccctaccttttgccctaggaggaagcaataatggtgtataccctcattctcattcctgggcagcccttccttccaccctggcaccaaaataatttctcctccatccgtaccttgcctagcctctccctctcccccagctagtccctgagcaatacggcagacagatgcaagaccatttttctccaagccatgggggactgtttggaaggaaagccccctctctccctcctcccctcgccctcggcctggttctgcagctggaccgacctcattcatcgcctgccccctacccaattctgagcacacg

SEQ ID NO: 90816 - DNA, 1075 bp, Homo sapiens
ggtgataactatatggaaaagaataaaagagggaagggagccttgtgattttaagtaaagaggtcaaacattacagctcttttagaatttgtctcaggttttctggttctcactggaaaaccccccacgcaaaaaatattttaaaacaggagccaagcagtggctcatgtccataatctcagtactttgggaggccgaagcgggaggatcacgaggtcaggagatcgagaccatcctgattaacacaatgaaaccccatctccattaaaaatacaaaaattagccaggagtggtggcggacgcctgtagtcccagctactcgggaggctgaggcaggagaatggcatgaacccaggaggtggagcttgcagtgagctgagatcatgccactgcactccagcctgagtgacagagcaagactccgtctcaaaaaaaaaaaaaaaaaaaaagccacatgcatcactgctgaaagagtgctccaagcagcaggggcagcaagcgcaaaggccctgaggtgggagtgtctgaaataggtgaggaggcccctgtggctgcagcagagtgtgggaggaggatatgaggtcaaggtgggggatatcccgacatcaagaaggtggtgtggacaaatagtgccgggctctgtgggtcactgggaaaactggcttttattcggatgcaaatacataggggactttccagcctcagggtctctgtcttgctgttccttttgcctggagcacttctcctctggctcctcatttgcctggtggctgcagaggcgcttttctaggctctgctgctaccctcatctgcccttcattgggttactgtttttttaaagttgtgtagaggctgggtgcagtggctcatgcctgtaatcccaacgctttgggagaccgaggtgggtggatcacctgaggtcgggagttcaagaccagcctggccaacatgggaaaaccccatctctgctaaaaatacaaaaattagccgggcgtggtggcatacacctgtaatcccagctacttgggtggctgaggcaggaaatttgcttgaacctgggaagcggaggttgcag

SEQ ID NO: 90817 - DNA, 1075 bp, Homo sapiens
ctcgaggcctctgttcctctttcacccccagccctgcccaaccgcccccctcaccccactccagctttcctcttgctcaccctggtcagctctgagcagagtgtctcaaactccttcctgtctccagcatagaagcccacggtacagcttgggtccatcttggcaaaggccatcttgcggggcgaggtgcagtggaaggactggggcagacagacgaggaaggctcagaggctgggctgcccacccgccatggccccaaccacacactggggctcccactcacctccagggggaagtcggcctggctgacatccacagtgggctggcagtagtgagggtccaggtacagcaggaagtcatctgcagggggtgcaggtgtgagtgggggtgcggtggggggtgggaggagtgaggagggggtgggcctaccttggtagccaatgaagtacagtgagtgtcgcggtttcccacccatgatgcccaggcacagctcgcaacgcaggagttcctgcagggaggagggtaggcaggtgctgtcaggcagccactcaacaaacgcttggcaaacacctcctctgtgagaacccagcctctggagggcagcagtgatcaagaccacaaaacccttgccctcaggagctgacatcctagtgtgagagactaacaaggaagatgattacatgaattttttttttttttttttttttgagacggagtctcactctgtcacccagcctggagtgcagtggcccaattggctcaccgcaacctccgcctcctaagttcaagcgattctcctgcctcagcttctcaagtagctgggattacaggcacccgccaccacacccgggttaattttttgtatttttagtaaaaatggggtttcaccatgttagccaggctggtctggaactcctcctaacctcaggtgatctgcccgtctcggcctcctaaagtgctgggattacaggctggagtgcagtagcacgatcttggctcaccgaaacctccatctcctgggttcaagcagttctcctgcctcagcctcccgagcagctgggattacaggcgcccg

SEQ ID NO: 90818 - DNA, 1378 bp, Homo sapiens
tgggcaccacaggggcgaaggtgggtaggacggcgaagaactgtggatatgtggaactgaatggcggccagtacatcacagggtagacagcaggggagttggcggaggatcctggacatgcagggcctcccacctcaggagctaggtgctgggagggctgtagggagccctagctgtaggagtaaagttgccaaggagggggtcattggcggcatcgtagggggctcagctcctatgtctcgagtgggctctggtaaccgccagccctgaccctgcagaagtgctttggggacgagtactacggggccgtggaggaggagaagccacaatttgaggaagaagaagggcttgaaggtgagatcagctggggcactgggctggggattggggactggggactgggactgaagcccaaggtcccaccctggccccacctgtctgttctccctgcatccagacgactggaactgggacacgtgggacgggcctgagcaggagggagactggagccagcaggagctgcactgtgaggaccccaacttcaacgtaggtatcacgggttgagggagtcccaggggccctgacggggggctggtgggatctgacctgtgcgtcctggcagatggacgccgactacgaccccagccagccgaggaagaaaaagcgcgaggcccccttgacgggcaagaagaagcgcaagtcgcccttcgccgcggccgtggggcaggagaagcccgtgtttgaacccggtgaggcccaggtgggcaggccgtgggtaggcagggggcaccgcggggcctggcatagcccagcagcctggctctgtctcgagcaggggacaagacgttcgaggagtacctggatgagtattaccggctggactacgaggacatcatcgacgacctgccctgtcgcttcaagtaccgcacagtggtgccctgtgactttggcctcagcactgaggaggtaggggccccgggcaggcagggacactgcagggggcaccaggtatgccgaaggggtagaaagctggccctgagtcccaatctctgttgctcagaaatgccacaacatggcaggctgtttcttcatcttgaaaatgataatattcggttgggcgcagtggctcatgcctgtaatcgcagcactttgggagaccgaggcaagtggatcacctgaggtcaggagttcgagaccagcctggccaacgtggtgaaactccgtctctactaaaaatacaaaaaaattagccaggcatggtggcaggcgcctgtagtcccagctacttgggaggctgaggcaggagaatcgcttgaacccaggaggcagaggttgcaatgagccgagattgcaccactgcactccagcctaggtgaca

SEQ ID NO: 90819 - DNA, 1045 bp, Homo sapiens
caaacgctatgaggaggaggaagaggaggaggaagatgaagaggaaatggaggaagaggaggggtgagccactgcatctccccaggacctagattttgggtgcgcttcatgaagtattcccaggcggcactggccaggaggcagagggcaccatgtgtgtatttttttcacagatggtggcagagttagtcttctgtaaggcagagccacagagtataggctctggagccaggtggcactgcctcaaatcctggttcggcttcaagactttcatgcctcagtttccccatctgtaaaatgaggacaatagcagcgtgcaccttgtagggttcttgtgaggattaaatgagttcatacgcttcgtacccaggcgtgcaggaaaggggggctcgacctcacttggctggccccctggcatcaccacatcttgcccctcagggtccacggtcccccagtccagctggctgtggacgactcctcagacgaaggggagctgtttctgaagaaacaggaggactttgaacagaagtacaatttccgtttcgaggagccggactcagcatcggtgtgtggctggggctggggaggactcagcccccagggttcaggcccagggaaccccacatcatctctgcggcccttgtgggcttttctgattgcgcctaggtcaagacctacccacgcagcatcgcgtcctccgtgcgccgtaaggatgagcgcagaaaggagaagagggaagagactcgggagcgaaagaagagggtgagtgtggggggtgagctggggaggaccccccagccctggaggaaagcccatgccctccccctctctgcctgggcctgcaggagaaagcaaagaagcaggaagagctcaagcagctgaagaacctgaagaggaaggagattctggccaagctggagaagctgcggaaagtaacaggcaacgagatgctgggcctcgaggagggggaccttgaagacgacttcgaccctgcccagcacgaccagctcatgcaggtgcggccctcatcccggcccaacatgac

SEQ ID NO: 90820 - DNA, 1064 bp, Homo sapiens
cctcctacctcaggctcccgagtagctgaattacaagtgtgcctcaccaagcccagctaattttttaaattttttgtacagatgagggtcttcctatgttgcccaggctggtctggaactatttggcccaagctatcctcccgcctcagcctccggagtggctgggattacaggcccgcgccaccacgcccagcctcaatatctccttgacgatgaaatgcatagatgaatgaatgaatgaatgacctctgtttgctcaccatgcacaccctcaagagggttacttgagagctaagactggaaacaaaggttggggccccacccctcccgggccaggccccgcccccggtccccgccctcgccctctcgaggctcccattggaggaggcgcgcgggggctggcccggcgggaggggcggggccggggcccggggcggggcgctgcagcccgcggagcctcccgcccgcccgggctggggtcgcgctggctcggactccgctccccgccccgccgcggccatggaggacgagcggaaaaacggagcctacggtaggagccgcctccggtcaggggccgcctctgctgacctgcgggtgggaggaccttgagccagggggacatctgagaccctaggcaccggcgctgcggctggatggccctccgcgctcgggcccccgcatccgacactgcgcggatcccacgccccctgctctaaccgggtcgccccgcgtcccctccccgggagccccagctccccctccggctgatgggccggggctcacggcgcatgctccgcccggggaggtcccgttatctgggcggctcggatggcgggcgggggaggggaggcgcggcgatctgggctcggaaaagagacagggccctgacctcctcaaatccccctcctcttccaatcccctttgtccatttcttcctccttcccttttccgccagaagtagccgtccggggcttttggccagatggggaaactgaggcaagactgggcagaccgaatacccagctgagagcccaccgagtctggccagccgcctggaaacggcg

SEQ ID NO: 90821 - DNA, 1049 bp, Homo sapiens
taatcccagcactttgggaggctgcgaggcaggtggatcacctgaagtcaggcgtttgagaccagcctggccaacatggtgaaaccccgtctctactaaaaatacaaaaatgagccaggcgtggtggcacgtgcctgtagtcccagctcctccggaggctgaggcagaattgcttgaacctggaaggcagaggttgtagtgagccaagatcgtaccatggcactccagtctgggcaacagagtgagattccgtctcaaaaaaaaaaaaaaaagacggagagagagaaagaggattttgtgtggatggtggggccctgccagcgggggtgaggggttgggatgtcactaatccaaagagggtttctcagcaggggaaggatgtggtcccagcataggatggactcagggggtgggggctgctctgggaaggacacggagcagggacagctcgtttctccttgcccagacggtgatcgttggctcctacttgattgcacacggtttcttcagcgtctatggcatgtgtgtggacacgctgttcctctgcttctgtgagtgacccctcaccccaaaccttgctgggccccgaatcccttctttccactgggcatcacatcaccctccaacggggcaacacgcttgcctgcccccagcttccccagggcttggctgtccctcgtcctgggtccccagcctgtcttcctggtttccttttgcgcttagaagcagctccgacctcctgtccactggcccaggctgcagcctggacgctgccctggagcccgcccgcgcttcgcagtttctggctttgactggggggaggggatctgtggctgccactaactctggtctctccatctgttttttttgtttgtttttttcttctctcttcctctcctccatgcctgctggcttccctgttcttccctgcctccctctttccctcccttcccgaccaccccattttccccctgccggttcccggggggagcccaggtgaggacctggaaaggaatgacggctctcaggagcgaccctacttcatgtcg

SEQ ID NO: 90822 - DNA, 1044 bp, Homo sapiens
tgtccttgaggcccctgcccgtgggctcccctcatgcctcctgctctgggacctctctccacagtggaggacctggagaggaatgacggctcggccgagaggccttacttcatgtcttccaccctcaagaaactcttgaacaagaccaacaagaaggcagcggagtcctgaaggccccgtgctccccacctctcaaggagtctcatgccgcagggtgctcagtagctgggtctgttcccccagccccttgggctcacctgaagtcctatcactgccgctctgcccctccccatgagccagatcccaccagtttctggacgtggagagtctggggcatctccttcttatgccaaggggcgcttggagttttcatggctgcccctccagactgcgagaaacaagtaaaaacccattggggcctcttgatgtctgggatggcacgtggcccgacctccacaagctccctcatgcttcctgtcccccgcttacacgacaacgggccagaccacaggaaggacggtgtttgtgtctgagggagctgctggccacagtgaacacccacgtttattcctgcctgctccggccaggactgaaccccttctccacacctgaacagttggctcaagggccaccagaagcatttctttattattattattttttaacctggacatgcattaaagggtctattagctttctttccgtctgtctcaacagctgagatggggccgccaaggagtgccttccttttgctccctcctagctgggagtgacgggtgggagtgtgtgtgcccaggtgggggtgtctcctggctgggaaggagggaaagggagggagagttttgcgggggttggcagtggagagcaggctggagaggagatggctaatagctgtttaatggaaacctgctgggctggagggagttaggctgaatttcccgacttcctctgccagttattgacacagctctctttgtaagagaggaaagaaactaaacccacccaagggatgatgtcagggggagaggtggagggcagatgtcc

SEQ ID NO: 90823 - DNA, 1009 bp, Homo sapiens
gagatggggcttctccatgttggtcaggctggtctcgaactccgaacctcaggtgatccaccggcctcggtctcccagagttgtgggattacaggcgtgagccaccatgcccagccttctaggttctgtttattggatgctttttatcttaacaaagtcctggcagagaaagatttgatttgtttccatcaggaagtttggaatctgaggcagatagtggtttgagtgtcatcttcacacaatgaatgagtagagatttggggcctgggaggcacgaggcaaactttagtttcctactgaagcatttgtccgttttatctgaaacaagtagattgccgatctgtattattatacatagtaagctgctgttgaaatggttgtgaaagtagagtaggcaggtaggtggtggttagggggcctcatcggtgctgatttttaagaaatttttatgatatttatgatctgttataaatccttgtgaaacttttccatgagaacacttcacgggtgattccattatgaatagcaattggtggccgggtgcggtggctcacgcctgtaatcccagcactttgggaggctgaggtgggcggatcacgacgtcaggagttcgagaccagcctgaccagcatggtgaaaccccgtatctactaaaaaaaaaaagtacaaaattagccaggtacggtggcacacacctgcagtcccagctattcgggaggctgaggcagcgaatcgcttgtacgtaggaggcggaggttgcagtgagctgaggtcgtgccgctgcactccagcctgtgtgatggagcaagacttcgtatgaaaaaaaaataataacaattggaaattcagatacatttagcatcagctgtatttaggcatcgtgtaaaagtgatgtccagttaaaatttaatttaatttttttttttgagacagggtctcactctgtcacccaggctggagtgcagtcgcgtgatctccgctcactgcagcctctgtctctgaggctcaa

SEQ ID NO: 90824 - DNA, 1387 bp, Homo sapiens
aatggtaagtttgtttttgatcacagatactgtttcttcactcatgtacagagatgtttgtagccttttccaaagcatttgcttccattaccatttttattagcccttttggattataaagcaatattatctattctgtattccattctgatagtgtaggaacgaagtcagtgccccattactcccactgcccagagacaacagcttttcagtttgcttgtccctccttggttcttcagttgtgctcctgcaggctttgcttttacacacgagcgatatagcatcattctgaattgtgcagcttaaaagatgaacgttgggctgcttgctctctttacatcatttttaacttaattctcacatccctagcgtccaatgcgaatttttgtgaatgatgaccgccatgtgatggcaaagcattcttccgtttatccaacacaagaggagctggaggcagtccagaacatggtgtcccacacggagcgggcgctcaaagctgtgtccgactggatagacgagcaggaaaagggtagcagcgagcaggcagagtccgataacatggatgtgcccccagaggacgacagtaaagaaggggctgggtaagtgaggttttccgttgtccttttcttttttgtagggtagccagggtagaggttggcacctgttttctaagaaactccagcctctctggggacctctgggttgtggtcagactgaattcctcactgagctgggtgttggtctgtccctcagggaacagaagacggagcacatgaccagaaccctgcggggagtgatgcgggtgggcctggtggcaaagggcctcctactcaagggggacttggatctggagctggtgctgctgtgtaaggagaagcccacaaccgccctcctggacaaggtggccgacaacctggccatccagcttgctgtaagtgtggccaccactgccgggtaggtgggtgggggggtggtaggcatgctgattgaggatgtggggcccaggaagaagtgtcctgctaggctgtgctccaagaagcacatgccacacttgccctggcacttgctgtgcgtgtgccttctcagtaggtgacaaccaggacaccaccaagccacagagattctgtggaacctgactgcaggggtcataaggaccccgtgcctattgtgtgccaggctgcaccagcccgaggtcattgggcataaacttcacgtctaggctccattggatggatggctagatagatagcagagttgttatctcttccattggatccaaagctgaatgtaaagaattttttttttcttttgggacggagtctcgctctgttgcccaggcctagagtgcagtggctcgatctcagctcactgcaacctctgcctctga

SEQ ID NO: 90825 - DNA, 2700 bp, Homo sapiens
cctttatcttcatccttgaacgttctcaaacatgaatgtggaagttgcttttctatggagccattctctggctgtggagaagtgtccctggtgattccatggttttaaagatgagacaaccagatggtttctgcatgagcaccacgttggagtttaccaacagcctgtgctgcagctgagctgagggcctcttcgtttgtcctctgtcatggctcttttatcatttaaagtgacagaagcacaaagagctgatacagagttttggataaagttttaaactgttgtccaatttttcaaaccacatcattggacctcacgctaataatgtgctcgcagtccatggcccgccgctcgcatgcctgtcttcaggccttatccaaacccctggtgtgcagatggcagagaagataaacgctctgcttggccgcagcataggctggcatagcgcccttgttgctgtttacctttggttctcatagctgattccgactaccaaagcccttctagttgatcaacgtagggacgctggacctttgaccaacaggactctctctgtcaagggctggggctagggcagtcccgcctggtgggcggagttggtcccctttgctgcagatgccttgggatggctgttgtgtgatgcagagagggagttcatttcctctccctcggcctttttaaattttttcctattgaacattttagcatagctaatttattgggagaacatggggaggaggcaagggaagaggattagaagataggctccacctatctctcccctccctcatgagattattccttttagaataactccccacttttgtttttatgtttgttttattttttctttttctttcttttttctttttctttttatttttggagggggcctccaatttttacaatttcctcacagggcagagttgaatgtgctctagtttctccttccctggtccagggtggagatgaattcagcttctgggaaactcagctgccctttagaaagctgccacatcccctttccacctgacagaaaccccttggtcaaactgtgccttgtcttcttattccatccatgaatagaaacgctatcagtcaacgaccccccggacgttctggacaggcagaaatgccttgctgccttggcgtccctccgacacgccaagtggttccaggtttgcattttgttcttctatttgtcttttggtagagaattcctaagttttaacttggctaactgtcaccataaagattccttaacattgacgatagccgtgccgagcttagcacctgcagctgcgcaggtcctaaaggagtgcacctcaacaaattcgaccccaaaagaggctgagactgagttggtgggctgctgctgctgctgctgctttgtgttaagagtaacactctcttgtacacgtagtgacattgcggctggccacagccttggtggtcgccagtgttgactgtttacccttggcaaagcagcaacctgacacttgtgtcgttcatgttgacttgtgccctgggcggtgcctcagactgaagagcctgtgttttgttcccctaggccagagccaacgggctgaagtcttgtgtcattgtgatccgggtcttgagggacctgtgcactcgcgtgcccacctggggtcccctccgaggctgggtaaggcatgttgctgtggctactgggggtggtgtgtgcagagtcttttggatatcccaggaacacttgatggtcacggggcaggagtggcctcttgacgcgtggctggtgtgtactctccagagctgcctgtggagctgctcctgcttgccacacctggggttggggttggggcagtgtgggtcggggccctctgcagggtcgcacagctcaatcccaggagtgggggctgaccaggaggtgggaatgatccctctgggaaggtttgtagatagtctcacgcaggaccagtttttggcagttgcacccttttttttttcagcttgcagttgaggtggtttttatatttgtaaataaatggttagattttaagtaagaagtactacatcataaccttagcttggtctctgagctcacacagcctgctaggatgtcatgtctggtccttgaaggcccctgtcctagatgccctggctcaggcttagccctgaggctttgactttacccgactggttggctatgagtcccacgtgtgccccgacccactcatgcagtgacagctccccagtggcggccggccccatcctgtaggctcttggctcactgtccctcttccctttcagcctctcgagctcctgtgtgagaaatccattggcacggccaacagaccgatgggtgctggcgaggccctgcggagagtgctggagtgcctggcgtcgggcatcgtgatgccaggttggggccttgtgctttgcaggttgcagggaaaggacagggttccaggccgcctcctggcgggtacactgactgggttaggacagcagcagccccgtgtccaccccctagagctgaagcatgtgactaccctctggcaccatcatatccagccctgaccgggtccgcagccgtcattcagagggcggatccggggcagtggtgacccactcccacgtgactttcttgctctgagacacttgtgaattatttctgtcaagggctggacgccgagtgggtcaccgagctaggcatgtttt

SEQ ID NO: 90826 - DNA, 4558 bp, Homo sapiens
gctctcgtggagacctgccatcgtgctgatccagagccaccttgctattctctctgtagaggagaaggcagagcccccccaggctatgaatgccctgatgcggttgaaccagctgaagccagggctgcagtacaagctggtgtcccagactgggcccgtccatgcccccatctttaccatgtctgtggaggttgatggcaattcattcgaggcctctgggccctccaaaaagacggccaagctgcacgtggccgttaaggtgagtgtggccagcatcactgtcttctaatagcagaaccatggtctttgttttgggccccttctgagccattgtctctcagggagggcatgtagattctaaaaatacacatggttagatggcgagtatttgccaagtcacgtggcaagaacgccttcccactgtggctggcaggcagaggggtccccaaacatgattggggcattagggcctcctgggagcaggagctgaaaggaaacagccctcctccagatggcttcccgggtgggtgcctgtaggccatgaggaggccctgcatgcagccctgcttcactgggaccttgggggtcttgccacctctgcaggtgttacaggacatgggcttgccgacgggtgctgaaggcagggactcgagcaagggggaggactcggctgaggagaccgaggcgaagccagcagtggtggcccctgccccagtggtagaagctgtctccacccctagtgcggcctttccctcagatgccactgccgaggtgagcacatggtgggcgctgggagtgactgcctggacagagcaggcagccatgtgtcctgtcagtgaggtggttactggtccttgttaatttgccccaaaaagtggacctttcaggccagaagtccgcacaggaagctgggtgctgccctccgagccgtgtcggggagggccttgtggatgttgtcccagcatcctataggctacactggggtggccttgggttgataacgtgctgttcagaggggaggcacaggaagggggcacattgctggaaggccctcactagagtcagtggagactctggcaagggctggcagtgtatgaagagcagaggccctgcctcagtcctgccactcctcccatgtgactggaatgcccatagctgagtttgtcggtcttcttttctgttttccctgagaacgtaaaacagcaggggccgatcctgacaaagcacggcaagaacccagtcatggagctgaacgagaagaggcgtgggctcaagtacgagctcatctccgagaccgggggcagccacgacaagcgcttcgtcatggaggtgcgcagcctgaagctgcctgctggggcagtcccatggggaggcctggggtccccctgcccctggagggaggcactgagtcatctccatctgcactttccaggtcgaagtggatggacagaagttccaaggtgctggttccaacaaaaaggtggcgaaggcctacgctgctcttgctgccctagaaaagcttttccctgacacccctctcgcccttgatgccaacaaaaagaagagagccccagtacccgtcagagggggaccgaaatttgctgctaaggtgagcagtggcccttgaacctccttgcccaggcatgggttcttctgcaatgtgagcacgaagggaatgtcacttccctgtgttctcttctagccacataaccctggcttcggcatgggaggccccatgcacaacgaagtgcccccaccccccaaccttcgagggcggggaagaggcgggagcatccggggacgagggcgcgggcgaggatttggtggcgccaaccatggaggctacatgaatgccggtaagggccctcatactgcactgtccccgccttccccacgtgcatgctctgggaacaaatgtgtggggctcctggggtgggccggagacactgctggaccccggtaaccctgtctttccctttccaggtgctgggtatggaagctatgggtacggaggcaactcggcgacagcaggctacagtaagtgtgcgtttctgtctgtctgacctgggaagcagctgcagtgtagcgtctgggcctgagttagcaaagggtggccagagcagcctcgaggaggctgtagaaggggcacacacctttttgcggtgattaggtcagacggccctcgacccccaccccttcccggccccacagtgggattgattgtgttaatacacgaactcgtgtaactgcaaagttccttaaaagttagaattttaaatttctctgctttaagccatgcgaagcaccaatcttgtgaatacgcttttccggccagtgcacagctcttgtcttgagaaggagccttcattggggggttacaggagcagagaaatctaaaacatgaatttcaaatgtggcgctctgtgccctttttcaaaagaattctaatttcttctctctgctctgtctcccccttttgtaggtgactttttcacagactgctacggctatcatgattttgggtcttcctagagcgtctaaaagtattgcacacaaaatcaactttttactccaatttcctccaactccaaaacccaaagtgtccgtgctgtgtccctgtgcttcactgggtttctcaaccgtggcttttcaccgcagcttgtctgaaactcttagcctgcagaatttaagacaatggcagtttttatcgtgatttgcctttgaacttggtcctattgaagttcacaataagtggaaaacaattttttcagagaatgtatttttgtgcagaattgcacagaattctagagacagcgttgttcggcatcaaggcaaaagcccacctttgctttttatggaaagcattactttatttaaagagacagacaatgacgcattttaatctacctttgtcttaatttacagcaggttttgtatgaatttttaaccttttaacaaactcccaaatctggttgatgcctttgacagtgatgaaaacgatttcaccacatctgaatccagagaaaccggctttttttcttattgcgagcatgttaaaacgttgggaacatgtggggaattgtatattgcgctgaattaacttctcccgcctcttgtaatgctctggtgggttcttgtttgggaatgcgatattttgtggctggtttagctagagagtgaactctcaaaggtatcaaaactgtgcttccattattagtgcaagaaacagacaggctttaaggggtagatgacgtgaaattttgcaagtcttaattacagctgcagatgcatgggattctggatttttttgttgctttttagtttaatgggactttaaaagtaattgaggagaaagaaccgtgatgttccctgtttctccagtaaaggactggcttttgcttgggcagaggtggtgctgctgggtgtgcagctgccacagactccaaaggcgtagaagtttgtgccaacacacggagtcattctggctctctgctgaggcccctgttttctggcaggtgccctccttggaaactggttttggctctgatcagcggttctttttgcagcaaagcctgcatctgtgttgacttgcaagattttgcgtttattcaggcaaaaactggtcaaaatggttactacatgatttgttcccagaggtttgaaacattcagtgaaactttttaaaactttgattgcatgatgtattttttttttagaaagttattgtttgagaataatgtctttttataccaggaaaatagttatcctgaatgacgttgaaaactccccctcccctttatttttttttaatcaatacatgtgaaagtaacaagccctcggcccttgcgtcttcattcattcccggcttcaggcggggcgaggtggtgtgctcagtgcaggacactggggaagctggggctgtggggctgtggggtgtgggtcctggtgggggggttctgaagatcccatcctcccagtctcctcgctgagctgccgcatgttcgctttctggcattgtgggacacatcctcccccttggtgtcttggctttgtgatggcgggcgagggaggaggcctgcctgaagaacacaaactgaaggttgcagatagttctgtccacgttgtcatgcaggcagcccaccacaccagcgtggggtacacatctccagtgggtggaggcacgtgaggactcccagttaccctacccaggaggcggtgggcccttagtgtcctcaatctgggaaggaaggacaggcagcgtgggagcctccccttccctcccacccaccctgggcctggaggtctgggcagcctgactgggcaaaggtggctgcattcacaagccgacccgctctgagagcccaggaactcagctgcgcctggtgagcgcttgggcgttggccagcttggctggagagccaccaccatgacccagcctcccacctcacccaccctctgagccttcccacacccactgtggaggctccctgtgtggggctcccttgcaaggcttggggtgcagcattccctcagccagtgccgtcccctttgttccact

SEQ ID NO: 90827 - DNA, 3175 bp, Homo sapiens
ggaaggggcctcgggagtcattagggctgtaggtctaggcctcacccggctttcctgccccagccgtggccactgccctctgccagccaggctggggcttggtcacatcctgagtcacatgcttgcatgagtatcgcaagggaggtgcctgcatcattgactgagtctcgatttgtcttccaagaaccaaaccagctcagaccagttggtcttctcaggatgatgacggtccggggcctctttaaatagcatcttttaggggcctccaggcctgtgcctgtggagcctgttcccagcacagcagggaggaggggggtggctgctgcttctctggggctttgcttttcctgtcaccattggggatctctgggtagccgtcagctagctgtgaatgtcgtcccgcgctcggagtccatctcattgtaatgttgacatccgctgcaaaagctgctggcgcgtgctgcttggcaaagccccattgttgtcatcagctgctgggtgagtggagctgaaggctgggccagcccaaacggctgtgctaaggaccggagccactgctcctctccctccttgtcctactgcctctgacccgggcttgtgggtcagccttcaggacccatggctgccgcctgcccttccctcccttccccctgccctttcccgtcctccgcctgacccactgcctccctgtttaggtcagttctacagcaacggagggcattctgggaatgccagtggcggtggcggcgggggcggtggtggctcctccggctatggctcctactaccaaggtgacaactacaactcaccggtgcccccaaaacacgctgggaagaagcagccgcacgggggccagcagaagccctcctacggctcgggctaccagtcccaccagggccagcagcagtcctacaaccagagcccctacagcaactatggccctccacagggcaagcagaaaggctataaccatggacaaggcagctactcctactcgaactcctacaactctcccgggggcgggggcggatccgactacaactacgagagcaaattcagtgagttggcttccagagcccctcggccgggccagggtccaggccccagcagtgcagcccacggagtggcagaagctcggcactgcccagacctctggctgagggccttaggaggaggacaagtggtgctggctgcgggcgggtgctaggaagatggggcgtgggacctcatggtgccgtctccgccactctctctggtgtgttctccgaaggcagggtagctgaggcctctgtcccgaggccctggctgtgggtgaggctgcaaggtgacttcctgggacttgctctagagagttttgcatccagcccctgcaagagcctgacctctccgccaccgcctttccgcttcctcatgcgcagacccagcaggcccgggctgcaccagtgacccagtggggctgagtaggtgtgtccttgggacccagcagctgtcagcagcaggccagggacttgacagaggctgtgctggtgggtcagaagggggtgctgtgtgtctggtgctgctggctgaggagaggcggctgctggggtctcaagcacttcctcagctgctgctgggaagtttgggctgcaggaacagatgggaaggcaccccagagcagggctttggagcttggtgaccagcccagcccagggccaggtgaccctgcagggctccagctggcccctggtacttacctgatgggctgatgtgcgacattgaagcaggcagggagaagagttagaggcccagggtctgggccaggggccggccgcgtctgaggcgcaccacaaggcccccgggccgcccaaggtgtgtctttcctggggccccttaaccatcctgtcttctctcccccagactacagtggtagtggaggccgaagcggcgggaacagctacggctcaggcggggcatcctacaacccagggtcacacgggggctacggcggaggttctgggggcggctcctcataccaaggcaaacaaggtgggcctggagcccctggtggcacagcatggggggcctggcagctgctgtgaagcgggatatggacctggtgggagcagacagcagcgtgggcagggctgcagtggcaggtgggccctgtgagaacacgcactcggatgcactggcagctgctaaggctttcgggagcagccggagagccagcagtgtccccacgcttaacccctggtacctgtgtgaaatgtgggtgacaccaaggccaaacagctgttcccccggttctggccagtagctcagccttgggctcaggtagcttctcccagaaacgagggtcacagtggtcccacctctcagagtcttggtgccagcctgatccagtgatgtgtggtaggcaggcagagccgcacaggagcccataagtcttgcccacctgcatcctggccgaggcttgggtgtgggctgcctaacctgagccccgctggctgggcccctcggctctaatccaccactctctctcctaggaggctactcacagtcgaactacaactccccggggtccggccagaactacagtggccctcccagctcctaccagtcctcacaaggcggctatggcagaaacgcagaccacagcatgaactaccagtacagataagcccccgcggggcggagatttctaccttctgcacttactccccatcagaagatcgagttttatgcatcacagttaacatgtcagctggccctccaggcccccgcccccatcccgtccacgttgctgtgtcgtgaggtgcagcgggtcaccctgtggcccgtcctgtgacccatatttagccgtgtttgggactccgtgtcttcaatggtttgttagttgccattacaactttgtctgggtagagtttttgagtttttgcagttcagtatccctctgtctattcacacttcgtgttagtggtaactcagtttgtctttaaatagttacagaagggatacgtcatttgttaatgcttttgtgaagtgagttaaacgagctttctgtattttaatgctttagtgtttcagttttataagtgaagattttattttaaaaaccagtgggaaagagtggggggtttctttttatgtctgggtcattcaggcagtacatctgaattaagctgaatgtaga

SEQ ID NO: 90828 - DNA, 1072 bp, Homo sapiens
tgtaacaggataggattttaagctggggagaggcaggatcaaaggcacattctgtaaagctccttctggctgctgtataaacagaccgggaaagtcacgtgggagttagcaagacgggggatggggggatgctcttggggaagtccaacttgtccccatgtgacggcaggctttccccaagcattgcgggctttcccagtgatgttgcccccatctcaccatcaggctcggacatcatcatgcagctggacgacgtggttagcagtactgtgactgggccacgtgtggaggaggccatgtacaggtgtgtatatgctgtgtgcatgtgtgggatatgtggtgggaggggatcctggtccctgtagccttgtctcctaccccctcaccaggcccctggggcttgtgactggggccctgttgcaggtcaatccgctggctggaccggtgcattgcagcccatcagcggccggacaagcagaacctcttcgccattatccagggtgggctggacgcagatctccgggccacctgccttgaaggtagagccatgcgctggcaggcccagggcttggccatcgcggaggtccccacatgggcctggcgtatggcgggactggattgctaatgtgtagaagggcactgcgctagaaaaaatagccggagcaaaggctctcgggccacgtgcagtagaatgtattgagagaatggccatgattccagtagttaatgatcttctaggttttttgtttgtttgtttttgtttttttttttgagacggagtctcaggtgatccaccccccttggcctcccaaagtgctgggattatagtcatgagccaccgcgcccagcctatttatgtatttatttattttactttttttttttttggagggtggagtcttgcactgtcgcccaggctggagtgctgtggcgcgatctcggctcactgcaacctctgcctccctgcaacctccgcctcccgggttcaatctattctcctgcctcagcctcctgagtagctgggactacaggcacccgccaccaggcccggctaatttttgtatttttagta

SEQ ID NO: 90829 - DNA, 1397 bp, Homo sapiens
ctccgtctctggctctgtctgtctgtctctgtctgtttctctgactctctccctgagcgactctggaagtctgggcagggtgtgttctgggattgaagaccaggcgcatttcctcttctgtggccctcaccttaccctgtaccctcagagatgaccaagcgagacgtgcctggcttcgccatcgggggcctgagcgggggtgagagcaagtcgcagttctggcggatggtggcgctgagcacctctcggctgccgaaggacaagccccgatatctgatgggggttgggtatgttgtggatagggaagccagagccctacctgtgggaagtggattcctggggaccccctaccctgcttggggaggtggcatttgggggaaacggacacaggtctgatctgaggagactaggaagacatggctgtcccttgggggccattctgagggaatatggcccagtctggggcagtgtgagggttgggaggggccctgggaagcccctgaggttctctgccccctcccgtcatggctgcaaccccagctatgccactgatctggtagtctgcgtggctcttggatgtgacatgttcgactgcgtcttccccacacggacagcggtgaggctctggcagaaggaggtcagggcgggagacgggtgggggactagggaggcaaggttaggggtggggggtggggagaatgaagccctgggtgacgcccctttccctgcccttcctctcccacagcgctttggctctgccctggtgcccactgggaacctgcagttgaggaagaaggtgtttgagaaggacttcggccccatagacccggagtgcacctgccccacgtgccaaaagtaggcaggatggcactgggagctggggcagggcatggaggggacagggcctggccgtgctgagctgtcccctgccgctctacaggcacagccgcgccttcctgcacgcactgctgcacagtgacaacacggccgcgctgcaccacctcacggtccacaacatcgcctaccaggtgagccagtgcccggggcaaggtgggcgggggtgtcctaggtgcgtatgccccacgctgacctcccctccccgcagctgcagctcatgagcgccgtccgcaccagcatcgtggagaagcgcttcccggacttcgtgcgggacttcatgggcgccatgtacggggatcccaccctctgtcccacctgggccactgacgctctggcctctgtgggaatcacactgggctgacctggcattgggagagggagggaggaaggaagggagggaggggctggaagatactgaaggattcctttttgaaaggttttttttattgtaacttacagagtgtgtctgtgtcttcttgaggaagtggcctgtctgggtc

SEQ ID NO: 90830 - DNA, 1289 bp, Homo sapiens
gccaacgtgcctttttcggaaacacccccttcctctcttgacaacttgctttctgccgctattggctgttgcacaacagtgacggttcttttgtccaataagtcagcaagacggtccccagggggaaggtttactcaaccataggcccgtgcctagtttttattggctagtgtatccgagtggcggtgcagcaggccagtcgcgtgcggcgcgagtgctttgggcgcagcccccggggccggggcgggaggtcgctcgggtcgggtgtcgcctgagaaccggatgaggcggcgaccgtgaggccgagccgggagcgggcgtcttgccgaggcccgggcgggcggggagcaacggctacagacgccgcggggccaggtcgttgagggtcggcggcgggcgaggagcgcagggcgctcgggccgggggccgccggcgccatgggcaaccgcgggatggaagagctgatcccgctggtcaacaaactgcaggacgccttcagctccatcggccagagctgccacctggacctgccgcagatcgctgtagtgggcggccagagcgccggcaagagctcggtgctggagaacttcgtgggccggtgagcgggcgcggcagggatcgcgggcgggtggcggcctagggcgcggagggcggaccgggaatggcgcgccgtgcgccgccggcgtaactgcggcgcttgcgtgcccgcggcggggaaccggacggggtcggggaggcgggccctgtgggacgccctgggcagaggactccctgcaggggctccggagcaggcccgggccccaggggcggtgtcacgggccagggcgccgtaggacaggaggtgcgctggaaccctgcggtccatctggtcccagctttcgtgggtgaagtctgccatctggttggccgtgggtctggggtagatccctcttctgctctttcgggctgtccatcagaggtgaaaccggccatctagatatctattggggcgaccgctgcggtctggctggcttgttcttgtatctggagctgcccccgccgtctggttggctgtctctctgtcctgggcaagcctccctgccaccaccatttggttgtccatctgtccagtcccacctggcagccccctgctgtctggctagctgtccagggtgacctctgctgtctggccgcccatccgtgcccctcacagactttaacactgagcagtccctctgttgggtgacaccagctggcctctactgtctgactggctagctgactcctaggggaccctgtttgattctctc

SEQ ID NO: 90831 - DNA, 1035 bp, Homo sapiens
ctggaatgacttgtggagaggtggaattggatgggatggtttccagagtggaattttagccattcaggcaagaggtagtcctggaaacagtcgtgtcaaactcaaatgttcccttgggactttgccggcacttggaaagtccagcatcaaaatctggcccaggaatcatgtttacgtgaggtttcccaaagcctgcagcagcagaggttgtccttaataacacaaatgacaataacggccagcatttgttgagtatttgccgtgtgccaggctcacccttatgaccaccctgtgagatcagggctgtgaccatcttcattcgacatgtcggaaactggggtccaggcctgtgacgttctggctttcccaggtgatgtgacctggaagtttcagggccaactggaccccaggtggcttgcagctgccagctgatgctctttcctggtggcagcctctgacctctgacctctgggctctttcaggcctacggaccatcggtgtcatcaccaagcttgacctgatggacgagggcaccgacgccagggacgtcttggagaacaagttgctcccgttgagaagaggtgtggctttgggggtgctggggaagcaggaggatgggtggggtccttatcattactgaaaccccagcacctgttccctgcctgcctggaagtcattgcttctccatttcaccgtaactccttctttcttttccctttgagctatgtatctttttcttctgatttgtatgcattcgtttttcaagtgcacaattaacacctgctggtttctgaaacattagaaaacaagtgtatagaaagaggaaactaaactcacccgcagccacacttcccccagacagccactggtgaatctgcagctcccagctccccagggtttataactttaattaatttttttattactttctattatgagccttcccttcccttttccttttcctttttgttttttgagacggagtttttgctcttgtcacccaagctatagtacagtggcacaatctcagctcac

SEQ ID NO: 90832 - DNA, 1781 bp, Homo sapiens
tacatgaatttatattcccaccaatatgatgagagagttggtgtcatgtcatgctttctgaaactgggttttaattaattaatttgtttgtttatttttattttttttgagacagggtcttgctctttcacccaggctggagtgcagtggtgcaatcacagctcactgcagcttcgaccttcctgggctcggatgatcctcccacctcagcctcccgagtagctgggactataggcgtgcaccagcccacctggccaatttttgtatttttagtagagatggggtctcactatgttgcccaggctggtctcaaactcctgggctcaagccatctgcctgccttggcctcccaaagtgctgagattacaggtgtgagccactgtatctggccagttttcaattttttaaataaaattttgacgagttaaatattctgccttgtgaatatagccacacgtgggagagaacgttccccagatgcacgcctgccacgggggcgccccgggtgcctccatgcatgtgcttggtttgtctcttctcagatggagtttgacgagaaggacttacgacgggagatcagctatgccattaagaacatccatggagtcaggcaagttccacgaggagagtcaccactgttccttcctctccgtggtgcgaccccccagctaattgggtcacccacacctctgagtccctaatcgttaggccttaagagggctcttggatggttttctgtagctgcgagcccctccctgagggtctccaagggcacatgagggtggatgtgtcttagtcctgcgtccattgcaggcttcagggctgtctgcagctcctgatcaaatagggcttagttcctgcccagtcggttggtgtgaacctcatgctaaactaagaatgctcactgcagatttgcctggggaggggcggggcggcactgaatcagggttttgggaagccagcatgagtccccatcatggcttcctcgtgagcctcttgggtcccctccttattctaacaaaggtagttgctccaggtgtctgcccttccatcgccgtggggtcctcgggtcaccctgagggtttccgggcagtggactcaggcatccgaccccacacatgacacaaccttcattccttgttggggacccggccagggccaatgaaattgctgaccatgctttgtttctctctgacttatctcccctgcccccgggtctggacggtttcaggaccgggcttttcaccccggacttggcattcgaggccattgtgaaaaagcaggtcgtcaagctgaaagagccctgtctgaaatgtgtcgacctggttatccaggagctaatcaatacagttaggcagtgtaccagtaaggtattgctccctcggcagggtgactcctgaccttgtggaaacgggggtacgggggtttggtatcaggctcccagcgcctcattggcccccactggtgccttttctccccatatcgctttgtgtccgtgaacttggcctctccccagaggctggggcaggagcatgtaggcctgggcccaggcacacaggggagtgccaggcctcctggactggccagacagatgcacagttgtccctgggaccctgataccaagcctagcatgtgtctgatgaaattggggtttcactgggctgttgctttgctgcctcctgggaagcagagagggaccccccgcgtcaactgctggaggctgagctccttgaagctccctggctgtcaccccttcttgaccaatgcccggcattctcaga

SEQ ID NO: 90833 - DNA, 1149 bp, Homo sapiens
ttgccagggaatttctgcttgagcccctctgttcttagtctggaaaagcccacatttgctgcttaagcttcttcgattagaaaagggagggggaaaacagtccaaacaggttggaaaacgctcgtcctagagccaggtgtcatggacatgaatgttagaggactccgcacaccttggctgtctgtctgtgcaatgacaaccccccgtggcccttctgtaactacaccccagaccgagcccacacccccaaaccccagacctctttgatccgaagcagcttccggggcaaatgcgggcgcaggctcccccatgcatggactaatcagatgactctcgtttcttctcttctctctgtctcctgtcctgcgtgtgtggcctgcactgtccctgggtgtctttctgcctcatcctgccctccgcatgacccaggacggggctcttcacccccgacatggcctttgaagccattgtgaaaaaacagattgtaaaactcaaagagccgagtttgaagtgtgttgatctcgtggtctcagagctggccacggtcataaaaaagtgtgccgagaaggtaacaggttttgttctcatctccgcatttgtccccgtcctccccctccatgtgttagtctcaacccgagcatctggaaaattcagcctcggcaggaacccccttccgcctaccagttgtcacttagagatgtcgccaccttgcattggcagatggaatggggggagtggcatcacacgtgggttgtggctgcccgtgggggcggtcagcctttgttgttgccaaacgcattgcatttactaagcagtgccctttcctggaacccctagagaaaggggtttcccagccagcaccaaaacagcaaaacacaggaaacacatcatctgtatagccctgcatgttctcacagtctaggccacctgagagtaaccattccattttccccgactcgtggacttgacccacactgcagaagatgggactcccctgtgcatgaggtctggttaagttggtgctgcagatgaagcctggggaggtgggggcatttggcgagtgtgtgccacagatacagtgatcaggagtggttctctgcaaggagttcctatcgaggctgatggcccagatacccgccttaccattct

SEQ ID NO: 90834 - DNA, 1106 bp, Homo sapiens
agaacccctcctagagatgagccgaagtccctgactgggcctcccctgcctgtgggtggcagcccccggccctgtgctcccggccgccgggtgtgtgtgggctcacagcgctggtccccatctttggtttgctgctgttttcctcaccttgatgtctctgcttctcacacttcatccacagttccttctcacaatctctcctgtttttcctttgaccactctttcctctggattcctgggccttcccacttaccccagctgttactatactgagcagctggtgacctggtgggtattgcctgctgtgtgcctttgccctggtgtgtgaacggggtacgccctggctgggtggccccagccctgggtgggacatccctggggcccgctgaagagctacggggtgctctctcagagccagggccagtgctgggcctctgggccaggaccttgaccgcaccagctgtagcccctgctgtttcagagcctgcaggctggggaggtggagtccttaaacaaattgtcacaaggatgatgagagtaggaagagagggtaggggatagactatgggaaaggggagctgggaatgtggcctggagagatcttcctgaagaagtcaggtgatgccagggggacccagagaattggacccagggaaggaaggctaccagaccaggcaggtagaggtaagagagccagcggccaggccccatcgccaggagggccctgcaggtccaggggaggattttggattttcccccaagacaccaggatgcttctgattagatccaggcccaggagaggggccaccttgtgggctgctatttgagggagccctggcaaggatgggagccaggaggcccttaggaaatagcacctctggaacctcactgtcacccagccatcactgtggaggttggctcagctcagtgccacctccttcagatgctgttgatgaaaatccttcttgtgcttgaatgttctgggcttcccattgccctccaaatgtatattataaacagggcccaagcctggcgcagtggctcatgcctgtaatcccaatactttgcaggaggccaaggtgggtcgattgctggagcccaggagt

SEQ ID NO: 90835 - DNA, 1049 bp, Homo sapiens
aggggtgggggcggggactccaccatgtaccttgcacgatcatagagcctactggaaggaagaacgtaaccattgcatgatttatttttgcgcttgccgtaggtaatacatatgttgttgcttttttgtttcttgagataataatgaattaaatattaacaccatgaatatgattaatagcatgtaattttttttcttttgctgttttttcccctgctcttctcttctcctgtttttgtgcttttcctgctttttctttgtccccttcacgtcccttccatctcttttcctttgcctgctcttccctgatttacccacaaccctaactttgcatattcaaagggggagatcctggtaagtacatgcttagtgtggtagcaaacattagagaatctagtggtgatggagaccccgcccacccctaatattccctgttccccatcccctccaaataacaaaaatactaaaaatcgagctaacctggaaaccccatgccgcagccggcgctggactgcacgttgccctgggtataagtcgactcacacaggcactaactggaccgccacccttgaaggcgcacttctgcagccagttcctggcaggttttcctggtttcctgtaggtcagggatggcaaatacttacacaccgcccctgcctcccctcacatccctggctgtggaagatctcgcttaagccagaccagaattcattcttggcactgcccctcctccttctatctcctatgcagatgtcactcatggatcagagcatatttttccacatggcagaaatcttgccctcttgtgcccatggcagacatggctagttgatctagcactctttgccttgtgccgctcctctagcacacgcccatggcagacattgctaagcaatcctagcattctttccaaataagcttgccagcactcctgttctatagcagatgtggctaagtgattaaggtattgtttttctccctatatgataccctcttctctatgcatggcaggcatgactagtcaatcaggagcctctttcctagatgct

SEQ ID NO: 90836 - DNA, 1880 bp, Homo sapiens
ggcctgggtgtgcagatagggccatgggtggggcagtgacgggaggaattagttggcctcgggcttgtggttttcaggttcctcatgtgttccccccagtccctttgaatttgccaggccaagaccaggaacctgcttctcccttgtaccccaagaggtttaggggttcctcttttcctaccagaggccacatagcccagccccgtcatgagcgtggccgtggcctctgggtctcccatctgtggttcccatctctacccgggagactcaggccaggaccctcacccaggaaagagactggagcagcctgccagaggatccctgctttgccgccccctgcctgccctgccacccataccgccccatgtgcctgcctgcctgtcactgtgcaccctagcccgcaacggcctgccgcctcttctgtctctcccacccctacttccttctaagcccagtcccattgggatgtgtcccttggatgcaaacctgactttctgctgaggcctggctgctccctttctctggctcacaagtggtggatggctaacgggcctttgtttgccacccacagcttgcagctccctagggtgggattttgtctctgaacccgtgtggagaagggcacctcagggcttctgccagacgtcctgccccaaggcttggtgtgccatccccagcatggccccgatcagtgccctggccctgtggccatgcaccccaaagtgtagcgtgggccctgtgctccagctctgaccaacactaaccccggctggaggcaggagagccaggccaccgaggggtgtgcgggcacatccctctccttagaaaccgggccaggcctaggagtatggaggcctcacatttctctgggggagcaccgacagcctgtctccctgttttccctcacctggttgtcattcagtcatggaaccagggtctactaagcactcgttctgtgcccagctctgggctgagacaaggcagtgcccccaccccgctccccccgggtgaatggaggcattcccagactgccagacctttggtgctaacaccaggacgtcctggacagaccaggaagagctcgtcactgcgttcccagaggggatgctgtgacctcacaggggctgctggcctcagccccctcacccaccaccaggcagcccgtgaatggccagatgccaggggtcactgcctgctccaaacaactgtgagagtcctgtctgctcatcccagggagggataagtctgtacccttggccttaacaaggggcgcccggtggcatctcatgctgtccccagcctgggcagtgacttctgcatggtccaggggtccctgggtactctttagccacctccgtcttcatggccacctggggcttagcactcacatccagccaccaaggagccgctggagctgtgggctggtggccctggttcagaatgtcaggcccggggtgggtcggggtagtccggatgaagcccctccagaggaccgcccccgactaggacagcatctgggccccagagggattcctggaggccccatctctggcgctcctgccgtgccgtgccctgccatgccctgcactgggggatgcaggccagcccttcgcagctgtccatggccatgctcagcccaccctttgtagcttggccaagtctgtcagtgcctgggtcccaggccgccctgtgcgtgcctccgtgtgcttcctgcagctcccagggccctcgtcctgagtggggtggggggctctgcccacacatgcctccagcggccagggagcatgggagcacagcccccaggctgcctgccgttagttgtcaggtgagtccctgcgcaggcctgggttctgacccccacgcagatgacagctacagcc

SEQ ID NO: 90837 - DNA, 1008 bp, Homo sapiens
gacatcagcaccagcactgtgtccacgcctgtacccccgcctgtcgatgacacctggctccagagcgccagcagccacaggtccggaagcctggttcccctaccctcaagcattcggcctgcaggttcctgccctccctgtgtgtcctgcagggtcctggcaggaaacaggacacagcccaagggtggcacccagggctgggcactgtgggagctgctgccctgctgaggccggaggagggagagaaggggtatgggggcgagccagccctacagctctagggcaggaccctgtgaataaataccccgcctgccctctgctggtgccttccattggcacagcccaaatggaagctggggtaagaggctggaggggcagcagccacaggagagagatgagcctcctggagcacagagaagggcagatgggaggctctggaggggcaaacgcaaggcgtggccagagctgctgccgcccctgagttgtccattgaggccgtcgggcagggaacctcagagggggctgccttgcagagccctgggggagccatggagttccttaaggggaggatatcgcacccaggcctgcaggtggcagggactgaggcccaggagggaatctggatgtctggacagggcttgcaggttccacggcccctagagatattagggcttgatctggaggactctggaagtgtctttggctgtgagggtggatcccaggcccaaggcctgagggggccctgtgagtgggaagtgcctgagggggccgagggcaagggaaggtgggactggcgctcaggttggggtgggaggatcccactgcgcctgcgctgtccccatagccagcccccacctcaggttctggcagccacagtggcatggcgggggctcctactccatctgtatctgtagctcacaccctctccttcctcacagccccactccacagcgccgaccggtgtccagcatacacccccctggccggcccccagcagtgaggggcccc

SEQ ID NO: 90838 - DNA, 1045 bp, Homo sapiens
ggtgactccggggctcccagcttgccctctgcctactggggtgtgccaccaggcagctggggaaccctcacactgggcacctcctcccactgtttaccttcttctccttcctgctcctgcctgcctcaacctaccgtgggccaggctttattctccccacttctccggtggggaagctgaggcccagggagggcagggggctcactgagggtcaaacagcaggcgagttgatgcctaggtttggcactcctgcccgacaccctggtggcttgcggaggtcagcctgggaacaccctggggtggtgtgtgggtgggggctgggtcctcaacccaggcctgcctcttgctcccggcctcactgccgtctccccctccccacctgtctttattctctttgcagcagaagaccccctgctgcgcccagccggcccaccattatccgcccagccgagccatccctgctcgactaggcctcgaggggggcgtgctctcgggggggcctcacgcacccgcggcgcaggagcttcagtggtctggggccctccgccgcccctatgctgggaccaggctcccagtgggcagccctggcctcttccttaacgctggccccggtccagggccggcccctgtgcctggctggacaccgcactgcgcaaaggggccctggagctccaggcagggggcgctggggtgttgcactttgggggatggagtctcagggtggcagaggggggaccagaacccttgacaccatcctgaatgaggggtccagcctgggggggactctaccaaggtcttcttgggctgggaaagcccatgtagggcaggccttctataagtgcgggcaccaagggcgcctacatccccaggccttgctggggtgcaggggtatatcaacttcccattagcaggagctccccagcggcaagcctggcccagtgggctcggtagtgcccagctggcaggcctgaggtgtacatagtccttcccggccatattaaccacacagcctgagcctggcccagcctcggctgccagaggtgcc

SEQ ID NO: 90839 - DNA, 1180 bp, Homo sapiens
gtaatcttgcttcagcctcctgagtagctgggattgcagttgcacatcaccacccctggctaattttttgtagagatggggttttgccatgtagcccaggctggtctcaaactcctgggctcaagcgatcctcccacctcagccttccaaagtgctaggattataggcatgagccaccatgctcatccttgtacatttatttaggcattaaatgttcacagcaatttggaagcttatagaagaggaaacaggctcagataggttaattaagttgctcatggtcacagccagtgagtggcagggtgaggatttgaacttagcctgaacaagtctgtgtttgcagctgtacctcccagggttaatacagcctccctccgtatcccccggtttttttggtctctgctccctgatgggtggagggaggcctgacccttcccctcccgctgccctgtaggagtccattgagaccatgcggacccggctggagcgcagcatccagatgctcacgctactgcgggccttcgaggcacgtgaccgcaacctgcaagagggcaacttggagcgggtcaacttctggtcagctgtcaacgtggcggtgctgctgctggtggctgtgctgcaggtctgcacgctcaagcgcttcttccaggacaagcgcccggtgcccacgtagcccctgccatggaaggaagaacgggacaaaggaggggcagcagggtgtgtgcatatgagacttgggggtccctccccaattttagtttcctgccaaaacgggagtgtgcagtcagggcctgcggtctggccccatgagtctccttccgtcctcagcgggcagggaacacctctggcttgtagaagggacggctcagtggctgcaccgacggtcctggaaatctcacatggtgggcactgcagcgttggaacgtgagcctcggatttcctggcccctctactgtaaatgtgccttagcctaagcctcccatcctgtgttagcgttgcctggtgcggggcagggcctaacaaggaaacctgggccctccaagccaggttgaggtctggtaacagaatgccaggaagggggcctggaagaccacctgccccggcccctctcctgcaggggccccacacaggcatgagggatggcccggccaaagtctaggcagaagcctcctataacaaa

SEQ ID NO: 90840 - DNA, 1050 bp, Homo sapiens
gagcggaaggggagggagtaatgaagcaggcggggctagagtaagagatccagagggggcggggccatcgataagtatagggagcctctgagaggacaggactctggctggtgggcgtggcgatagtgctgataggtcaactgcgggggcgttgcccacacaggcctttctcgggggttagactaaggaaaaaggctgggcctatcctctttcggaggcggagccaaccaggggcgtggtcaggtaaacgtccattaagtacttttggtaggtgcgtggtcagctgaaagtatggaccccaagctgtcatatcaatgagggtggaggcaaggggcgcagccactgggacaggttggggcgggtgtgggtgtgccgccgttcaggtaagcccttggtggtctgtattgatcagtgttggttcagccgtagccctcttcggcaggcgcccttggcctaccgctagccctccacccgctcttacctgccccccaggtgatcggaggtgctggactggacgtggacttcacgctggagagccctcagggcgtgctgttggtcagcgagtcccgcaaggctgatggggtacacacgtgagttcagtcttgatgcctgcctgggttcagttacagccctgcccttcccaggcggcctcaggttaccgccctgactgccccgctgagtcggctggctggccaccctgggtcatgtctgtgtgtctgtctgcccagggtggagccaacggaggccggggactacaagctgtgctttgacaactccttcagcaccatctccgagaagctggtgttctttgaactgatctttgacagcctccaggatgacgaggaggtcgaaggatgggcagaggctgtggagcccgaggagatgctggatgttaaaatggaggacatcaaggtgtgtccaggctgcgctggggccactccttccagatctctaggattcacctggggtgccccccttgggctgacccagcctcccctccgtagttgtgccctccaactgaattatagtaagagtagcagctcttaaaat

SEQ ID NO: 90841 - DNA, 1047 bp, Homo sapiens
accgcttggccacgccccctctccctgactctgctggccgcccagcccgcgaccctctacctggtattcggtctcgaggcttgcgttggccggcgcggactggtagaaacactgcttcctccccgccggcaacaggaacgtgaactcaccgtcctggattggcgggggccccgcccctcccacctccactggtggcattagtagccacaaggccagggctagggccgcgccggccgccatcatccgggtcaccctctggtctgcaaaggggtcgcggctcctttaagcgctagccctgccccggtgctactcggcggagctcattggcagtggcttctgtatgttgtccgtaaccagaggtgccaggagtgaaggacccccccactagagggcaggcggcccgaatgaatgcctgatgtgcccagaaacactcaaccgtctgggaatatttttctcaaaggcttcggctctcttctcggccgctggtggaggaaaattacaaaaataagtgccatgatggcgcatcttttgtaggcagtagctaagacaactaaagttacaggcggcagggtcctttttagtcacctccacgtggttttcccagagtgcgccgcgcgtgacaacctttggcgggaccgacgtggtggagtggacccaaaaatagcgtctaggcgtggccctgtacgcgacccgtagggctcgcctataaaagggctggggcggggcggagatacctgtggcgtcgtgttttgcttgctctgtgagcgtggtccaggttcgacgccttttgcgccttagaggcatcagcgtatcagtttcctcgtaagtcgggagtgatggaacgaccaccctgtagtgcggctgtgagaattgagatgaggcttggttcatattgagtgctcagctttcctggcttatagacagtggaggggcgtggccccaccatgcaccccaagggtctcagactcaagggccagcaggtaaatagagccattacagtagcctcgggtcagaaaaacgacagcccaggtaggaagagataaggac

SEQ ID NO: 90842 - DNA, 1079 bp, Homo sapiens
ggcgcggggtcggcggtcccgggcggcgcggggccctgcgctaccgtgtcggtgttccccggcgcccgcctcctcaccatcggcgacgcgaacggcgagatccagcggcacgcggagcagcaggcgctgcgcctcgaggtgcgcgccggcccggactcggcgggcatcgccctctacagccgtgagtacggggccccggggcaggcgcagggccggggctgctcacgaggccggcccggggcgggggccggcggggaggggccctgagcgcgggggcctggcgtggggtccccgggactgagccggtggcctgcagggagcgaccgtggagggccggtgccaggggacagacagagaaaagagggcgtgcgtggtggccggaggggcaaggtgcccagagtgagcaagggagcgcgaaatggggagtgaagggcctgagatttgggaggggtgggtgagcaggaagtggggggctctgagtggaaggggaatttggaggacgccaggcgtggtgggcttaagcgtgggggagggaggtccggggtgcgggagaggtgggcgtctcgggggcgggcgtggccgcctctgcagggaggagggtggggcgtgggcggcccgggatccctctggggaccccctggatagctcaggacggttggaaagtgtttgctggtctggggcgcccgcgagtaccgagttccaccgctgtgcgaggtgtggcgttcaggacccccgaatgggaaacttcaggatctggggagagggcccatgcggggacggtgggagccgcagggtgagctcctcgtggaaacgtggacgggacgggccccttcctgatgccgggcttcgaagtaagagctaacagcctcctcccatcttcttttgggggatgtgagaagctggttacattttccgaagctgctttcaaaactgacatttcactggggggaaaagaaaatcacaaatgcgtttgccagcaccccccacccccgctcccagtctttgtagttcattcttcttcttgttactccttcttatctcttctctttgattccttgttcacattttgctactctgtg

SEQ ID NO: 90843 - DNA, 1051 bp, Homo sapiens
cctcccacagtcctggaattacaggcatgagccaccgcaccgccctctttatccttaagtaacattgatatggagataaaaaacatgggttcttggccaggcgtggtggctcacacctgtaatcccagcactttgagaggttgaggcaggcgaatcacttgaggtcaggaggttgagaccagcttggccaacatggcaaaatctcgtctctgctaaaaatgcaaaaattagccaggtgtggtggtacctgcgactgtagtcccagctactccggaggatgaggtgggaggatcgcttgaaccagggaagcagaggttacagtgagctgagattgcaccactgcatgtcagcctgggtgacagagcaagaccctgtctgaaaaaaaaaaaaaaagcatgggttctggagttggaggtgatcagtgctgggtgtattaatttcccatggctgcaataacaaattatgacagatttttggtttaagacaacaggaatggattctctctcagttcatggtcagaagtctgaaatcatggtactggcagggccacaatccctggagaggttctacaggaaaatccttgcatcttccagattgcagtggatccagctgttgcttgatttgcagcagcgaaacccaagtccctgcgtctgtcttcactcctgtgtcttgtgtcctcttttttccttttttttttaaagtgagatggagtctcgccgtgttataggctggtctcgaactcctaggctcaagtgatcctcccacctcagctgttcttttcttttctttttttttttgagacggagtctggctctgtcacccaggctgaagtgcaattgcgcgatctccgcttactgcaagctctgcctcctgggttcaggccattctcctgcctcagcctcccgggtagctgggactacaggcgcccgccaccacgcccggctaattctttgtatttttagtagagacggggtttcaccgtgttagccaggatggtctccatctcctgacctcgtgatctgcccaccttggcctcccaaagtgctgggat

SEQ ID NO: 90844 - DNA, 1058 bp, Homo sapiens
aggtgcgagccaccgcacccagcctgtgttttattatttatttattttgagatggaatctcgctctgttgcccaggctggaatgcagtggcgcaatctcggctcactgcaacctctgcctcccaggttcaagcgattctcctgtctcagcctcccgagtagctgggattacaggcacatgccgccatgcccagctaattttttgtattttagtagctcactgcagcctctaactcctgggctcaagtgatcctctggcctcatcctcccaagtagctgggactacaagcacatgtcaccacccttggctaatttaagcaatttttttagagacagagtcttgctgtgtttcccaggctggccccaaacccctggcctcaaaccatcctcctcctgcctgagcctcagaagtagctgggattatagtcacgaaccgctgggcccggtgtggcctatttttgtacagacaaagctaagaaaggcttttacagtttttgagagattgattagggaaaaaaactaaaacccaatccacaaacaacaataatcagttgagaccacagtgtcctgcaaaacctgaaatatttactcactggcccgaggcaggggaagcttgtagacccctgggataaatgaatgaggcaggcaggagttggggtctgtggggagtttggccccagccaaaagagaaaccaaaaaatcctcaggccgaatagagcatacttctgaattgtgtgagccccttgtgccaattgtggcgcttactgtatgttaccacttactctgaaaagagttctgtgaggtcagagataccaaccccaatttactggtggaaaaacagaaatgaaagaacttgactggccaaagtgatgtggttggcaggcagcagagatggctttggcattctgggtgactggatgcccaccttaaatgcatatataagtggttcagtgacatttatctgttcatcacaaagacccaaagtagcagaggcttaattaaacacgatggcattttattttttgtgctctaatgctaaagtgtgaagattgtcaggtg

SEQ ID NO: 90845 - DNA, 1043 bp, Homo sapiens
tgagccatcatgcctggccgcttatttattttaattgttgtttagtcagtacacacacatgcccaggccttagttctgtttgatgcttttgacaattatggacacccatgtcaccaccacccaaagccagacatggaacttgttcccctctgggtaggtttgttcagtgggacagcccctctttccctgtctgttcctctcatcatttgtcccctgctgccaggcggggcattcttgtaaacaggtccagactgggtttggggggctctgtgcccccccacccctgccaggagaacccccttttattcttcctttttgtctgtctctttaaagcgattcattagccttggcaggcgtgggtctgagctgttttcctttatgtcgttggcaggtctttctcccgctaattgtgttctcggagctggggttcatttttgccggatgtgttacacatgtgcaagcgtagtggttttatgtatagaaaacctgcccagcggtgtgggcatgggtgctactcctggcgaggactgcagaaaggcccctggccaatcagtgctctcgtgaaagagggatgctcttgttaaccatcccgggcagggggcatgtgaataaataatcaaagactggggtgcctcttgcagactgagggagggacattccagagaatttgctgcattcttccttgaacaggacgggaaggcgaagataggctggagcttccagatttccatcctgtgcccttgagggaccctctgcaggagcctggctctgcctttgagccctggagcccctagatgcaggatgatgggatgcctggctcttactcccgctcacacactccaagtctcgctatcaggacagccccccacagggagccacagcagccacagctcactccctcattttttttttttttttttttttttttgagacagggagtgcagcggtgtgaacacagctcattgcaacctcaacctcccaggttcagttcatgctcctgcctcagcctcccgagtagctgggacggcaggtggccccacacc

SEQ ID NO: 90846 - DNA, 1110 bp, Homo sapiens
cccaagcagtgtgtgaagctgattctctgtcagccacgtgccagatgggttgggtcccaggggtggccacctgggggacagggccagacacttgttctgggcccaatatggccttgtgtccagaactctctcggtggctccttctctcgaccctttgccttgagccggagcactgtggggacacaggaaccaagactggtgttttgtgccaatgccacactactgtgtgcccgtgggtcttgggccgggcatgggtgggttcgtcctcatggctacacagtgaaccatgtgttattttatttttctagacactaaagctgaggtgtcgggaggtgatggtcccttgcttgcaggtggcagagctcaggttcaaacctggatcttactgcacctggctcgtttgggaggcctcccttgctggaatgcaggtcagggagccccgatgcccttgggctgactgccccacgtccatcacacccactgagggccgtggggtgggtgcagggcttgttctgggagattccaagctgaggaaagcagggctgtccgccagcctccagctgggtcacagaagaggctcagggcctgttcccactcccctcccccagccagcagggtccaaaaggatgttgggggggtggtccccagtccggcctgcccactctagggaggggcccagataacttgcgtagacgccggccctcccgcccccagccttcgccattgccttttgtctggctatctttcatgtacaagggagaaattcaagccactcaggagggtgtaacatgaaaagtcagtctctccttctctccgcactgcccgtgacctgtggtttctcaggcacatacaagcgcgcacgcataaatctctcctccaacctgctgggcttcaagttatgcacgttcacacaatggcaaaggagggtgcggattgaaaagtatgacttgcttcccggaggcagcactgaagtcactttattgtgtttccagacaagccccatgaatgcagtgtgcactgcccctcctccctctgtcccttccccgcccatctgtacacctgtggtgcgtaggttttacaccactctgtgccttacgttgtggctcgatc

SEQ ID NO: 90847 - DNA, 1097 bp, Homo sapiens
ttagccaggcgtggtggtgggtgcctgtagtcccagctactcgggaggctgaggtgggagaatcgctagaacccgggaggcagaggttgcagtgagccgagatggcgccactaccacctccagcctgggcaacagagtgagaatctgtctcaaagaaaaaaaaaatagttttttttttttggtatttttagtagagacagggtttctccatgttggtcaggctagtctcccaacttatgaggtcaagcagtccgcctgcctcggcctcccaaagtgctgggattacaggcatgaggcaccgtgcccggcccacagtgagctcttaacaggctatggccaatcgcagccatggttggggcgccagcgaagcaggcagaggggcacccaatgcccatgtgtggatggaggctgtcccttgagagcaggtctagggagggccccatggcaggaagacgcagggaagcccacatggccctgcccgcctgcaggtcttggtgaagagtaacaacctgacggaccgcatcgtggtcatcccgggcaaggtggaggaggtgtcactccccgagcaggtggacatcatcatctcggagcccatgggctacatgctcttcaacgagcgcatgctggagagctacctccacgccaagaagtacctgaagcccagcggtgagcactggggggtacacaggccaggcccctcggtggaggccctggctgccgctgagccaggccatcagtgcttcagctccctgcttactgtcggtggcccggggtgtagggaagcctgggcttttcccccgctcccaccccaaccccactccagccagctgtggcttttggagccctgggccccaaacacggccagacacccagctgcccactcgcccagacagggtacacaggatctcctggcacctctgccgtcccatgtcctgctcctgcgggacagcctctggctgggagtggggattgggacaggttctgtggtcagcagttccccaacaagccctgctctcctcacagtccaggaggtggggtgggcgagcatgtgtgcaaatgcaggggtgtgggtgcgagtgtacgtgtgtgaggaggtg

SEQ ID NO: 90848 - DNA, 1053 bp, Homo sapiens
cttgcttttttggttaacttgcttaatgatttagcttggagatctttcctcatctgttcataaagagcctcttcattctttctcacgtccgcatggtctttgatgggagagccatcactggtttaattagatggtttccagtgtgtcgctaccacggacaatctaattatacatgtaagtttgttgatgtgttcatgtatctggaggttaaactcctgtagtgccaaatcttttatgtggataaacacttgtcatttggagagctgtcacctgattgccctcggtggcgttgtgccggtcccctcctcacggcgtgtctgggaagagcaagctcgttttagctgcacagcctagaagccgtgggcagacctgggggaaggggcagggctctcccctcccatgctggccctggcgtcagatgccacgtcacacctgtggtctctcccaggacacatttgacatccggatcctgatggccaagtctgtcaagtacacggtgaacttcttagaagccaaagaaggagatttgcacaggtactggcacccacactccatcctcccaggcctggctcaggccgaaggtcagggccacccctggctcccgccggcatcctgccgtcccagggcagatggtgggcgggggccccaggcctctgcacctggcaccccctcttctctctcggcagcgcctgtctggcttccccagcagccactgccctttgccttccaggatagaaatcccattcaaattccacatgctgcattcagggctggtccacggcctggctttctggtttgacgttgctttcatcggctccatgtgagtgccgcagagcagcccatgctgcctcctccccactcccagggcttcctgcagctgcaacctggctgggggggtggaacatggctccaggttccaccatcccttccaatgggagtgagagcctgtctcggagcaagagactgttgtgggtggggtgtgtgtgtgtgtgtgtgtatgtgtgtgtgtgtcctgtgttcccagtgtctgtccctcatgggtctgtgtctgtc

SEQ ID NO: 90849 - DNA, 1044 bp, Homo sapiens
ccgcaaccacgagatccctactcaccctgacatgtgccaagagacagacacagacccatgagggacagacactgggaacacaggacacacacacacatacacacacacacacacacaccccacccacaacagtctcttgctccgagacaggctctcactcccattggaagggatggtggaacctggagccatgttccacccccccagccaggttgcagctgcaggaagccctgggagtggggaggaggcagcatgggctgctctgcggcactcacatggagccgatgaaagcaacgtcaaaccagaaagccaggccgtggaccagccctgaatgcagcatgtggaatttgaatgggatttctatcctggaaggcaaagggcagtggctgctggggaagccagacaggcgctgccgagagagaagagggggtgccaggtgcagaggcctggggcccccgcccaccatctgccctgggacggcaggatgccggcgggagccaggggtggccctgaccttcggcctgagccaggcctgggaggatggagtgtgggtgccagtacctgtgcaaatctccttctttggcttctaagaagttcaccgtgtacttgacagacttggccatcaggatccggatgtcaaatgtgtcctgggagagaccacaggtgtgacgtggcatctgacgccagggccagcatgggaggggagagccctgccccttcccccaggtctgcccacggcttctaggctgtgcagctaaaacgagcttgctcttcccagacacgccgtgaggaggggaccggcacaacgccaccgagggcaatcaggtgacagctctccaaatgacaagtgtttatccacataaaagatttggcactacaggagtttaacctccagatacatgaacacatcaacaaacttacatgtataattagattgtccgtggtagcgacacactggaaaccatctaattaaaccagtgatggctctcccatcaaagaccatgcggacgtgagaaagaatgaagaggctctttatgaacagat

SEQ ID NO: 90850 - DNA, 1044 bp, Homo sapiens
cgggcacaacgccctcacccccacccggctcccactacacatctccctcggaaaacatgtggaacacgggcagcacctacaacctcagcagcgggatggccgtggcaggtgagcagggcccaccccaatgcccagccaacccgggaggccgccctcgccgcaggcctggcccctctgcctccagccctgacgtctccctctctggacacagggatgccgaccgcctatgacttgagcagtgttattgccagtggctccagcgtgggccacaacaacctgattcctttaggtgagtgtcccccagggccaggggcagcagggagccatgcccaggactgcccaggggccgggaagggcctgtggtgaccagggtcggcctctgcttggtcctttcaccttttcctcttcctgggggctctcggccgaggctctccgtcctctctgcctcgctctgcagcctgctgctgtgcatgggctgggtggctgggggcggtgacgccgtctcccttccttctttcctccctctcgctgcgcagccaacacggggattgtcaatcacacccactcccggatgggctccataatgagcacggggattgtccaaggtaacgagggtggcgggggcagggcccgtgggggccgagctagcgtgtgagtcgccatcctctgtccggccgcccgcctgccctcttgcctgccctttctctctctctgtgactctgcctgggggctgggcgggccagggcagcccctcactgccattgcctgctccacagggtcctccggcgcccagggcagtggtggtggcagcacgagtgcccactatgcagtcaacagccagttcaccatgggcggccccgccatctccatggcgtcgcccatgtccatcccgaccaacaccatgcactacgggagctaggggcccgccccgcggactgacagcaccaggaaaccaaatgatgtccctgcccgccgcccccgccgggcggctttcccccttgtactggagaagctcgaacacccggtcacagctctctttgctat

SEQ ID NO: 90851 - DNA, 1395 bp, Homo sapiens
cccagacgatgactgaaggctcctttgacaccttgagatgattctgctactttccagacttttcttacaaagcaaacacttttattttctatgcaaaggtgattcagagaatttatataaaggcgggcgaggggcagccgagcagggagctttgggacagggctggggcccccatatcccccccgggccacctgctttccctcctatggctcccctggaacaggagggagagccaagggggcggcccagcctggacagcgcccgctcctgcctgggtgcacacacggcgggcctgagctccagcatctgagtttgggggtatgagaaacaggggagcagaaggagaagaaaactgcctgtgctgcaacacgtttcctcatttattttttctttctttttctttttttctttttttggagggagaggtccctgcaaggtcccttcccgggcaggggagggatggaaatgccgtcacagtagtagggactggagcgtctacaaggatggaggggagctactcaggcctaacgttagctacaaggaaaaaggacgccttccgtgacagatccttgaggtgtctgtgtctgccccaagtggccggcagtggccttccctccgggcccaaggcctgcagccacctgctctaactcttgagtgggggggcggggggggacctgcaggggctcggggacaggacagcagcaagaggcaggggccgaggacggaggccttcccgacagtggggtgggttgtacattcaagtgtgaggtgaaccctttggtggggagggggcccctgaagcctcggcggggccacccctccccgcggcgcctctgagtctagggagaggggctgctggctcggcccggccggcctggcttcacagagggtctgcggattgacactggttcttttcataaaaaaataaaattaaaaaaagcagcatgtcacgtccgttgtgaccgaggcctggtcgtcgaaggggaggccccgcctggccaggctaccttcccactggagacaggcagggggacaggtgctaagggacctggcaggcagggctggcaggccccatggcgcctgttccagcagatgacaagcccaggtcagggtagagcgggcaggaggggggacgagggctcccacaacatgattttgtgtaaaatatggcagcgacacacgctcagggccgggaggtgggggttagggtggggacggcggcaacatcgtgtaaaaaagtgtcccagttcccatagcaaagagagctgtgaccgggtgttcgagcttctccagtacaagggggaaagccgcccggcgggggcggcgggcagggacatcatttggtttcctggtgctgtcagtccgcggggcgggcccctagctcccgtagtgcat

SEQ ID NO: 90852 - DNA, 1048 bp, Homo sapiens
cacagggatgagccacaggacctgggagcaacacggcggcaggtgaccatgccagtccccccagccaccacccactctgcaccaggccaccctcaccaccatgggaatgaggcggcaggtgaccatgccagtgtccccacacagccaccacccactccgcgccaggccacactcaccaccatggggatgaagacaaagagggagtagccgtagatgcacacagtctccaggaaggtgtagggccccatgcgctcctggacacccttgcgccaccgcaggaagccccacagggccaggggcaccagccacgcatagcagtagatgctgatgcctgccacggtcactggggggggcaaggtgagcagtcaccccctgtaccccagggccctgccaggcattgggcctgcccgtctgcttacccttgtggaactgggggctgtagtggatggaggggtccctcctctgggccagcaccagcgtcaggttgccagtgacggccaggacaaaggccaacgtggcacagatccagaaggggcctgggggtagggggcacagtcagggtcccgggccctgcactcccaggacaagcagacatgtatcctgactgagctgtgctgagaccccagcctcttcctaagcaccttgcctgactcaccaggacaccgggggcctcctggtggctgagcccagtgctggctgtcagttcatccccctccccgaaacactcaggactgcacacccttggcctgtgtctcacctcattggtgccaattcctcaacccctgtcacctcctctttgactctctgaccccttcagccatggggagcagccaggcccagttcttggccccttccatgtctgcgttcacccatagtatgacctccttcaagcccagggccttatgcctcctctagagcccagggctctgccctgagcactgcaggctccagttcaagctcccgggtgggcatctccggcttcatccacacccttgccctctgccctcactgccaagctggtcccgtggatacgtggcaactctatcca

SEQ ID NO: 90853 - DNA, 1238 bp, Homo sapiens
ccccacctatctagccacaaagccagtctcttctacttccccagcacgttccagaatccagtgccactctccacatccacagtccccaccatgtggccgcctccaccccagcctcctggcttccgccctcgccactcatgatggcgagagggaccccgaaaacacttaaagatccattctcggccagataacagtgactcacacctgtaattccagcacttaggaggccgaggcgggtggatcacctgaggtcaggagtttgagaccagcctggctaacacggtgaaactccgtccctaataaaaatataaaaatcagccgggcatggtggcacgtgcctgtaatcccagccactcaggaggctgaagcaggagaatcgcttgaatgcgggaggggaagattgcagtgagctgagatcacatcactgcactccagcctgggtgacagagtgagactctgtctcaaaaaaaaaaaaaaaagatctcttcttgccacagcatgggaggcttgtgtgatctgtcccctcgcctgtgacctccctgcagctcactcgctccagtggtaatgccgccctgcagttcatgcaagttcctgccatgaagcttacgtcgtttctggaagcctcttttcctaggtctcccccacccctcctgttgccaacaaggctcattccctcaccctcctcagggaggcctgccctgctgcaccctgcagaactgcagggccactcctcctgtctgctctgctgctctctacccgccaccctctgcagtccttcatgtctctgtctccctgaacagcaggtaagtcacactgtctgagtgactgatttgtccgcagctatacactggcatctgcaactcaggccacacttgttgagtgatccatcaaggaaccaaatgcacaacctcactcaccatacagatccggccgattccgcagatggtgccgcacaaagttgtggccaggccggggcagcagtgagcctttgatccggtccaggacctgggggcaaggccaaggtcaaggatggaagtctgccaggagcttctcccttgtcctgagaggctccttccctgctgacctccacccttctctttccatgccccacctgaaagaactcagcctttccctctctttttttttttttttttttttgagacagagtcttgctctgtcggccaggctggatggagtagtggcatgatctcggctcactgcaacctctgcctcccgag

SEQ ID NO: 90854 - DNA, 2237 bp, Homo sapiens
ctgggattacaggcatgagccaccccgcacccggcagtttttgtatttttggtagagacggggtttccccatgttagccaggctggtcttgaactcctcaggttatctgcccacctcggcccccttaagtgctgggattacaggcaggagccactgcgcccagtccatctttggtcttctgcatatgctgttccctgtgcctggaacatatactcctgcttccctaccctattccccagggaagccttctgtctcctttaggtctcagccaattcctcacctcccccaggaggcctttctctaacccaccagattgtgtgtgtcccctgtgttcccatagtcccgatccataaccagtcccaccataaccctttgagagcaccacagttcgttcaccagcacccaccatcaccagcaccctgcccaggggaagagtggctgaaccctgagcataactctgagccccatcccacctgcctccccagcctgacctgtgaggtgtccacgtcaaagaagctctgatagtagctgaaggtccagaatcccggctgctgctgctgctgctgctcctgcaggagctgcacattgcgggcattcagtgcctgcccggagagcctgggtcagctgggggctgcaaggaggcaggacacagggactcaccgcggccttgtcactctcctcctccacctcatcctcggctccatagctgccacctgagcccacggccacagccacgtgcccttgtggggtcagctgatcgcttctgctggtggtggctgcatctggggtgtcagccagaagattagtggcctcctcgaattctgtggaggaggtatatgggacacacgcacgtttgaggggtggaaagaactcgactgggcccaagctaaaccgatgctcatctgggggcggaggctctgctgagccattgatctcccccaaggtggggcccaacttcctcagtttggaggcatccggaggacatctgttcccttcctcctaaagtggaactgcaacttagggttgacgctgggatggggtcagggtctggggacgagaggctcgggtttgaggtctgagttcagggcgggggcggggttcgagtcagagatgggtctcactcctgggtcagggttcacagccgcctaggcttcggggtagagaaattggaagccgtatcggggggaggttctggcccggggcgggagtgggagatccggccacgtcggggccgcactcaccatggaaggtcagctcgtcggccgatgccatggtcgttcaggggcgtctccgcatccctcgctgaggacagagaccggtcaggcacacttcccccccgcccccgagccggtccctcggcccccagccctacctggcgaccaactgcacccacggaggcttgaactcgtcgtcccgtccccacaggtgcgctccgccccccctcacctgaggccacctgggccggcgtggctggggctctctgcgcctgcgcgtctcgcctacccgtcagactccaaccgactcagacctgacagcaacatccggcgcctgtcctctttctatcctctcccgttgggaagccacttccggtaaagttggcgcttgcgcagaagagactcccgggctcttaacgtcgggtatcaggagtttcttcccggagcaaggacccccaagacggaagaggatggccgcggcggctctgaggagattttggtcccggcgccgcgcagaggcgggcgacgcggtagtggcgaagccgggagtgtgggcgcggctgggtgagtagcggcggaaggcggcagggtgggtggccgccgcgacagggtgggtggccgccgcggccggatcactcttaccgcgctcctctcccctcagggtcctgggcccgcgcgctgctccgggactacgccgaggcctgcagggacgcttcggcggaggctagggcccggccggggcgcgccgctgtgtatgtgggtctgctgggcggcgcggcggcctgcttcacgctggcgcccagcgagggtgccttcgaggaggcgctgctggaggcgtcggggaccctcctgctgctggcgccggccacccgcaaccgcgagtccgaagccttcgtgcagaggctgctctggctgcggggccgtggccgcctgcgctacgtcaacctggggctctgctcgctggtgtacgaggcgcccttcgacgcccaggccagcctctaccaggcgcgttgccgctacctg

SEQ ID NO: 90855 - DNA, 1042 bp, Homo sapiens
ggagcgcggtaagagtgatccggccgcggcggccacccaccctgtcgcggcggccacccaccctgccgccttccgccgctactcacccagccgcgcccacactcccggcttcgccactaccgcgtcgcccgcctctgcgcggcgccgggaccaaaatctcctcagagccgccgcggccatcctcttccgtcttgggggtccttgctccgggaagaaactcctgatacccgacgttaagagcccgggagtctcttctgcgcaagcgccaactttaccggaagtggcttcccaacgggagaggatagaaagaggacaggcgccggatgttgctgtcaggtctgagtcggttggagtctgacgggtaggcgagacgcgcaggcgcagagagccccagccacgccggcccaggtggcctcaggtgagggggggcggagcgcacctgtggggacgggacgacgagttcaagcctccgtgggtgcagttggtcgccaggtagggctgggggccgagggaccggctcgggggcgggggggaagtgtgcctgaccggtctctgtcctcagcgagggatgcggagacgcccctgaacgaccatggcatcggccgacgagctgaccttccatggtgagtgcggccccgacgtggccggatctcccactcccgccccgggccagaacctccccccgatacggcttccaatttctctaccccgaagcctaggcggctgtgaaccctgacccaggagtgagacccatctctgactcgaaccccgcccccgccctgaactcagacctcaaacccgagcctctcgtccccagaccctgaccccatcccagcgtcaaccctaagttgcagttccactttaggaggaagggaacagatgtcctccggatgcctccaaactgaggaagttgggccccaccttgggggagatcaatggctcagcagagcctccgcccccagatgagcatcggtttagcttgggcccagtcgagttctttccacccctcaaacgtgcgtgtgtcccatatacctcctccaca

SEQ ID NO: 90856 - DNA, 1053 bp, Homo sapiens
gtatggtacacacctgtactaccaactattcaggaggctgaggtggaagaattgcttgagcttgggaggttgaggctgcagtgagccaagactgcatcactgcactccagcctaggtgacagagcaagccccgtctcaaaaaattaataaggctggatgcggtggctcacgcatgtgatcccagcactttgggaggctgaggtgggtggatcacaaggtcaagagctcaagaccatcctggccaacatggtgaaaccccgtctaacaaaaattagctgggcgtggtggcgcacgcctgtaatcccagctacttgggagactgaggcaggagaatcacttgaacccgggaggtggaggttgcagtgagccgagatcacgccactgcgttccagtctgggcaacagagtgagactccgtcacacaaaaaaaaaaaaagagaaaaaataaataacataaaactgaagtattaagggagtgatgctacctcaggggcctgtggcaagttaataaaaccaggtggtaaaacaactatctttgtttgtgatacttgtttttgtgtgtttgctactttcaaattttggcatttgacccttgcattcataatcagtgggttgaacaggtgttggtttaagtcagcatctcacttttacagaggaaaagctgaggttcagaaaatttatttttccaaggctgtggcaggaccaagattcgaactgtaactcccagctctgtgacttaatcctcaaacttgtggactttgatcctaataattcttgtcagaaatagttaaatactgctatcagttgccataaataaaaattggatatagaaatacatatataaagccgggcgtggtggctcacgcctgtaatcccagcactttgggaggccgaggcgggcagatcacaaggtcagaagatcgagaccatcctggctaacacagtgaaaccccgtctctactaaaaatatttaaaaaattagccgggcgtggtggcaggtgcctgtagtcccagctactcgggaggctgaggcaggagaatggcgtgaacccgg

SEQ ID NO: 90857 - DNA, 1062 bp, Homo sapiens
gggccggggtacggcggcgcccgagggtcaagaagcccagccggcagccgcgcgcgtggggaaggccacagtgtcgcgaggccgtggcagcggcggcccccgcggagcggcggggtgggtggggggcccgggccgcgtggaggccgcgcgatcctctccgcgcgcgctctcgccggggtcgccggacaaagctcgcccccctcgcccggcacccctacagtcgccctcccaattacagcggctgcaacaataggcaggcgttggggcttttctggctgcgtggtaacgggtccgacccgaatgttgcgtttttggcgaagctgcgatcggggctcagccaaacctccagatatgtccggcgtcggccggacacgggcattagcggtccccttgggctagccgacctcaaattgtcttaaaaacgtgtcattccagattttcaaggaaaggtaaaggactcccccgatgccttgcagttagtgacttcaaaatgtttgcccgaattggggttggggatggggtcggcggcaagtaggggagcacggaggaaatcctttgctgtgtaaaagcattgcttttcttttgcatccttttttctccttcccaattggtttttcagattaaggcttttattttcaacgtggaccttttgggcgagtgttttgtcccgatcttgaagataccagtcttgattttttttttttttttttttggtcagtgactccttggggaaagtagcaagggaataagcggaaaagccgcttcgcaggaatttgaagcaagttttcagtttggattgataggctgcattcaagcttgattcctggtgctgtcagtcacttagcacactgtcactttagggaagtggcttaacctctctgaacctcttagttttcctcctttgtgaaagctcctttgtgaaagggggtaatctcccaaatggaattggtgaaagcctgtaaaatggttcctcgcaagcgggaagcactattgtaattgtctggtccaatctccctcattgttcagcagataacttcttgaggccctactaagtgttggatg

SEQ ID NO: 90858 - DNA, 1519 bp, Homo sapiens
ctccggagtagctgggaccacaggcgtgtgccaccatgtccagctgattttcgtatttttagtagagatggggttcgccttgttggccagactggtctcgaactcctgacctcaaatgatctgcccgcattggcctcccaaagttctgggattacaggtgtgagccactgcacccggccagtcagaggctatttgagctatagtcctgttctttctgttaggaagataagcaagtggagagcagtgtgaagggtagaccagcaccccctgagacaccctctgccgtgatcaggaatatggcaggagcccctgaaggcccctgtggggcagtgcttgtctgtgagcgtggcccaccccttcctgggtagactgactgatcttgtgtgcctgagatgtaggacttcctctgagagtgatcatggagaaacggtttgggtggctggtggggaaggtactggcttcctgtgggatgtagattctgatgtgaccgtatgattgtcccttgctatccctgtcctgcctcgcccttggtcatgaaccccagactgaccaggactgtcttccagcaggaggccactgtctgcagctcccgtgaagatgtccactccagacccacccctgggcggaactcctcggccaggtccttccccgggccctggcccttcccctggagccatgctgggccctagcccgggtccctcgccgggctccgcccacagcatgatggggcccagcccagggccgccctcagcaggacaccccatccccacccaggggcctggagggtaccctcaggacaacatgcaccagatgcacaaggtagggatccctgtgcccgcctcgcacctgcggcctctgcccactagggctgcaggcagcctctggaccgagggccttacttggaggatggggggaagccttcttgttggaggtgtcctgccttggctcagccccctaccccagggcccacggccatgaacagaaggttcagctcgtcagaccccagcctgtgctggcgcatgatctgggccccgcgggcacctgccccaccgtttcccgctcccttgctttctgcatgtgaaatttgggaatatcactacaaagttttcttttggtaatgaagaaaaacatccaaattcctaaaaaggcttttagccacgtggtttcccccgttctggctgtcaggctcacctgtgcagctcgcagagccgagcagcgggttccctttcctccaaggcgtgcccctcagccactgtctttacctcacctgcgctgagcagggccttcagtcagcaaggtggagaaggctctttatggtcacaagtctcttttgcatgtccctggatgtggttagaggacatattcccttatacatacagcatctgaaaggaaaggtcatattagcatccatgagaaaaggtgacatttctaagtgtcacgggccacaggaggtcccgggtggtagaagatgaggattgcttgaccacagtctcccatatgctcgtgctccactgggcga

SEQ ID NO: 90859 - DNA, 1033 bp, Homo sapiens
gaattagcccacataaccttcgcatgtaaccttcgtaaccttcagaccaagcctctagggtcactccgaggggttgcctcagttttgaggtgagaatgctgaggtgtgcagttgaaatagattcccaccgccctgcgcctcatccatgccagagctgcatgaaaaccttggcccgcctgacgccagaacctggctcacaccactgaaaaggcatgacctgggcgcgtctatcaggaatcttgtttgctgtcccctgaggcccggtcctgaggagtgccccgggctatctccctctctgctgtgccctgcggccagcatcctcttctgaggcatctcttgcctcatgactagtgcctgcctctctcgagggatgggtcccctgcagctccagctgtaactgggtgccctggcaaccctctcaccgcctttgctccttgtctctgctcccaggctgcaggctcgcatcgcacaccgaattcaggaacttgaaaaccttcccgggtccctggccggggatttgcgaaccaaagcgaccattgagctcaaggccctcaggctgctgaacttccagaggcaggtgggtgctggcatggccgcagctttccgaaaagggcctttgtcaccaacactgctgctaaggctccaaatacggcttgcctggctagtattacacctgcctgggctgtgaaaagcagccgtggccatccatgggcactcaatcactgcagagccttcctcttacggcctgcgcagtgctggggacgtggacctcactaccctaaagcacttgccgcctcaaagcagacttgtatgggcttctttcttcctttccctttccctttttttttttttttggaaacagtcttgctctatcacctaggctggagtgcagtggcataaactctgctcactgcaaccaacgcctcctgggatcaagcaattcttctgcttcagcctcccaagtagctgggattacaagcgtgtgccaccatgcctaatttttatatttttagtagagacagggtttcaccat

SEQ ID NO: 90860 - DNA, 1098 bp, Homo sapiens
tttcaccgtgttagccaggatgatctcgatctcctgacctcgtgatctgccctcctctgcctcccaaagcgctgggattacaggccaatattctaggttttaaacaagccttgcggggagatgtgtccaccatgctgctgaagggtcagccttctcttttgtgctttcctgcaggaatacctcaatagcattctccagcatgccaaggatttcaaggaatatcacagatccgtcacaggcaaaatccagaagctgaccaaggcagtggccacgtaccatgccaacacggagcgggagcagaagaaagagaacgagcggatcgagaaggagcgcatgcggaggctcatggtatggtcctgccttcttgacgtgcgctcttctacatgtgtagctggtactgcgggctccaggggtcactccccagggttacgccaaggcatttcacagctcggagttagaggtgggacagagggaaaagagcaggcgcgggcttgggagtcagtcctgggctcggatatttgctgatctctctgatcatcagaatgactgtgtgacctcaggccacttagccggctcctctgccttctctggaaaatggaggtggtgcccccttccctcgttctgtgagagccaggtggtgtgatccagacccccgacccctagcataaacatctctgaccatttatttgtgactgagtcgctggttgggcagatattggcagcgtgttctgggccaggtgctgctctgtgtacggggacatggcccctgcctttgtgggggctcctggttgtgcttgaggggcagatacgcgaatgaagcaaacagagtagtggatggtgaccgctacagtgaggagggggaagtggagtggaaggggagggacagggtagtaagtaaaagccttgaaacagaggcccaaagggtggccctgatgcacaaacgcagagacccagggaaggagccccaggcagtgcggacaaaggttgaggtggcaggcagccatgtgccagggcagccggtagccctgggctcccagaacagcgttgtgtggggcaggaggtgaggtcagagcttacaggggcaggtgggaggtggga

SEQ ID NO: 90861 - DNA, 1069 bp, Homo sapiens
agaaggcttcgggtttggggtgtatttcgtggacagagtgggtaggactggctcatggcctctgtaaatggctgctggcgggactgtctgcctagcgggtgcccttggaacctagcccttggtgggttttgaggaaatgattcctgaatgaggagtcgattgccgtgtgaagggctggtggcacggcacccgcgtgagctacgcgtgccctcagtgcgcttctggattgactggccatgggtgctcacagacatgcacattgtgccaccacattgcagtaacccccatgcttttgtaggctgaagatgaggaggggtaccgcaagctcatcgaccagaagaaggacaagcgcctggcctacctcttgcagcagacagacgagtacgtggctaacctcacggagctggtgcggcagcacaaggctgcccaggtcgccaaggagaaaaagaagaaaaagaaaaagaaggtgtgctgggcctggcatggtgcccgccgcgggtgggatgggagcagccgtcttcacgtgtgtggcctcagccttgtgggtcagggcctgaccgtgtctctctctatttccagaaggcagaaaatgcagaaggacagacgcctgccattgggccggatggcgaggtgaggaagcagggtttcttgtggaagtatcaagctagccctaaggcgttggtctgtttcagactttaaaacctgtgttcttttaaaattacgaacaatgatatgtgatgatggtgagaatcccagggtgtcctctgacgcccatcccacccgaccccacatcccacatgttgtgttttcttccagacctttttctatgcatgtgccacaggattcatctttcaggttttactttgttgtaacgtccgacttacaggagaggtgcaagaaccgtccagagatgtcctgtgtgttcttcacccagagtctccattttcacgttttgtgttttgttttgtttctttgagacagggtctctctgtcacccaggctggattgcagtggcggatggctcactgcagccttgacctcctgggctcaagtgatcctacccttcgag

SEQ ID NO: 90862 - DNA, 1025 bp, Homo sapiens
gttgatgggttatatatttttactggattactgagtatacagtttacgcattttcccaccactggccatgtttgcctgccattttctgtgcaaacagttgagtgggtgcttcccaccttggcctctgtaagtgtttggtctggaggccctgcaacctcagtgtcacacgaatgactctttttcagcctctggacgagaccagccagatgagcgacctcccggtgaaggtgatccacgtggagagtgggaagatcctcacaggcacagatgcccccaaagccgggcagctggaggcctggctcgagatgaacccggggtgagttgggccttgcattccagatgcagtggggatccaagtcctcggtgggccttgttccagggaggtggcagccaggagcaattttacttctgtttgaattcccggcaggtttggtagggaaagtgaattctgctggctctgagcagatttgtatgaaagcccttacattttttctaggtatgaagtagctccgaggtctgatagtgaagaaagtggctcagaagaagaggaagaggtaagagtgcatttcctggctttcaaggctctcagtgcccactggcagtgacttccaccctgtgtgttgtgaccgtctcctgccctggctgggcatcttgtggggcagggaacagcagggcccaggcctgcccgaagtcggtgctttagagctgtcctatccaatagggcagcttctggcgacatgtgaccatttccattttaaattaaatcagtcacattacataaaatttaagactcattttctctttcacactggctgcatttcaggtgcttggcatcccttatctgggaatggtctgcctcatttgcccattttttttttttttttttgaaacggagtctcactctgtcacccaggctggagtgcactggtgcaatctcagctcattgcaacctccacctcccgggttcaagcaattctcctgcctcagcctcccaagtagctgggactacaggcgcctgccaccac

SEQ ID NO: 90863 - DNA, 1050 bp, Homo sapiens
tgtttaaggcctgtatttcagaaagctcccaggctttggaaatccctctcttaatcttgaaatgatgttcaggcagtgaattcctcacgaagtcgccctgaagccctcttggtttcctgagtgcaagtgtcccgtggtgtgggcaggtttttcctgtgtgctgtgtggggcatggacaggcagacaatgtaacaggtgggagtgagctgttgagatgtgtattagaaatgtcacacgtgtccatcgttcgcacagtcatcctgcagcttcacagacgttattgctaaggatgaggctaagcgataaagaatcagtttggttcagaggaaaaatccgtggtaaaggcagtagagggtgggatgtggcttaggcagaactcgtggctggcggtgtcttgactctctgaagtgggaggaccctctggtgtccgacccggccttcagtcctggcgtggccgcatctgtccttgcagatcaaaggtttggagtggctggtgtccctgtacaacaacaacctgaacggcatcctggccgacgagatgggcctggggaagaccatccagaccatcgcgctcatcacgtacctcatggagcacaaacgcatcaatgggcccttcctcatcatcgtgcctctctcgtgagtacccgctgccagcaacatcccacacgccgctcacacgctcctgtgtttgtttcctaagtttgccgcagtagaataccacaaacgaggtggcttaattacagaaatttgttttcctggaggccagaagtccagggtcaaggtgtagcaggttgcttcctcctgaggcctctcttcctgcttgcagggatacgtgcttacatgtatctcactgtgtcttcacatggtccttcctctgtgcgtgtctgtgtcctcatctcttcttcttagaaggacatgggtcaggttggatgagggtgcatcctaatggcctgctttaacttcattgcctctgtattggccctgtctccaggtacagtcgcatcctgagctgctgggggtcaggactgctccaccagcctcggggctgtg

SEQ ID NO: 90864 - DNA, 1044 bp, Homo sapiens
gtcaccaacccagttcccctgagaccctccacaccagcaggacaagtcccccagtcagcaagatgtgtcttctgccagaacgtgctcggcatttttctgtgctgtagattcatatgtgtgattttgcagggaagccagattgcttttttgcaatttgcattgttcacctgccaatagtcatggggtcacgggcctgtctctgcccaaggcttgcaagaggctacgttgtgtggctccaactcggtgagtcagccccggggcaggacgtcaggcctgtgctctccacccagctgcgctcttccacctggagccttcctggctgctgggcgcagagtgggagattctccccatgtgccgggccacctgctgccccctgccctgattgcccactctggggcccgcagatccgttggaagtacatgattgtggacgaaggtcaccgcatgaagaaccaccactgcaagctgacgcaggtgctcaacacgcactatgtggcaccccgccgcctgctgctgacgggcacaccgctgcagaacaagcttcccgagctctgggcgctgctcaacttcctgctgcccaccatcttcaagagctgcagcaccttcgagcagtggtttaacgcaccctttgccatgaccggggaaaaggtgggtttgcccagctgtgcccatgctgacggttccaggtgcggctggctttgctggttggaacgtgttgagcaccagctacagctggctgggcctgtgctgggtgcctggtgagagtctgcatctgcatggagcaggggagccctggaacccaaggctggggcagccacaagggccccaggggagcagggcagaggtcatggtggtgaatctcggaatgctcggggcgtctctgaccctatgctccaggtgcagagtggatggtgaggaagatggccctgaggcagctgtgggaccgcaagcgtgtggagagcacagctagaggctgtagcgtgctgtaggcccctttaggtgccctcagaactcaccctcagggcagtgggaaggaaacttggaa

SEQ ID NO: 90865 - DNA, 1029 bp, Homo sapiens
ataggttagagcacaaaatcccacttcctgtcagggggccaggtgcctgtgcgggctctcctggccacatcaggaggggccgtgggcttggggttgccccccggccccccatcatggctctgggttttcaaggcctgctgcagccacacccctgggcccagttcccacagcaagacccatggactcggggtccccggctgcagttgtccctcttggctctttgtttcctggctggctgtagagaggcccccagaagatggctggggggccctttctggcccagtaaccctctggtatctctgcctggtgcttcctctcattgcccaggtctcccctcttctccccagctgtgagggtctcctcacccacaccccagtgtgctctggtcagagctcatatgacagggccgagggggtcagagctgggttcggatggggggagtcaggcctcaagccaccttgggccctcgtgagcattatgtgtcccctgcaggtggagtacgtcatcaagtgcgacatgtctgcgctgcagcgagtgctctaccgccacatgcaggccaagggcgtgctgctgactgatggctccgagaaggacaagaaggtgggccccagagtcccccaactgcattccccactgggtgtccaaggccggcagcgtggcaggcagagcagagcgtgctctgaccatcgggtcatgatctggtcatgatccccagggcatctggccagccctggttatgatggctggtggcttgtgtcaggacacactgactcagctgccagtggcttctcctttgcctatgaaacactggctccttctgcaattggcagcctgggcccagcactaaccccagcagggttagagtgttctagaatgccccccttctctgttattaagtgaaaggaagggagcgggctgtctcctgcaggggctgctctgagaatcccaggccccaggccccacctgcctggctctcctcaccagcagtgaaattatcctcccaggaaatgcaccagaccccttgattct

SEQ ID NO: 90866 - DNA, 1114 bp, Homo sapiens
cctcagtgtccacatctacaacacttggggtttggctggagagaacatgagaagccgaggtggcccttccttctgggtctagcagagcatgggtgtctccagtgtggcatttgctcctggggcttctttatcgggcaaggggacaaggtctggcttcccggagcatccctgttccagccccgtgttgtgccggccatgtgactcacagctcctctcattttcatgagtgtctgggtttgacgagaaatacatgtgccaccctggtgatacgcctccccagcgagggtggccgggcttatttcagttgggggaaatggctttgctgaagctttgggtgggtgacgtctgcttaggatgcatgtctgtgcccttgaacccggcgcctggcctggaggcgggcgatgcacctcctgccttacctgcctgcagggttccaggtttaacatcctgcgccttctctcctgcctcctccacactccaggctggacctgtaccgagcctcgggtaaatttgagcttcttgatagaattcttcccaaactccgagcaaccaaccacaaagtgctgctgttctgccaaatgacctccctcatgaccatcatggaagattactttgcgtatcgcggctttaaatacctcaggcttgatggtgagtatgagccagtgaggcgtttcttacagggttttgttgttgtggctgccacagaagctcctcactggcattccctcctgtgaggcagggtgaggcccaggcgctctgggtccagtggccagagtgggcctagccacaggctgagcatcttgggcactcggcactgggacaggccgtggattggacgccgggtgtcctgactcctaggctgacagtctttccacgacaatgctgggcgcactggggaaggggtgccctgtgcacttttagctggaagtgacagaattccataccatgtggacacaggaaagaaagcaccaataggcttacatagctctaaccccaggaggttaaacatccttcaggcacagctggatccaggcatgcaggtgatattggagagacttttctccagctctttgctctgccttcttccatcttggcttcctttccacctgctcag

SEQ ID NO: 90867 - DNA, 1339 bp, Homo sapiens
cagcctgggcaatattatgagaccccgtatctacaaaaaatttttttaattagctgagtgtggtgacacgtgcctgtagtcccagctacttaggaggctgaggtgggaggatctcttgagccctgggagttcaagactgcagtgagctatgatggtgccactgcactccagcctgggcaacaggtcgagaccctgtctctaaaaataaataagtaaataaaagaaatagatggggagagtgtggaacagaggtgtcaacatcacctccgggtgaagggatttcaggagcacgttcttttctgtacagagaagatagttctttttttttggtcaagaaattcaaccattagttttttaaagacaagcttgggtggggtgcctgctgggggcagtgctggtctttcactgcagcccaggcaccccttgagagtcccagtgtgtgttatgccccgagccagtcaagctgaagggagagcgggtgcgggggccctcctccgtgtcccagcccggcccctgggattgcgtcgcggcctctgcttgtcgacctgggtgctggctgtcctattttactactattgaccctgaaggccatcgaggagggcacgctggaggagatcgaagaggaggtccggcagaagaaatcatcacggaagcgcaagcgagacagcgacgccggctcctccaccccgaccaccagcacccgcagccgcgacaaggacgacgagagcaagaagcagaagaagcgcgggcggccgcctgccgagaaactctcccctaacccacccaacctcaccaagaagatgaagaagattgtggatgccgtgatcaagtacaaggacaggtaagcgaggaggcggggagggcgggggctgtaggggtccccgtgggagcaggcctggcatctgcactctgactctgcacactcaggcttgggccgctcactctttcactcatccacaaacactgactgaatctctgtgtctttgagcctggccctgaggaacatgctttctggaacagggaagcacacatgtatctgcggtgatgagagggaatgtcacatgtggtcgagaggagaggcaggggtgcgggtctcggagaaggggacattgcagcagagccttgagagaggggaggttggggagagtgcaccagcagaggccacagcaggcggagaggctctgccaaagttgtggcctggtggcctcaagggatgaggtgggatgaggggttatatggcagtaatgggtgctgcccgtgtggccaggaggttggggacaagaggctggcatgtctggagcagagaaagtggcagccctctcctgtccttgcaccctcc

SEQ ID NO: 90868 - DNA, 1036 bp, Homo sapiens
gacatgtcctatatacgaggcagcatgcggttccagctgtggccacggcccagcggcggatcataacgtgttggtggatcatgagtgccatttatatgtttttcatttactaatatccttttccgtgagcgactctatatgggtaccatttaaataagaagaaaggaatgttctcagcaactccccagggaggcatgtgcaccttctgccagcccagggcaggtcacagagctgggcaggagccagcaaaggtgtaaggcccatgcctggcccaggactcacccagtcttccactctccaaggtcttatttcacttcctggtacacactggccagtacggctgtccccgtaatgggagggttgtactgtttgattttaaataacagtttgctgttagtcatgaagcagagcgtgggggaattgtatctgttggaggggaaagtgaagggagcccacatgcatggtttggagagaatcttaccaagtgtgaagttttagaggatggtaacaattggagtgcctaaattaatgagtcaaaattaccgcgcaaggccagctgtggtggtccacacctgtcagcccagcactttgagaggctgaggtgggaggatcacttgaggtcaggagtttgagaccagcatggacaacatggtgaaaacccatctttactgaaaataggaaaacaattacctgggcgtggtggcacgctttttgggaggctgagacaggagaatcacttgaacccaggaagtggaggttgctgtggaccaagattgcaccactgcactccagccttgggtgacagagcaagacgcccactccaaaaacaaaatactgcttaaaaaggttcttttagccagatgcggtggctcatgcctgtaatcccagcactttaggaggccaaggcgggcggatcacttgaggtcaggagtttgaaaccagcatggccaatatggcgaaaccccctctctactaaaactacaaaaattcgccgagcgtagtggtgcatgcctgtaatcccagctactcgggaggc

SEQ ID NO: 90869 - DNA, 1578 bp, Homo sapiens
tccagaagctacaagaaagcacatgtgcaggccaggcatggtggctcacacctgtaatcccagcactttgggatgctgaggcgggctgatcacctgaggtcgggagtttgagaccagtctgaccaacatggagaaaccctgtctctactaaaaatacaaaattagcctggcatggtggtgcacgactgtaaaaaatcccagtgactccaaaggctgaggcaggagaatctcctgaacctgggaggtggaggttgcagtgagccgagatcgcaccattgcactccagcctgggcagcaagagcgaaactccgtctcaaaaaaaaaaaaagcgcatgtgcaagaaatagctcctgagctgagttggaatttctcatccttaaacaatgtgggaacctgctgaggtggggtgggggctcccgggtgggcggactcgggggtgatagccgccggttctgccttgcagcagcagtggacgtcagctcagcgaggtcttcatccagctgccctcgcgaaaggagctgcccgagtactacgagctcatccgcaagcccgtggacttcaagaagataaaggtaaccctgacgttgtacctgcgccccgcatgtgcccggaggggagtctgacccaggggcacccccatctgagagctgtggtgtgtgggcagaatgaccagaaaccacctaggcggtgccttgggctacctggttagggacctggtcgtgggcttttggggttccttgtaagggttgggggtgtcctgagggatgtcagtgggcagtcggtgttgggtgttccttcaaggtcccactcacttagtgctgggcctcagtcatgcagttcccatgcctagtgagccaggttaccgaggctggcgcttcggccacatcctcataggcacgaggaatcctagcccgtggggtctccagcacacagccaggcctgcgggcaggcgaggcggggtcctgaggtaagacctgctcctcccgtccactgcaggagcgcattcgcaaccacaagtaccgcagcctcaacgacctagagaaggacgtcatgctcctgtgccagaacgcacagaccttcaacctggagggctccctggtgagggcaccgctgggggttggggatgggccactcccacagctgggctttgacccaacccgcccctccttcccttctgaattgatgggttaaaaacaagtcccgctagctgtggtggttcgtgcctgtaatcccagcactttgggaggccaaggcgggaggatcacttgagaccaggagttcacgaccagcctgggcaacataacaagaccctgtctttaaaaaaaaaaaagaaaaaattaaaaatttccaacttgggatattttagcaattacaaaagcagtatgtatttaccgaagaaaataaagataggcacaacagaagaaatagactcagagtcctctgtctgttggaattttattttaaattccctggggcacattctcttcaaaggaatcctgtgggtttgttctttcctgtgatagaattgacacatacacagcctcaacttggcaaactttcttaagtgtctttgggatt

SEQ ID NO: 90870 - DNA, 1020 bp, Homo sapiens
aattttgtatttttagtagagacggggtttcaccatgttggccaggctggtttcgaactgctgacctcaggtgatctgcccacctcggcctcccaaagtgctgggattacaggcatgagccaccatgcccagctgtagtacaggttttaatatgctaaatactcttcctttctttattaatgtgcatggaagttctaatatttttttcccataccccagagagtccatattttggaatcaacaacactagcctttgttgacaagtgtctctcttgggttccttctttgtgtcctccactgaattttggggttcataaaatttcatttgttgtgcttgcttaattccctgggaatcagactgttcctgatcggatgacatttctggttaattctttagttggcaggaaatagacacaggaaacgtggtcagtttctgattctggcgttgagagaccctttctccttttcctctctctcagtgggcgacagatgcgaaagaaacgagttccagtgccaagacgggaaatgcatctcctacaagtgggtctgcgatggcagcgctgagtgccaggatggctctgatgagtcccaggagacgtgctgtgagtcccctttgggcatgatatgcatttatttttgtaatagagacagggtctcgccatgttggccaggctggtcttgaatttctggtctcaagtgatccgctggcctcggcctcccaaagtgctgggattacaggcaccacgcctggcctgtgacacgattcttaacccctttttgatgatggcggctggaaaagtggccagtggattttgatgtattcaatcatgaattaggaggtggggagagaatgaattattggagctttccttaaagccattaaatggctctattgttttttcaattgatgtgaatttcacataacatgaaattaaccagctcagtggcattaatacatctgcaatgctgtgtggccaccacctctatcttgttccaaaactttgcataacctaatgtctt

SEQ ID NO: 90871 - DNA, 1170 bp, Homo sapiens
ctcaggaggctgaggcaggagaatggcgtgaacccgggaggcggagcttgcagtgagccaagatcgtgccactgtactccagcctgggcgacagagcaagactctgtctcaaaaaaaaaaaaaaaagtgggattgacattctcttcaaagttctggggttttcctttgcaaagacaggattggcaaggccagtgggtcttttttgtgtgtgtgtgtgtgacggagtctcactctgccacccaggctggagtgcaatggcaggatctcggctcaccgcaacctcctcctcccaggttaaagtgattctcctgcctcagcctcccgagtagctgggactacaggtgcccgccaccacacccaactaatttttgtatttttagtagagacagggtttcactatattggccaggctggtcttgaacccctgacctcacgtgatccacccgccttggcctcccaaagtgctgggattacaggcgtgagccactgtgctcggcctcagtgggtctttcctttgagtgacagttcaatcctgtctcttctgtagtgtctgtcacctgcaaatccggggacttcagctgtgggggccgtgtcaaccgctgcattcctcagttctggaggtgcgatggccaagtggactgcgacaacggctcagacgagcaaggctgtcgtaagtgtggccctgcctttgctattgagcctatctgagtcctggggagtggtctgactttgtctctacggggtcctgctcgagctgcaaggcagctgccccgaactgggctccatctcttgggggctcataccaagcctcttccgcccttcaaatccccccttgaccaggaggcattacaaagtggggatggtgctacctcttcgggtttgtcacgcacagtcagggaggctgtccctgccgagggctagccacctggcacacacactggcaagccgctgtgattcccgctggtcgtgatccccgtgatcctgtgatccccgccccgtgaggctgaacacatagtgacgcttgctagccaagcctcaatgacccacgtaacatgaagggggaaaagccagaaagttctgccaaggagcaaggccaagaatcccgaagggaaatggactttgaagctgggcgtcttcttggctgtcttaatacaagtggcacatccaaat

SEQ ID NO: 90872 - DNA, 1354 bp, Homo sapiens
gataaattcttacccccacaccactggtccagatagtcagtgctcacccacaacattaaggatattccaaatttgaaacattccaaaatcagaaaaatattccaactctgaaaatattccaaaatccaaaaaaattcaaaatccaaaacacttctggtcccaagcattttagagaagggatactcaacccaaaataaggacagcaattctataaattgtgctaccatcttgcaggtctcagtttaacagctttacacctattagcgcaccagtgctcatagcagtgctgggaaatgtgtacagatgaggaaactgaggcaccgagagggcagtggttcagagtccatggcccctgactgctccccagcccgcctttccaggggcctggcctcactgcggcagcgtccccggctatagaatgggctggtgttgggagacttcacacggtgatggtggtctcggcccatccatccctgcagcccccaagacgtgctcccaggacgagtttcgctgccacgatgggaagtgcatctctcggcagttcgtctgtgactcagaccgggactgcttggacggctcagacgaggcctcctgcccggtgctcacctgtggtcccgccagcttccagtgcaacagctccacctgcatcccccagctgtgggcctgcgacaacgaccccgactgcgaagatggctcggatgagtggccgcagcgctgtaggggtctttacgtgttccaaggggacagtagcccctgctcggccttcgagttccactgcctaagtggcgagtgcatccactccagctggcgctgtgatggtggccccgactgcaaggacaaatctgacgaggaaaactgcggtatgggcggggccagggtgggggcggggcgtcctatcacctgtccctgggctcccccaggtgtgggacatgcagtgatttaggtgccgaagtggatttccaacaacatgccaagaaagtattcccatttcatgtttgtttcttttttttcttttctttctttattttgtttttgagatggagtctcactctgtgatttttttcatctctaaatttcctacatccatatggccaccatgaggccccaggctggccgatggttgctgttagcttattgggaaatcactgtttggaaggtgctggttgttttttgttgtttgttgtttttgtttttgtttttgttttgagacggagtctcgctctgtcgccagggtggagtgcagtggcgcgatcagctcactgcaacctccgcttcctgggttcaagccattctcctgcctcagcctcccaagtagcgcggattacaggcatgtgccaccacctccggctatttt

SEQ ID NO: 90873 - DNA, 1111 bp, Homo sapiens
ctcccaaagtgctgggattacaggtgggcgccactgtgcctgttcccgttgggaggtcttttccaccctctttttctgggtgcctcctctggctcagccgcaccctgcaggatgacacaaggggatggggaggcactcttggttccatcgacgggtcccctctgaccccctgacctcgctccccggacccccaggctccatcgcctacctcttcttcaccaaccggcacgaggtcaggaagatgacgctggaccggagcgagtacaccagcctcatccccaacctgaggaacgtggtcgctctggacacggaggtggccagcaatagaatctactggtctgacctgtcccagagaatgatctgcaggtgagcgtcgcccctgcctgcagccttggcccgcaggtgagatgagggctcctggcgctgatgcccttctctcctcctgcctcagcacccagcttgacagagcccacggcgtctcttcctatgacaccgtcatcagcagagacatccaggcccccgacgggctggctgtggactggatccacagcaacatctactggaccgactctgtcctgggcactgtctctgttgcggataccaagggcgtgaagaggaaaacgttattcagggagaacggctccaagccaagggccatcgtggtggatcctgttcatgggtgcgtatccacgacgctgagggctgcagagggaatggagggagcaggaaggagcttcaggaactggttagtgggctgggcatggtggctcaaagcacctgtaatcccagcactttgggaggccaaggtgggtggatcatcaagaccagcctgaccaacatggtgaaacctcgtctctactaaaaatacaaaaattagccgggtgtggtggtgggcacctgtaatcccagctgctcgggaggctgaggcaggagaatcacttgaacctgggagatggaggttgcagtgagccaagacagccccactgcactccagcctgggtgacagagtgagactccgtctcaaaaaaaaaaaaaaaaactaaacaaaaaactggttagtggctagacaacaggatggtatcttccaagcccatggctgactcagcagctc

SEQ ID NO: 90874 - DNA, 1586 bp, Homo sapiens
actggggaggactttggcttttgccctgagagcggtgggaagtgactgaatccggtactcaccgtctccctctggcggctcctgggggaacatgcttggggatcaggctgggggaggctgccaggcccaggaggtgagaagtaggtggcctccagccgtgtttcctgaatgctggactgatagtttccgctgtttaccatttgttggcagagacagatggtcagtctggaggatgacgtggcgtgaacatctgcctggagtcccgtccctgcccagaacccttcctgagacctcgccggccttgttttattcaaagacagagaagaccaaagcattgcctgccagagctttgttttatatatttattcatctgggaggcagaacaggcttcggacagtgcccatgcaatggcttgggttgggattttggtttcttcctttcctcgtgaaggataagagaaacaggcccggggggaccaggatgacacctccatttctctccaggaagttttgagtttctctccaccgtgacacaatcctcaaacatggaagatgaaaggggaggggatgtcaggcccagagaagcaagtggctttcaacacacaacagcagatggcaccaacgggaccccctggccctgcctcatccaccaatctctaagccaaacccctaaactcaggagtcaacgtgtttacctcttctatgcaagccttgctagacagccaggttagcctttgccctgtcacccccgaatcatgacccacccagtgtctttcgaggtgggtttgtaccttccttaagccaggaaagggattcatggcgtcggaaatgatctggctgaatccgtggtggcaccgagaccaaactcattcaccaaatgatgccacttcccagaggcagagcctgagtcactggtcacccttaatatttattaagtgcctgagacacccggttaccttggccgtgaggacacgtggcctgcacccaggtgtggctgtcaggacaccagcctggtgcccatcctcccgacccctacccacttccattcccgtggtctccttgcactttctcagttcagagttgtacactgtgtacatttggcatttgtgttattattttgcactgttttctgtcgtgtgtgttgggatgggatcccaggccagggaaagcccgtgtcaatgaatgccggggacagagaggggcaggttgaccgggacttcaaagccgtgatcgtgaatatcgagaactgccattgtcgtctttatgtccgcccacctagtgcttccacttctatgcaaatgcctccaagccattcacttccccaatcttgtcgttgatgggtatgtgtttaaaacatgcacggtgaggccgggcgcagtggctcacgcctgtaatcccagcactttgggaggccgaggcgggtggatcatgaggtcaggagatcgagaccatcctggctaacacgtgaaaccccgtctctactaaaaatacaaaaaattagccgggcgtggtggcgggcacctgtagtcccagctactcgggaggctgaggcaggagaatggtgtgaacccgggaagcggagcttgc

SEQ ID NO: 90875 - DNA, 1049 bp, Homo sapiens
tgtatcccacgcacacactgtaggatgtaagttccaggagaagctgctcgctgctttgccgttagaaccccaccctgcacagagcaagcgctcgacctatggagaaataaacagccgctttctctcccgcgcaggcgcatcgggaaggataacggagcctcccccttcctgcgccgattggtcatcaccgatgactgacggaggagtggtcgcaggcgcaccaggccagaccaaaggcggcttagcccagtctaagatcctgttccccatgcctattggccattgcttatgactgacgtatcaaaaaatccaatggaaagcaacctcttctggaagagggcgggccccgcggacagtcaaatttgcgcgggttggagcctggcgtagtcatggccgccttccgcgacatagaggaggtgagccaggggctgctcagcctgctgggcgccaaccgcgcggaggcgcagcagcgacggctgctggggcgccacgagcaggtggtggagcggctgctggaaacgcaagacggtgccgagaagcagctgcgaggtgagggtcggagcgtggtcgcgggcccacgggggaaggggcccgggtgctgggagggggcgaccaggcccacctcaaaaccccttctctcctggactctcccatctcctgccctatgccccctgggacggccccctctgagccttagtttcaccatctgagaaatcggctttatgacagcaaccatcccccaccccccaggggtttagtggtaaatataggagtctggaggggttggccccttctgagctctccgtgagcaggagctgggggtctcagggtttgaactggggctcaggagtcaaagctccgggtttgaatcctagcacccatccccatgtccgctgtgagacttgaggtgagtttcttaaattctctgtgcctcagcttccttccttgtcaaatggttgtgacaatagcccatcccttcttcctgaaggcattcagatgttttatggagcatctgctgctgccaggccctgggctcaccgcaacctcca

SEQ ID NO: 90876 - DNA, 3490 bp, Homo sapiens
ctcacgcctgtaatctcaacactttgggaggccaagatgggcggatcacctgaggtcaggagtttgagaccagactgaccaacatggagaaaccccatctctactaaaaacgcaaaattagccgggcgtggtggcgcctgcctgtaatcccagctactaaggaggctgaggcaggagaatcacttgaacccaggaggcagaggttgcagtgagctgagatcatgccattgcactccagcctaggcaacaagagtgaaactctgtctcaaaaaaaagaaaagaaaaagccagggtcctctccaaagcccaccaggccctgcacaaccaccctcaccttccccactactgtttctctccccctctagccacactggccttattgccacacccctctgcacttatcccagggcctttgcacgtgctgtttccgctgcctggaatgctcttccctgctcgctggctccttgatgccgttcacagtcagctgagaactcaccctccctgaccagccactgtccaccctcattcctttgcatccctcacccccggtgaacatcctcaaccacagtcatgagtttgcttcttcaaggcggtgcccccagatcgccacctccttggggccaggggccacgcctccctcctgcttacccatcatatctaccaggccagccaccacgttggcgcctcgggggattggaaaggatcccaaacaaaaagaattctgcttctctgtttcagtttgccccaatgtcagatgacgagagccctacatcatcctcggcagaagagtagccgtgagggaggcggggaccagccagaccgggagcaaaccgtcccttgtccccgtctcctccctgttcccgttcctccctggcccaccccactcacactccccaaggcccacggctcaaaggcaagcgagctctccctctgcttccctgggggagccccgacggccacaggactccagctccaagtgggttttcttggctcccctgttcaaagtggccacagcgcagaccgaagcaaaattcttgtatacattggcgccagggctgatgctggggtgtgggttttatgaagaacattgagaacaatcagctggtaattatggatggaggaagagggagaggaaaaaaatattgtatttttgaatcattgttgcaggagggggtgggaatcttaggatttgttgccagatttgaaagtcactggaacttgcatattttcattttaatcctaagtgttattacgcaccagttggggttcacccttcatcccccacatttaattgtctgatatagaatagtgttgtgtccactgccccgctagacggctttcttaggggaattttcttctggttgtttcacaagacagattctgtccttgtcacccgggacagaaaactcagtcttttcaccctcattcagatgaagggactcaggacaggctctgtgacttacagggacccaatcaattcacaatgagaaattaccggccaggcgtggtgactcacgtctgtaatcccagcactttgggagggcaaggcaagagcttgagcttgagcctagacgttaaagaccagcctgggcaacacagcaagacccatctctacaagaaatttaaaaactagccaggcgtggtggtgcgcgcctgtagtcccagctacttgggaggctgagccctggaggtcgaggctacagtgagctatgatcacaccattgcacttcagcctgggcgacacagcgagaccctgtctcaagaaagaaaagaaaaagagacaaattacccagaaacccctcccttccccacatggaggccttggcaaatgttaattttcctagaaaatccttcagacctgaagacgcaggaaaagaatctggctctcagggtggcttctgcgtccccgccgccaggccccagactatggtcacagggccgtcctgttcctccccgggactccagaatttctctcctcaaaggaaagaaaacagggcatgcgcttgttggcaaaacgcagggccggctcccaaaaaccccatgtgtgtacgattaaaagttggccgtccccaggcctcccagcgcaaacttcaagagacagggctttgctgaaaaccaaacatgggccagctgggctttttaacaacctagagactttccggagctgcctggaacagagcctgcgggaaacggggcttgccagagacactcacagtttccttcatggcctgttttggtcccctaagaatctccacatcattgtctttcttgtgccttttccttggtgagcaacagaaagggaagggttccaagcctctaaaaatgtgctttgtgatcaggagtgcgctccaaaccaaatacgcgcgctgccctttcgaggccagtgagctcagcctccaaggctttaaagccacatttcagcaagagaaagcgctgagagctcgcaggttcattaaagaaggcaaagcactggtttctctccttagaaaagtaggtttcttggcttgatgtagactggcttgctttgatttttagtgaagggaatgtacgtaaaacaaaatagggcttggctggtcaaaggagacaagcaggatggatggatggatggatggatggatggatggatggatggatggatgaatagatagatggtgtttgcatgtaaattgcagagaaaacaaaaccaaagctgattggaaacaattaattgtgggtgtctgagggggaaggtcgcagctttgggcagctttgagaagcggtacaagagttctgtgcctgtgtgtccagccctggagccagccagtgcatttattttaagctcttagaagcaactccttggcccaggaatgcgtgacccctgagatgggtccacgcatctctctacacttccttctctccgtgggatactggactcgtgcctctgcgcccattctcttctcacgcatatccatgagctttaatttcactttctgatcacggtacgtccataaagccagtattacacttaaatgaagtattcttttttgtaatcgttttttttagaaggtaaacaaatttaataaagctaccaataatgttgatgattctgtgtcttttcttttttcgctgtgctcccttttaagctttaagatagatatctttccttttttttttcttttttctttttttgagacggagttttgcttctcgtcacccaggctggagtgcagtggcgcgatcttggctcagtgcaacctctgcctcctggattcaagtgattctactgcctcgattctcccaagtagctgggactacaggtgcccaccacactcggctaattttgtatttttggtagagacgggggtttcgctatgttggtcaggctggtctcaaactcctgacctcagatgatccacgcgcctcagcctcccaaagtgctgggattacaggtgtgagccaccactttttgtttttggagagtctcactctgtctcccaggttggagtgcagt

SEQ ID NO: 90877 - DNA, 1109 bp, Homo sapiens
gagcctggggaggttgaggctgcagtgagctgcgatcgtgccactgcacgccaacctgggcaacagagcaagaccctgtctctaaaataaagcaaaacaaaaccaaaagcactactggcatgaaatacattcaccctgttgtgcaaccaacacctccgtctagttccagaacgttctcttcacccccaaaggaaacctgtatccatcatttcctccgcccccgcttctcccagcctctggcaaccactcatccgctttctgtctctgtggatttattactcccctggtgacgggagggttgtttgagattcaggaggagatcagcaagttgagggtacatttcaccatcagagtatgtgggagctacagcaggttctagaccagggggtgtcctgccctggggcctgcatgaaccataatcctgttccttgccctccccaggcaggacagacggccctgatgctggccgtcagccacgggcgggtggacgttgtcaaagccctgctggcctgtgaggcagatgtcaacgtgcaagatgatgacggctccacggccctcatgtgcgcctgtgagcacggccacaaggagatcgcggggctgctgctggccgtgcccagctgtgacatctcactcacagatcgcgtgagtctccaaccaggtgcaccccggggagggcgggagcacagcatggggacgtcattcatagcaccggatactttgcaggatgggagcacagctctgatggtggccttggacgcagggcagagtgagattgcgtccatgctgtattcccgcatgaacatcaagtgctcggtgagtctcaatccggccgggtaggcacgggatgggtgggtctctgaaaggacagagatttgttgtttttgtttttgaggcagagtctcactctgtcgcccagggtggagtgcggtggcacgatctgggctcattgcaacctccgcctcccggcttcaagccattctgctgcctcagcctcctgagtagctgggataacaggtgtgcaccaccacacccggctaatttttgtatttttagtagagacggggtttcaccatgatggtcaggctggtctcaaactcctgacctcgtga

SEQ ID NO: 90878 - DNA, 1141 bp, Homo sapiens
ggcagagtcctgccctgggagggtctgaagggggaggcagagtcttaccggaaaaagggggtagtctaagccgagggatagagccctgtcctgggggatttgagaggcgacatagcctagcgccgggagtctgaaggggaggcatagccctgctctggagggtctgagagcagacgcggttgagtaccaggtgggctcccatctcttcggcaaataaaccccaactctccccaggcatcagtcttcaccctgagaatggggacaagaggattcaaaggtcctggtgtttctcccatccccagggacccctggcccagcctccccacctgccttccctgccaaggaccccgatccaccctactccgtggagaccccctatggctaccgcctggacctggacttcctcaagtacgtggatgacatcgagaagggccacacgctgcgacgcgtggcagtgcagcgccgcccccgcctgagctcgctgccccgtggccctggctcctggtggacgtccactgagtcgctgtgctccaatgccagtggggacagccgccactcagcctattcctactgcggccgtggcttctaccctcagtatggtgctctggagacccgcggtggcttcaatccgcgggtggagcgcacgctgctggatgcccgtcgccgtctcgaggaccaggcggccacacccaccggcctgggctccctgacccccagtgcggccggctcgacagcctccctggtgggcgtggggttgccacccccgacaccacggagttcaggactgtccacaccggtgcctcccagtgccgggcacctggcccacgtgcgggagcagatggcgggtgccctgcggaagctgcggcagctggaggagcaggtgaagctgatccctgtgctccaggtgaagctctcggtgctccaggaggaaaagcggcagctcacagtacaacttaagagccagaagttcctgggccaccccacagcgggccggggtcgcagcgagctctgcctggacctccccgatcccccagaggacccagtggcactggagacccggagtgtgggcacctgggttcgagaacgggacttgggcatgcctgatggggaggctgccctcgccgccaaggtcgctgtgctg

SEQ ID NO: 90879 - DNA, 1042 bp, Homo sapiens
tctccatccccaccccccaccgcggccggggcgcccgggcggctggagggggcggtgccggctgggggggcgggaccagccggagggggcgtggtgcgggcggagccacctccgagggccgggcgcccaggctgcggcgcgcgcgaagacgctcgggcggcgggacccagggaaggcagcggccggagcgcgcaaggcgagtgggacccggggctgggtaggggttcaagtctggttcggggatcgagtgtgcaccccctccacacacacctactaccctaccccccgcctccaaccctgggacacgacctcgctggtctcaacgagccgctgcctccaactccaccttctgtgcccaaactttccagacttggagtgtctgtccccgcgtccctgccccctcctcgtctttgaccccatacccccatcgattcctcccagtaccccccatcgattcctcgtgccctgcccgtttctcctgtcttggctcccctctgcccgctctcccctgtctctgtcccactttctgcctctgttcctccccggctctgccctctccccgcactgtcccccctcgccctcctccgcggccatgccccagacggcgggaaggcggccgggcgtccggccgggctgggcctgggcttggcggctgggccggcgtggggagcggcagctgtttgccattagcccgggatcccacaggccccgccccctctctgcacggggcggggtccttctcgcctccccccaccccgagtttggggcgggaagacccccccccaccaccaccaccgacctccgcgatgtgcaggccggtcttgggtggtgggttggggagacccgcgccccttccctgcgctccctacctgtcccctcttataggctccagtctctccatctctgtcttatcctgtcaccccttccccattccccaggggtcccatggcgagagaagggtctcagccacagacatccatctcccccaccacaccccctcgtctcctttctcttccccttactcgggacgtgctggtcctca

SEQ ID NO: 90880 - DNA, 1184 bp, Homo sapiens
ccacgcctggctaatgttttgtatttttagtagagacagggtttcaccatgttggccagactggtctcgaactcctgatctcaggtgatccatccgctttgccctcctaaagtgctggaattacagcatgagccaccaccacgcctggctgcggtggcttcaattttgcataagcatctgaatatgtcatccagatgtacaaaggcagggcaggctctgagcagtcatttcccagatacatgaattcatctttctgagcctcagtttctacatctgtaaaatggggatgattcataccttccgtggtggactgcaagagagaatcggagaatcccacagccagatcagggacaggagagatcccagaaggatccttggaggaagacgaggaggaggaggaagaggatgtgggctgggaggtctatggagttgggggccccatggccatgctgacccaccctcattctttttccaggaactccttgaacagagcaagtttccgaaaggcagacctctgagcccacaaggaccaaagctgtacctagaggaaccagcacccgggcctcagctgtctgtgctgcgaggggagtctgccctggtgcccactgggctgtggggtgaccacactgtacttggggctgggccctctgcccctgtgtccccatctgtgtgcactgatgcttcctcccttttttaatttaaaatggtttttataagcaacctgtgccatgtggtgcggtcactaggggctgggtcacatgctcatcacatgctcacagtccactgccccatatccacacatccctgcatcatcaatggggacaccaagaacatactgggtgccagggacatcgtggtgacaacaggcaaaaattcctgcccttgtggagctgatgttctagtagggaaggcaacacacaaataatgtcacatgcttacctgcaataacaatacctggtttttgtttgtttgtttttaacagacgctctcactcagtcccccaggctggaatgcagtgtcacagtcatagctcactgcagcctcaaactccggggctcaagcctcctgagtagcagagattataggcacatgccactgtgcctggcttttttttctttttcttttttttttttttagacagagtttcactctgtcacccaggctgcagtgcagtggtgcaatct

SEQ ID NO: 90881 - DNA, 3325 bp, Homo sapiens
gagttcaagaccaactagggcaatatagtgagaccctgactctacaaaaactaaaataaaattatttgggcatggtggcatgtacctgtagttccagctatgtgggaggctagggtgggagcatctcttgagcccaggagttggaggttgcagtgagctatgattgtaccactacactccagcctgggtgatggagtgagaccctatctcaaaaaaacaaaaaagataagtagcagtgaagaccatggagccctctgtgggagctgagtggaaaggctcaacccctatctgggataggggtggtcagggtgggcttcctggaggaggtgatggagggtgggtaggagcacggaggctcacaagggagatgggtagacaggagcacagtggagagaggaagacagtttggggaatcctgaccccacctcaccctcagggcgggctctacgaggcggtgaatgaggtctacaagaacctcatccccatcctggaagcccaccgtgactacaagaagctggccgcggtgcacggcaaactgcaggaggccttcaccaagatcatgcaccaggtgggcccaggaccccctccccagaccccaccctcagccccactcctcatccccactcctcatccccagggatctgctgaccttgacccttctcttccccacagagttccggctgggaggtgagtcagccttggtggacagccacctgcctctgggacccccgtgatgactggccagcagccatcagtgaacaccagggggcaccagaggagcatggccgctggcccttggggctggggctgtggccacaagggacccaccccattatttccctcccttccccaaaaatgcccccaccccccgccccagatctcgagggcagcttgtgactcacccagctgggagctctccagagacacccctccctctgccagggccagcttggtcactgcaggggggtggcggggtgactcttgactccctcatggtctcttggtctctttctcatctctccccagtctatcacgtggctctccctatcttggtatctcactgtctcttagtctctgtctctccctgcgtacccagcttccagcctcccccaggctctctgctcctcatttctggttaatgtgtcctcccgctccagcccccccgaatcccgcttcttccctgcttaggtctatttttaggcatctcctagtttggggagaatgttctggccaaagatggcagaaacccagagcccaggcaggcaggctgggtgggagctgggtggggagggcaggtcctcttcgcccccgcccccctcccgtctctgatctctccccccacggaatgattctcacggggcagtgttaaccaggaccctgggggttgagggaactctgacctctgacctctcccatgacattgtctctctgtcccccacacctctggccccaccatgtctgccccatcctccccggatcggccttggtaagtgaacatccagccattctacttcctttccagtcatggggtggtgtttttagggtggtagggagggggttccttcttccaaacttagggctggggacaggagcaggggaatgccatggaacaagggaaccagagccactgtcctagagtgagacacagccatcccttccctcagccatccaagcatttatggggtacctactgtatacccattcttgtgggcctcagggcacaggaaggagaatgccctagaacaaaggaggcagagcctccatcctagagtgagagacagccatccctctcctcagccatctatgcatgtattgggtacctgctgtataccctgtcccacgggcattagggacacacccgtaaacaatacagccccagtcctaacttcctattgcaatccatgccccaatgttctcagggccccctgcctgtgcccatgccctgatgttctcggggtcctcacactcccatcctgatattcgagacacctatctctggggcagggagacctccagcaggggcctcccggacaaccacaccctttctcacagccccagcgcgtgttcgggacgtatttccgcgtgggcttctacggcgcccacttcggtgacctggatgagcaggagtttgtgtacaaggagccatcgatcacgaagctggcagagatctcacaccggctggaggcacgtccttgtggttgggggtggaacggggcatggggctgccttggggctggagtaggggctgtccctgggtggccccgagtcagccctgtgtctccaggagttctacacggagagatttggcgacgacgtcgttgagattatcaaagactctaaccctgtggacaagtccaagcttgactcacaaaaggtgggtcccccaaccatttccccaaaatcttagattcacagagactccaagtgctgtttcctggggaccctcaaatcctctttctctgggaaaccccaaatcatatttcactgagggaccccaaaacctattcctcaggggattcccaaacatccagacataggaagacttggaaatgacaaagtccccagatcccctctctccaggaacagggcttgggctgtgcgtgctggggctgtgggatcctcacacctgaccctgcgcccaggcctacatccagatcacgtatgtggaaccgtactttgatacctacgagctcaaggaccgggtgacctactttgaccgcaactatgggcttcgcacattcctgttctgcacgccgttcacgccggatgggcgcgcacacggggagctgcccgagcaacacaagcgtaagacgctgctcagcaccgaccacgccttcccctacatcaagactcgcatccgtgtgtgccaccgggaggaggtgggtggggatcctgggcctggcgggggtggggaggtgaggggacatcagaccctgggaggggaggggagggtagacacagggacccagacccaaggtggttcacggacctcagacccagagaggggtggcacagggaccctagaccagatccccagggaggggaggggaggagaccagacccagggagacctgggaggcaagatgcagggaccccagacccagggtggcccagggattccagacccagaaagaggaggcagagggagcccagatctaggaaggcccagggaggagaggtgtggcccaggaagaggcccaggtaccccagaactgggctgagaagatatggagaccctgcattccaatctctaaactgaaacctctacctccagacccaggaggacccagggattctagactcacaaaggggaggcacagggact

SEQ ID NO: 90882 - DNA, 1057 bp, Homo sapiens
caataataaataaaataagtaaaataagtgaattccaggagcagacaaccagaaacccactcttggggactgttgtgagggaagacttctttttttttttttttttgagacagagtgtcgctctgttgcccaggctggagtgcagtggcgcgatctcggctcactgtaacctccacctcccaggttcaagagattctcgtgccacagcctcccgagtagctgggattacaggcgcccgccaccacacccagctaattttttgtaattttagtagagatgggattttgccacgttggccaggctggtctcgaactcctgacctcaggtgatccacccgcctctgcctcccaaagtgctggtattacaggcgtgagccactgtgcctggccatgagggaagacttctgaaatttgagacagggacagcacttaccaagggtttatctttctttccctctgtctttccctgccagagggcccaggtcagcggtcaagactggcctcaatgcttgactcagacacagaaggcgaaggggacattgcgggtaccatcaacccctctgtggccatggccattgctggtggccccctagcccctggctcccgggccagcatctcccaggggccaccaacggtgagtagggaggcttgtccccatagacatcatccactttgaatgagagaagtcatgtatcaagatacagattggccaggattcatctcacatggagaaaatggaaattgactttgattcctctctggccccaggcttctcgcgcaggctgtgccctctctgctgagtcaagccggaccttgctggcgtgtgtgctgtgggtgctgaaaaacaccgagccggcgctcctgcagcgctgggccactgacctgacactcccccagctgggacgtctgttggatttgctgtacctttgcctagctgcctttgagtacaaggtttgagggcgtgggcaggagatgatggaggaggcaggctaaggatgtacccagggacccagcgtgctgcgggctgagtgggaaggggtggactgtctttgtgcaga

SEQ ID NO: 90883 - DNA, 1767 bp, Homo sapiens
tcctaggggtggcagatgatcttggtgagagccaagcccctgtcggggctgaggtttgggtgtgtgggttgacaggcacctgtgtccccaggatgtggagctggccgagcacctcaacgccagcctggctttcttcctcagtgaccttctgtccctggtggaccggggctttgtcttcagcctggtccgggcccactacaagcaggtaggagtgggcgtgggcagggtgggcatggcatggatggaaggcggagcaatgttgacatcactgatggccacccctctcctgcaggtggccacgcggctccagtcgtcccctaatccagcagccctgctgaccctgcgcatggaattcacccgcatcctgtgcagccacgagcactacgtgaccctcaacctcccctgctgccccctgtcacctccagcctcgccctccccctctgtgtcctccaccacctcccaggtgggctgccttcacttctgcctcctctctttgacctacaacctctcaccttcagtccatctcctatggttccctcatctctgtccctttcacggtggaccactgcctaggtgaactaatcccttatgtttgacttttgacttctgacccttcacctctcttgccattctcagcaatttcccagaaggactaacctctgatttctctcccctaaatcctaactcccagcccagtgttccatctgctatttctcagtcctctgacttttgactccgtgccctgttacatcacagatgggttaacgtcagcccctcacttctggccttgaaacccatgcccactgtcacctccagatgacttaacatcagtctttcatctgtggctattggcaccatgatttctgtcacctccaagatggctttaatggtgacctgccacctctgacccttgaccgctggcatcccccatttttcccccactctgcagagctccaccttctccagccaagccccggaccccaaggtgaccagcatgttcgaactgagtggaccattccggcagcagcacttcctagctgggctcctgctgacggagctggcactggccctcgaacctgaggctgaagggtgagcagagctcctgtctagccccaggacaggtgggacagtccaggagccatgtccaccctgtcctgagcacctcattaccccatagggcattcctgttgcacaagaaggccatcagtgctgtgcacagcctgctatgtggccatgacactgacccccgctacgccgaggccactgtgaaggctcgtgtggccgagctgtacctgccactgctatcgattgcacgggataccttgccacggctgcatgactttgctggtcagtgggccaggggaagatggggtcacatgatccagggacttggtcacagaaggcacaggatagtaaaggtgggagaacacagtcactggtatgagtatagacattaggattagcagagcaggttaaagtgctaggacagactacttaagtcataacatctctgagcctcaggtttctcccctgtaatggagacagtaacaacaccaactacttcataaggttatgtgaaaatgtggggggctgtagtactgagatattgtcagcctacaatagatgggagatattattgtaccatttattattttctaagaagagcaaaaagtagggaacatccaagtgagaaaatgattggagtacattcattcactcattttcaacaaacatttataggcattgttgaggggggtggtataacag

SEQ ID NO: 90884 - DNA, 1031 bp, Homo sapiens
gcttccttacacacttggccctagggcctattccagctctgtgcccatcaccaaggtaacctgtaccctatgacaggcccaggggactcctagcagaacaagcagggggggcctttgggcagtcatttccttggattgctgggaatctggaaatctgggtgacactgaggctgggccttttcaatggaaggccctcacggtgcacagtgagttgccagggtatggctgggactggggtagctagagagccctcaagtgtcagagtaggtcccagggttgggtcgtctctgtcatcagacctcctgttcctgcgagcagcctcaccccctaaccagcgaaggaggaagcgagagtggagcttgaactcctctgcctatacccatttcacagatggggatactgaggcccaagccaggcttgggcagggccaggcctggaaccttgggctctctctgctattcctggcacctcaccaacatctcacctcctctgtccttatcttcctgccttgtctttctcctccttccccatcttgtgtttaacctcctctgtccacactcaccctcctccacctctgcatcctcctctctgtcctctagactcactgactcggtcacactctacacctcgtctacactcaccctcaccttctctggccacacacattcttgctgtctacactgatttcatctcctctgccttcaccccacacaccatgtacccattcccagccttcgtgtgttctcggtcccactccatccacactcctcctgcctgttgtggttgcactgctgtcactggtcactggcgtactgtgttttcattgttattctcacctcctccatcacgttcttttttttttgagacggagtctcgctcttatcactcaggctggagtgcaatggtgcaatctcggctcactgcaggctctgcctcccaggttcaagcgattctcctgcctcagcctcccaagtagctggaattacaggtgcctgccaccacgcccagctaatttttgtatttttagtaga

SEQ ID NO: 90885 - DNA, 2497 bp, Homo sapiens
agagtgaaactctctaagaaaaaaaaaaaaaagtcaggatcttattctgtcggccaggctagagtgcagtgtcacgatcataactcactgctgccttaaactcctgggctcaagtaatcctgttgcctcagcctccccaggtaactggaaccacaggcgcgcactgccatgcccggctaattttttcattaatttttttgtagggacagagtctcgctatgttggctgggctgggcttgaactcttgggctcaagtgatcctcctggctcgccctcccaaagtgctgggattataggcatgagccactgtacctggcctattctcagtttttcagtgcccccccaatctctgtgaggcggcagccattatgcctattttatagatgaggaacttagaggctcagagaaggaaagtgattttgcagagattagctgagtaggaagggactgggaggcatcacatcaggtgggtgggtggttgaccctattcactccatcctcaggggcccctccagtgacagtgcaggctgccacactggcccgtggctctggtcgccccgcaagcctctacctggcgcgttccaagagcatcagcagcagcaaccctgacctcgccgtggcccctggctctgtggatgacgaggtttcccgcatcctggccagcaaggtagggcaacgggggccctggaatctccagcctcagtggttgtggttgccacgtgtgtgggcgaagaatctgttgatgaagcatgggaaacaacagagacgacaacgtgaatgaaggcgtcactctgggcagcagagttgggctgggctgtcacaggttgtggggtatggatcagactttgtgttgagctctactccgtgactgacccgaggatgggtggcggagcttggcgtggctgaacaaagagcaatatgtacctagtgtagcaggtgcatatacacattcacctcatgcatatacctacacaggtgcatatacacattcaccccccatgcatatacatacacaggtgcatatacacattcaccccatgcatatatgtacatgggtgcatatacacattcacccccacatgcatatacctacacaggtacataggcacattcaccctatgcatatatgtacatgggcacgtatacgtgttcaccccatgcatgtgtggacacaagtgtgtatacatattcaccccatgcatatacagacacgggtgcgtatacacattcaccccatgcatatacttacacaggtgcatatacacagtcatcctgtgcctgtatgtacctgggtctgtatacacattcacctgatgcatatatgtgtacgggtgtgtatacacatgcaccccatgcacagacttacaggggtgtgtatgcatgcacctgtggacccacatacacaagttatgtaaaggcatgcacccaatggacctatatacacgtgcacatttttcaggattgtgtgtaggtgcacatgtgggcacatgtatggtccagaaccatgtccacgcttggtatttcatgctgctttccctgccctccactggggatgctaccacttctccgtgtatctccagggcatcgatcgctcacactcctgggtgaattccgcttatgctccaggaggcagtaaggctgtgctgcggcgggcgcccccttattgtggggccgaccccagacaggtgcccttcctacctgtccctgcactcatgtgacaccacctcagcatgagctcctcccaccttcctggctgcatctgactaacctaggggggctgcctgaaggaggtggcagacccctctcctgcctttgtttggggctgtgaagtctgtgtttaggtatcactgggtcatcctaactggctttttgctgccacataggccacagtctcagatggagacagaaggcacaggggtaatatgcaaatcgcatgcaaacgaagtgcaaatccagtcacccataacctcactgccctgcatggcctgttcacctccctttaatccacccctgatgatgggactctcaaagggctggaatggaacctctcggctcccctatcccattttagacaaagagctccccttaccctgcctctttccaggtacctggtgtagggggacgctttgcctccaaacagacctgggttcaagtcctagctctgctatgagctcaccccatgctctgagcaattggatgcatcttcctgagcctcagtttcttcatttgtaaaatggagataacactccaaattttcggatgcagtttggactcaaaatatagtgctcccccagcagtcctgagcctgtgcttgagttagggctgagggcactgcagtgggattttgttgggatgatagattcttggtctggccttgaccctgagcttccagctagttggggaaatagacacggatcaaacaaatgcataagtatatgatcacacagcgtggaaaggaagcaagtagcaaccgaataccagcttccctctgggtggt

SEQ ID NO: 90886 - DNA, 2143 bp, Homo sapiens
cctcaacttcagcagccgccagggctccgtgcgcaaccttgctgtgcgagtgcagtacatgacaggcgaggaccccagccaggctctgccggtcagtggctgtgccccagggaaggggggtagggcatcccccatgggtccctcatgaatccactctcccaggtcatctttggcaagtccagctgcagtgaatttacccgcgaggccttcacaccggtggtctaccataacaagtatgtagggggacacgtgaggaacttgggggcactcatgggggtaggaggatgtcccttatatatacacataaggcagcatcgatgggaagatgggggacaggaagaagagaggtagaggctcccagagtgctaatgagggaagctgaggcagacagcagagacagtggggcctagcagcaataagggcgtggcatggcagaggtgatggggcagacagtggggaccccagcccccagcagatcccccagcccgattctgccaggtcccccgagttctacgaggagttcaagctgcatcttccagcctgcgtgacagagaaccatcacctgctgttcaccttctaccatgtcagctgccagccccggccgggcactgccctggagacacccgtgggctttactgtgagccgtcccctccctccctccccctgagccctcctcgtcccccaacctggccgcagacctgacctccagcctctccccagtggatcccactgctgcagcacgggcgcctgaggaccggccccttctgtctcccagtgtctgtggaccagccgccgcccagctattccgtgctcacacccgatgtatgtgccctggagctcctgcctgccaatgcactgtccccagaagcactcccgagtcacctgccttccttcctgtcaatcctgggaggcttgttatcctctactggtgcctccagggcccccgtgtagctcattattcccctattaatgcctctctgtgtcctacatgtcctccccaaagattcccattgcctctctgctccattcccactttagccaccctgactgccttcctgatcactgtcccctgccctcgtagtaccttatcattccccatgaatgcaccattgttaatgaccctaggcctcaaatcctcctatcctgtttcctgacctactcaatgaatattcattcaccctgtgtctccattctctgcccccgtcttggcatgtggatttccagcctgcccagtggaccctctcagtctactgggaccagggctgggggcagggtgcttggctgcacccccagaccgggctacactcacgctgcagtgtcgcaatggctggggccgctgggtgacctgatcagtcagggagggctgaccagtgcccacctggtgcctccctcccacaggtggcgcttccgggcatgcgctgggtggacggtcacaagggcgtgttcagtgtggagctcacagccgtgtcctctgtgcacccccaggtacggggtgggccgggaaccaagagtcccgccctgctcccctcttgcctgccctacgattgagtaacagttgccgatggccggggaggtctggcctcaggccttggacgtgactttggtcagctggacccagctttaagggaagctgctgattcaggcaggggtggtcttcattccctgaggccccaccctgctcactccacatccctacccaggacccctacctggacaaattcttcaccctggtgcacgtcctggaggagggagccttcccattccggctcaaggacactgtgctgagcgagggcaacgtggagcaggagctgcgggccagtcttgcagcactgcgcctggccagccccgaaccccttgtggccttctcccaccacgtgctggacaagctcgtgcgtctggtcatcaggcccccgatcatcagtggccagattggtaagcgaatgtggcctcagacctcagtttccccatccacatggcttctcagtcctgaggtcctgagggatcttctataagcccatttacctctctggccatttttctcatctgaaaaatgacctccagtcccctgcacccagagaaggtcttctgtgaccctttggcccgggtgcagcggttcacgcctgtcatcccagcactttgggag

SEQ ID NO: 90887 - DNA, 1258 bp, Homo sapiens
aaccgaggcaggcagatcccttgaggtcaggagttcgagaccagcctggccaacatggtgaaatcccatctctactaaaaaatacaaaaattagctggtgcacctgtaattccagctactcaggaggctgaggcaggagaatcacttgaacctaggaggtggaggttgcagtgagccaagatcacaccactgcactccagcctgggcaacagtgagactctgtctcaaaaaaaaaaaaaaaaagaatttattgagcaccaactgtgtgcccgccccatgctgaatattttacctgcattgagtacctggccctactgtgagatatcaggtgttgcccttatttgcaactgaggcacacaaaagggaaactgaggcacacaaaaggacttgagttttgtctggggacatgcagggtagaggccacagagctgggaggctgatctgggaggtctttgggactcaaggtgcagaagcgagttctggccggaaatcagggtctcagcccactagggttgggggagctccttacctttaagacctcaaattctcggtaggcagggcccagccaggcgctcctcagctggacttctagccgctgcacgctgtcccgtagcaccttctgtgcctgggccacctcccccagcacctcagctgtggcctctgcctgcagctgcagaatatcctcctccatctgcttaataaacagtgggtcactagtaggatgtccaactcatctttgtgtacctaaggacttgcctgagtttatcgctgaaaatcttgtatcccaggaatcccttcagtcctgggcaaaccaggatggttggttaccctagacacgaactcctctttggactcctggccaccccacagtgtcgcagctacggtgcccacctgagtctccaacaggcttgcccgaagttcctgggctgcatcccggccccggctgacctcctgccccaggagttctattgtgcggccatagagacccaggctgttcctggcctttgtcagccgtccctccgtggtcctgtacacaccgttgagggcctggcccagctgcagggtcccatggaagagcagggtcagctcctcatgctgtgccagttctgggccgcccatgggggccgctgaggcaggccgggtcaccattgccagggcccagagcaggcacagagcaggcactggcatgactgagggtctaaggtatagccacagcactgtcactgaagccttttatgcctcatacccccactgatcc

SEQ ID NO: 90888 - DNA, 1076 bp, Homo sapiens
ttccccgcccgcgaagtctatgccccccataccagctacaggtacggcctctggggcccagctgggcacttgaatgggaggtattcatacatcatgctgggtggggtctccctaagccaaggacacacacagacaccctgggtgagatgccacgactctgctttaatgaggggtgtgtaggcatgaaagggtacatgtccttcctccacccctccccaatggggctacatcctctgcctttgtccccgcctgcgtctgtctctgctctgtgctcagaagtggggcccggcgccctggctgatcccagtgaacaggcagctcctccctgcacaggggcctcacggggcgtggaagtgttccttgcagcatgattggtcctcagttccatccaggcagattcaggctgggagcgccgctgtgtggagtctggggagggagatgtggctcagcccaggtgagggggcccctttccagctgccctgtgcgccccccatccaactgccctgcctgccaaacccctgccaggctcacctctcctggatctgtcgcagccgatgctgctgtgccaccatctcccgcctctgccgctgcacgtggcctgtgagggcccataggatgtggctctgcttgtcagcgtgagcctgtgggggtcagaatggaaacctcagccgacagccacctcacctcccatcccctgaccctctgccccagcccctcattgtatctgtgtgacccagcaagtcaacaatgctctttggcctcagtttccccatctgtaaaatggggataaaataggactcacttcatggggaggtgatgaacatcctatggatttttttttttttttgagtctctctctgtcacccaggctgagtgcaatgacacgatctcagctcactgcaacctccacctcccaggttcaagcgattctcctacctaagcctcctgagtagctgggactacaggcatgtgccaccacgcccagctaattttttgtatttttagtagagacggggtttcaccatgttggccagggtggtctcgaactcctgaccttaagtgttccacccacctta

SEQ ID NO: 90889 - DNA, 1050 bp, Homo sapiens
agctctgtgaagtcagggcatcagctacagaagggtaaactgaggctcagaggtggaaatgacttatccaaagccccaaagcaaggatgggaagggatgtatgttctggatggggtccaggggcagggctgggtgtgttggggaacagcaggatggacagaggtcccccagatgagggagcagaggccagggacccgtgggcctccctccagacctggaaggccacaggcccagccgggaggggaaggagagtccgtgatggcttcagaccccactggtggcagcattctcatctcctgatctgtgcttgatggggaacgcgttgggggaactggggagctgtgggcccttaaagcctcagcactcctggttctcttggccctcggcctatttatttcgttccacaatctggattttcctcatagaaagaatctgtccgctccgctgcctgagttttcccgtccccaatggccccctccctatctttccaggacggtggccgcagaggtgcggaagcaggtgtcccgggaacgcagtggctccccccactccagcaggcgctgcagcagctccctgggggtaagtatttggggggtccgcccccagccctctgccctctctcagacagaggtaggggcttccttggcctaggttctatcccaccccctccctcctgtggcctgtcctggggggaaaccgagagggacccagcagtgtcgggggagggagtgcctgtcctggtcctagtagtctcaccaattcctgtggccactctccctgccgctgcttgtcaccctgtgggtggtcaggggagtggctccctcctgatgtcccccatctccagccacctggaccacctagatggggatggaggagggagaagttggggaggggagtgactttcgcctgagaggggtggggccatgttgcccacagggttgcggaggctttaggaattgtctcttgcctggcctctgtcaacatttctttccttccactgttagtttctgcccttccaggcatggggtgtgatttccttcctggagcccc

SEQ ID NO: 90890 - DNA, 1013 bp, Homo sapiens
ctcaggattctctcaaaaactgggaataatatgggaacatttgtttcttctaaaaataaggcaaatgttacattgaatgatttggggggtgaggtttaattggaaatggtctctggggactgaaaactgatgtttttgcagattacctcagggaaacggaggtttgttgagtttacagacacattaaaccaaaggccgtgggaaaacccctctccagctccaggggattggtcaggaccacccactaaccagtgccttccttcttaacattcacttttagcagcttgtgtttattttacatgggcagttttgatgggaaattgccatgaccacaggggtttggagttctgctttttttttttcttcttctttttcgggggactgggggactcctcccaagatcacattttagcatctttctctcctactccatttagaaaaataagtaacaggtgaaatgtggtctcagtgttaacgggataattctgctaccggctcctccctgatgattctgaaatacactactgaacgagctctggctggtcctttctatcctggatgtggttcttctgtgtagcaattccttgatgtccagtttggaaagatgtactcttctcaacaagaaaaacttaaatccgtcgtgcccaaatatagttgtgcttttatttccattagtgaagtgcgtttctgggaaagggggtttgatttgcaactaagcagatatcagtcaagggctcttcaagacacagcagaaacctcaccgggcctcgggctgcctcccactgggtcccatggccaccaccttgaccttggaaagctctgttatatggaaggtagggaggacactatttccctcaactacttctagtaaaaagctcagttctctccccagcagcaagagggcacctgtgaacacctgagtcacagcgcattcctcctctgcttagaacattcgatggctcccaccttacttgcagtaaatgctgaggtccttcctgtggcccccggggccc

SEQ ID NO: 90891 - DNA, 1080 bp, Homo sapiens
cggttcctaacggtgggatcggtgtcctcgggatgagatttggcgtttcctcggggctttggtgggatcggtgtcctcaggatgagatttagggtttcctcggggctttcgggatcttcacctaatatccggtattattttatgagaggagtggtcttggctgtcagaactggatccctggggtgatatttgggaattagtggagtgatctctgaagacctagggctatgatctggagctgctgtggctgaaatttggggcctctgaagtggcatggagattgaggtccagagagcctgagatcttgagggctgacatttggagagatggggtcgagggttgtctttgggccttgactgctttgggcctttctcactctcattcccgggatgctttgccagaatctctgctggattggccgtaaccctgtccccgagcgggctcacagggtctgaaggccacgcatgaggcaaaggtaaagttctgagccacccggtgcctccttcccaggactgcaagatggaggaaggcgggaacctaggaggcctgattaagatggtccatctactggtcttgtcaggtgcctggggcatgcaaatgtgggtgaccttcgtctcaggtagggaccctcagcttggatgtcatgggtacctggggtggggatggaaataagaggggaaccgggaagtgccctaacacccctgtggtccccataccctgcaggcttcctgcttttccgaagccttccccgacataccttcggactagtgcagagcaaactcttccccttctacttccacatctccatgggctgtgccttcatcaacctctgcatcttggcttcacagcatgcttgggctcagctcacattctgggaggccagccaggtacgtgggtttgagtgccactgccctctggagacttgttcccaggacctcagtcagcgcctatggctacaccttttccagggggggaaaaaaaaaggctaggcatggtggctcacgcctgtaatcccaacactttgggaggccgaggtgggcggatcacgaggtcaggagttcaagaccagcctgaccaaca

SEQ ID NO: 90892 - DNA, 1034 bp, Homo sapiens
ggtggtgagggcggctgtgggtaactgtgattgtgtggttgtcattgtgtgtctgtgtgtggttgtgtaactgtcatcgtgtggctgcatgactgggattgtgtggtttcgggaggtccgcgggtgtgtgtgtgtgtgtgtcactgtcattgtgcggctgtcgttgtgggtgtcactctgatggtttgtgtgtgtgtgtctggctatgctgtgactgccattggccccccgtgtggctgctgtctctgtgtgtgactgtcttggtgttcgtgtggttgtgtgcataggactgtcattgtgtggctcctgttgtgtgttcattctgatggtgtgtatgtgtgtgtggctgtggtcgtgcgctgtgcacctttcttgtgtggcattgtgagtctgtgtcatggtccatggatgtggccatgtggttgtagatggcaccttgtctctcccctgtgactgttggtgtgaataagagactgttagtgtgtgtgtggctgtcgctgagtgccttgtaattgggggtgtgacgctgtgatgagttctgtgacccccattgtgtgcggtgactcttttctgtgactcttaagtgtgttgcaggcctgactgtgtgtccctgactgtagcggtgtgggggcttgtgtgggactgtgatgtgtgtagggtctcctgacatgtctctctctgtttggcctggggtgggggtggggacttgtttgatctgtttggtgtctctgacaggctatgagcccactgtgtgtgagtatgcagtgacatgtgttgtgtgtgttggacacctgtctgaacaagggggcccctcttgtttactgcaaagtggcgcccagcacagcgcctggaagtcggcaggtgctcggtcttcactgtgggatgggtgaacgctatgccatggttgtgtgtgtgtgtgtgtgtgtgtgtgtgtggtgccaggatggaggctgcggctgggttgtgcttcctaagggtgacagcatgggtgactctgggtatctaggacctctggcaaccatcaccccatatca

SEQ ID NO: 90893 - DNA, 2171 bp, Homo sapiens
ctccgcatctctcggttgccaggtaaccgcctccccgtctctctccactgtttccatggagatcacccgcgttccgtggctgacactgcgttctcattggctgaggctgcatagaggggcggtcccaacagtgggcggggtagagccgcgccgcaggacggagggtctggacactttggggtcacgtgctcattccgtttccctacctcccccaaccttatcccgcccctgggggttcgcgggcatttttcaggaactttctttccggcttgagaagccgccactcccaagatggaggtacgctgcgccgccattaagagctagccctcagaactatcctctctaaggtttcacagtcctgcccaagatggccgtctcggctctggcaccgcccccactcctgcctctcccaacatggcgaccctgagtctccgttcccggtgcggaacgtacgaccggaagtgacggggtccagaaatttccgctttctttctgcagcaggaaccgcggctgctggacaagaggggtgcggtggatactgacctttgctccggcctcgtgtaggtgtgaacgagcgggtgggagggcacctcagtttcttacagggggcaaccggagggtgcatgtgtgggtgtggacggcggaggctgttaatccctttggtctgttggcgggaattgggtcacaattgggcacagggagcggaggttttgagatcttgagatcctcgccattgatttgagcaaagtgagactggccaggattggggagatcgctgcccctcgcccccatatcggaaacaaagtgaggcctcattgcctggaagcgatggaggaatccaattggctggaagtagccctctcccactgaccgggatccgctttcttcctgcagcgtgaagacacagcgcatctccccgctgtaggcttcctcccacagaacccgtttcgggcctcagagcgtctggtgagatgctgttgccgctgctgctgctgctacccatgtgctgggccgtggaggtcaagaggccccggggcgtctccctcaccagtgagtcctcctgttcaccctcccgccaggctggaggtgggaggggccaacattgggccttagggataggcatttacagccttttgactcagtttcccggtagtgctccgctggtggggatgggaggacagaggtggtatttggtggagaaggcgcttacctgccctgggctgagcttcctgtaccccgcagatcatcacttctacgatgagtccaagcctttcacctgcctggacggttcggccaccatcccatttgatcaggtcaacgatgactattgcgactgcaaagatggctctgacgagccaggtgagccttttctctgttcatccatcagatgtttattgaacactgctcagtgccaggccctgtctgtgtgaccaagatactacctctgctggctcccctttgagtgggcagaaacaagctcagaagtcagtggtcagtgttatggccccgggcagctggaggagcccagagtcgtcctcctcccaagcctcggggtcagagaaggctcctccaaggaggtgaggtttcagttgaatcccgaaggtgctgcagatggaggggtcaacacgggcaaacccctagaagtgggagacagggtggggccaagagcaatccagcaggagacagaggtgaagggagaccctggctttttgtttttgtgtgttttgaagagacagggtcttgctttgttgctgaggctggagtacagtggcatgatcgtagctcactgcagcctggaactcttgggctcaagtcatcctcctgccttggcctcccaaagtgctggggttacaggtgtgagccaccgtgcctggatgagaccgtgtgttttgttttgtttttgttttgagacggagtcttgctctgtttcccaggctggagtgcagtggcgccatctcggctcactgcaagctccgcctcccgggttcacaccgttctcctgcctcagcctcctgagtagctgggactacaggcacccaccaccacgcccagctagtttttttttgtatttttagtagatacagggtttcactgtgttagccaggatggtctcgatctcgtcaccttgtgatccacccgcctcggcctcccaaagtgttgggattacaggc

SEQ ID NO: 90894 - DNA, 1078 bp, Homo sapiens
gtggggccctgcagggaagaacaggtgggccacatggtgcccccaactgagagccactggggcctcacccctccagtctgcttctgccacgcccccgcagggtctcggtgactgagctgcagactcacccggagctggacacagatggggatggggcgttgtcagaagcggaagctcaggtacccccggctgccccttggttggggacttctagggagcattgccccagggtgacctcagggcacaggagggggaccaaggaaagctccttgctggcctgggatgcctcctctgggtgagctgggatggcagccactcagggccgcttcccgcctggcaggacccgggatggagccaggtcgcgctggagcccgtttccccgcacctgcccccactctacccgctgttgagcacccaatccccttcctcccccacccctgtcctgccctattcccctcctcccccacaccctcgtcccctgtctgtctcctttcctatcctcctccttccccgtggcccctggcttctggcctcccttctctgcccacccctgggtttctccctctccatctgcagcctgggccttggcctctcccttggagggcctggccctctctggtcctgggctctctcttcctccatctgtacgtccgtttgtccatctgcttctctctttctgtctcagtgcccccaaccactccagcccctggtctcctcctcccctcccacgggcctgtgctgccccctcctggccgcagtgcctcactggcgtggccctggcctggtcatcagggcccggggcccagccctcccgtgcctggcaccgcagcccgggtgccggggtggccgagatgggggacacgtggtggcctagatcttgacaccacccccaacacacacaggccctcctcagtggggacacacagacagacgccacctctttctacgaccgcgtctgggccgccatcagggacaagtaccggtccgaggtcagtggaggagaagggaggggacttggtcctcccaccacactgcccccaccccgcctcacaaaggagctgcctctggttctggcacc

SEQ ID NO: 90895 - DNA, 1404 bp, Homo sapiens
cccccggcttctgtctggacattgcatcgccctagttttctttctttaaaaaaaaaaaattccaacagaagccacaggccggagcccctgggagccctcgcaccgctccccaccccactcagcggccccatcggaactgagaattgcaaaacccccgactttagctatagttaagttgccttcccccggtgtccccacgtttggtgtctggctatggcgcccccatctgactgtccagctctctctcccccacccctcccggtgttgttattaaacgtctgtggagcttctgctgcaaggaacaaaaaagaaaaaaatcaaaaaagcgacaaaaaaacacaaacagaagaggaaaaaaaagcaacaaaaaaagaaaacacacagaagagatttaaaaaaaaaaaaggaaaaaaaaaaaagacataaactggcaccagttaactttcttgtacttttttgctgaatttagcttcttgtagttttaacttattgctatgttaactatttattctcctcgttgccctgtaaggacatccgtgtatatttctgttacttcatccggtttgcaagttaaaggaacgacaatgttctctttgtttctttaagttttgccgagacatggttatgcctaatttatttataaaaggggaagtggaatcattaaagtaataataattattaataacagtaatggtagccgagtggcacgcgggggcgtgtgctctgcgggacagtccccacggccagcgacgtccaggtcaccaatgggattctttttgctcttgtcttgagaattttttcagtcctatttagctggtgaaatccctagcttgttcttgatacacgaacctatttattctcgtggttttaagtcctccctgccctctctcctctcccctgcagcagggcagggacccctctcccctgctgtctcttggggctctctcccctccgccctctgcattcgggaacacgcacgtccgcgtgggaagcttgcagcagggcgtccgagcaataagggctgggtttgtcccccaccctggggggggccaggctccagagagggggcacctccccacacaccccccccccaccgaggcctaggcccctgccacccccaagactgggaggggacttctttttctaaaacacaaaactcagcccagccaggccccctccctggaggccagcccctccccgcagggggccaggccggggctcccaggcgagggggacttggggcttccacgtccctggggggcaggggccaggccaggggggagggggctcagcccctccacccctcccttcatcctgttatttattcggaaggtttcaaatcacgacagagtccatgttggaggtgataaaaaactgtaaaaaaaaaaaaaaaaaaaaagacaa

SEQ ID NO: 90896 - DNA, 1048 bp, Homo sapiens
tgatccgcccgcctcagcttcccaaagtgctgagattaggggcgtgagccactgcgcccgacgtgaaagcgtttccggtgtgaaagcgttttttattttgtaaatgcacaggttgattttaggcctctgtttgcgtatatagtagtcatataagggatttcttgcagtaaaaacatcaggtgctttgtttccccccaatgcttattccaatatatggaatcccatcattattcccatcattagaataataaagtgacccctccccatgacgaagcccctataagacatggctaattcatcaccaccaagccactcattgccgcaggcccctggtgtggggactgggcggtgagcggatgcgacctgttatctccagcagatactgggggccatggagtctcaggtgggggggggcccggccggcccggccctgcccaacgggccactccttggtacaaatggagccactgacgacagcaagaccaacctcatcgtcaactacctgccccagaacatgacccaggatgagttcaagagtctcttcggcagcattggcgacatcgagtcctgcaagttggttcgggacaagatcacaggtgtggctgctggagttgcggggaggaacagaggtggtagcctcagaaatacagaggtgatgggggcaggtgggacccttgctgaggtgtctcgggggtaatcgaggcaggaggtggtctagggatgtgaggtctgatggggagatgggtataccccctaggtgaaggtctcaggagcgatggaggcaggtgggactctagcatcgaaggtgtcatctggaaacaggaaggtggaaacttggtggggaggggacagtctctcaggcctgaggtgggacactggcaggtgtcaaggctgggtgggaaggtcatcattctggttctgcccacagggcagagccttggctacgggtttgtgaactattctgaccccaatgatgcagacaaagccatcaacaccctcaacggcctcaaattacagacgaagaccatcaaggttggtgcctccttct

SEQ ID NO: 90897 - DNA, 1088 bp, Homo sapiens
tcagggaccgtgcccgcaacaccggagtcatctcttgtaccgtgtgcctagaggaattccagacgcccataacgtgtatccttggaaacctgggctttttccagagggtggggagggggctggagtccggaccctgctcatctggcccactgtgtgccctggtgcagggccaaagccgtccagaggaacaggtgccacctagtgatttctgtggggtgagaagatgcagggcagggttccaatgccaatgatcgcccttgacctaagtggcccagatctgtcagaacccgtggatgtgtacagtgattggatagacgcctgcgaggcggccaatcagtagcgacacagaggacccgccccctgagcagccccgcgtactgtggatccagctgttcggttctggtccagagacattccaggggtccagggtgtgggtcctgggctgtcacagccgtgtgtgtgtgtgtgtgtgtgtgtgtgtgtgtgtgtgtgtgtgtgtgtgtagtgggtgtgcgtgtgggtgtgggtgtgagtgagtgtgggtgtgtgtggctgcacgtgtcactggggtggccgtgagtgtgtgctcacaggtacgcggtggtgtcgggttcctgggcctgaggggcctgaactgatctcacttggctccgaaagcctttgctgtgttccctgcagcccctggccccccagccttggggctctggctccccccggcggaattgggggactgtttcctgacatcctggacaagggaagcccactagaggctggaacaggacctctccagcctcctcaccagcaccgtgcccatctcaactggacttcccgctctccttctccaccttctagtgcccgtggccggggattcaaagccgccgttccccaggtccctgggctgggccctgacagggagccgcccccctccccatggtaaccaggaagcccgtttcatgttcagttgcttttgtagaggaagcaagggctgggatggggacagctgtcaatcacaagcccttaaataaagcagccagcgcacatcccttgctgtccgtgatgtcttgggttctgcgtctgcctggtcacca

SEQ ID NO: 90898 - DNA, 1005 bp, Homo sapiens
atgtaagaaatgtagaaaagcattccataatttctcttctttgcaaatacatgaaaggatgcacagaggagagaagctctgtgaatgtaagcattgtgggaaagcattcatatctgccaagatcctttgaatacatgcaagaacacacaatggagagaaaccctatgaatgtaaagaatgcagaaaagcattcagcttgcctacttcctttcatagacatgaaaagactcacactggaaggaaacactatgaatgcaagcaatgtggcaaagctttcacttcttccagttcttttcaatatcatgaaagaacacactagggagaaaccctatcaatgtaagcaatgtgcaaaagcctttatttcttccacttcttttcaatatcatgaaaggactcacatgggagagaaaccctatgagtgtatgccaagtgggaaagccttcatttcttctagttcccttcaatatcatgaaaggactcacactggagagaagccctatgaatataagcaatgtgggaaagccttcagatcagcctcgcaccttcaaatgcatggaaggactcacactggagaaaaaccctatgaatgtaagcagtatgggaaagcgttcagacctgacaagattctttgaatacagataatgaatgtaaacaattaactgtttataataactgtatactaacaaatgatattctttttaaataagaagctataatatcccattggtgtcatgtattagatcagccttatactgttaaattgttattatttggacattgtgagtcagtataaccatgtggataaaatgccagacatctttttattcgaaaattttacttttcatgcttctgtacttacatttttatctcaaccttaatttttctttctttttttttttcccccagaaagaatctcactctgtcacccaggctggagtgcagtggcatgatctcaggtcactgcaacctctgcctccagggttcaagcaattctcctgcctcagt

SEQ ID NO: 90899 - DNA, 2851 bp, Homo sapiens
agtgttaaaaatgcaagtgcaatacttgttgattaatatagaagtacttgtaaacaaacccttcatgatgtgtttctcatgttttacaggagtctcatagaagagaaagtcaatgaaattaaagaagacagtcattgtggagaaacttttacccaggttccagatgacagactgaacttccaggagaagaaagcttctcctgaagtaaaatcatgtgacagctttgtgtgtgcagaagttggcataggtaactcatcttttaatatgagcatcagaggtgacactggacacaaggcatatgagtatcaggaatatggaccaaagccatataagtgtcaacaacctaaaaataagaaagccttcaggtatcgcccatccattagaacacaagaaagggatcacactggagagaaaccctatgcttgtaaagtctgtggaaaaacctttattttccattcaagcattcgaagacacatggtaatgcacagtggggatggaacttataaatgtaaattttgtgggaaagccttccattctttcagtttatatcttatccatgaaagaactcacactggagagaaaccatatgaatgtaaacaatgtggtaaatcctttacttattctgctacccttcaaatacatgaaagaactcacactggggagaagccctatgaatgtagcaaatgtgataaagcatttcatagttctagttcctatcatagacatgaaagaagtcacatgggagagaagccttatcaatgcaaagaatgtggaaaagcatttgcatataccagttctcttcgtagacatgaaaggacccactctgggaaaaaaccgtatgaatgtaagcaatatggggaaggcttatcctatcttataagttttcaaacacacataagaatgaactctggagaaagaccttataaatgtaagatatgtgggaaaggcttttattctgccaagtcatttcaaacacatgaaaaaactcacactggagagaaacgctataaatgcaagcaatgtggtaaagccttcaatctttccagttcctttcgatatcatgaaaggattcacactggagagaaaccctatgagtgtaagcagtgtgggaaagccttcagatctgcctcacagcttcgagtgcacggtgggactcacactggagagaaaccctatgaatgtaaggaatgtgggaaagccttcagatctacctcacaccttcgagtgcatggtaggactcatactggagagaaaccctatgaatgtaaggaatgtgggaaagccttcagatatgtgaagcaccttcaaattcatgaaaggacagaaaaacacataagaatgccctctggagaaagaccttataaatgtagtatatgtgagaaaggcttttattctgccaagtcatttcaaacacatgaaaaaactcacactggagagaaaccctatgaatgcaaccaatgtggtaaagccttcagatgttgcaattcccttcgatatcatgaaaggactcacactggagagaaaccctatgagtgtaagcaatgtgggaaagccttcagatctgcctcacaccttcgaatgcatgaaaggactcacactggagagaaaccctatgagtgtaagcaatgtgggaaagccttcagttgtgcctcaaaccttcgaaagcatggtaggactcacactggagagaaaccctatgagtgtaagcaatgtgggaaagccttcagatctgcctcaaaccttcagatgcatgaaaggactcacactggagagaaaccctatgaatgtaaggaatgcgaaaaagcattctgtaaattctcttcttttcaaatacatgaaaggaagcacagaggagagaagccctatgaatgtaagcattgtgggaatggattcacatctgccaagattcttcaaatacatgcaagaacacacattggagagaaacactatgaatgtaaggaatgcggaaaagcattcaattatttttcttccttgcatatacacgcaaggactcatatgggagagaagccatatgaatgtaaggattgtgggaaagcattcagctagcctggttccttttatggacatgaatagactcacactggaaggaagcactatgaatgcaagcaatgtggcaaaactttcacattttccagttcttttcgatatcatgaaaggactcacactggggagaaaccctatcaatgtaagcagtgtgggaaagccttcattccttttacttcttttcaatgtcatgaaaggactcacacgggagagaaaccctatgagtgtattctagttccgtttgatatcatgaaaggacttacactggagtgaaaccctatgaatgtaagcaatgtgggaaagccttcagatgtgcctcgcaccttcaacggcatggaagggttcacacttgggagaaactctatgaatgtaagcagtatgggaaagccttcagatctgccaagattctttgaatacagataattaatgtaaacaattatcataagtatactaacatgttattctttttaaataagaaggtataataaaatatcccattggttttatgtattagatcaagcttataatgttacattgttattatttggacattgtgagtcagtattaccatgtggataaaatgccaggcatctttttcctcatggaaagtttactttttgcaccgggcacagtggctcacgcctgtaatcccagcactttgggaggccaaggcaggcggatcacgaggtgaagagatcaagaccattctgaccaacgtggtgaaaccctgtctctactaaaaatacaaaaattagctgggcatggtggcgcgcaccggtagtcccag

SEQ ID NO: 90900 - DNA, 1077 bp, Homo sapiens
aaaaaaaaaaaaaattgctggccaggtgtggtggctcatgcctgtaatttcagcactttgggaggccgaggctggcggatcacctgagatcaggaggtcaagaccagcctgaccaacatggagaaaccctgtctctactaaaaatacaaaattagccgggtgtggtggcgcatgcctgtaatcccagctactcgggaggctgaggcaggagaatcgcttgaaccccggtcatgagccaagatcgcatcattatactccagcctgggcaacaagttgttgttttgaaaatccatctcaaaacaacaacaacaaaaatgctttatggaagaaagtacagaaagcgagaaagggatgtgatgaccaaagcagggaataaatgtttggagtccacggcaacttcttgggaatagagtctaggcccccactgctgtcactctcacccagcctcctctacacatgtgagatgtttcaggaccctgtggcctgtgaggatgttgctgtgaacttcacccaggaggagtgggctttgctggatatttcgcagaggaaactctacagggaagtgatgctggaaactttcaggaacctgacctctataggtaaggatgacaatattccttccctcagtccattagtgaaccagtgtttctagctcatgaatgctgttgagtcatttggaacatagacaggaaatactttgatgaataaatgaggcatggctgcagtaaatcatagacatagaatctaataattttttcacagttttatattgcttcaggactacttttctgtgtctgtattttagggaaaaagtggaaagaccagaacattgaatatgagtaccaaaaccccaggagaaacttcaggtaattggcacttaaagagaaagcagtgtctctagatgattttagtatatgataatatgttgaagagaagtaaaacaaagaactaagtccagtatcaaattcatctcttcttagaatattttctcaaaatcatatatttacatgtgactaagtctgagggctcactcctgtaatcccaatcctttgagaagtggagataggaggatagctt

SEQ ID NO: 90901 - DNA, 1047 bp, Homo sapiens
aaagaactcacactggagaaaagccttatgaatgtcagcaatgtgggaaagcattccatagttccagttcttttcaagcacataaaagaacccacactgggggaaagccatatgaatgtaaacaatgtggcaaatccttcagttggtgtcattcctttcaaatacatgaaagaactcacactggggagaagccctgtgaatgtagcaaatgtaataaagcattccgtagttacagatcctatcttagacataaaaggagtcacacgggagagaagccttatcaatgtaaggaatgtagaaaagcattcacgtatcccagttcccttcgtagacatgaaaggacccactctgcgaaaaaaccttatgaatgtaagcagtgtgggaaagcattatcttataagttttcaaacacacctaagaatgcgctctggagaaagaccttataaatgttagatatgtgggaaaggcctttattctgccaagtcatttcgaagacatgaaaaaactcacactggagagaaaccctataaatgcatgccatgtggtaaagccttcaatctttccagttcctttcagtatcatgaaaggactcacactggagagaaaccctatgagtgtaagcaatgtgggaaagccttcagatgtgccccacaccttcgaaggcatggtaggactcactggagagaaaccctatgagtgtaaggaatgtgggaaagccttcagatctgcctcacaccttcaaattcatgaaaggacacaaacacacataagaatacactctggagaaagaccttataaatgtaagacatgtgggaaaggcttttattctcccacgtcatttcaaagacatgaaaaaactcacactgcagagaaaccctatgaatgcaagcaatgtggtaaagccttcagtagttccagttccttttggtaccatgaaaggactcacactggagagaaaccctatgagtgtaagcaatgtgggaaagccttcagatctgcctcaatccttcaaatgcatgctgggactcaccctgaagagaagcccta

SEQ ID NO: 90902 - DNA, 1005 bp, Homo sapiens
tgtacacaatgtaggaaagccttcagatctgtcaagtacctgcgagtacatgaaagaaaacacactggagagaaaccctatgagtgtaagctatgtggtaagggatttatttcttccacttcctttcgctatcatgaaaagactcacactggagagaaaccttatgaatgtaaaaaatgtgtgaaagccttcagttttgtcaaggatcttcgaatacatgaaaggacacacactggagagaaaccctttgaatgtaaacaatgtgggaaaaccttcacttcttccaattcctttcactatcatgaaaggactcacactggagagaaaccctatgagtgtaagcaatgtgggaaagccttcagatctgcctcagtccttcaaaagcacatacgaactcacacaggagagaaaccctatggatgtaagcaatgtggtaaagtctttagagttgcctcacaacttaaaatgcatgaaaggactcacacaggagagaaaccctatgagtgtaagcaatgtggaaaagccttcatttcttctaattctattcgctatcataaaaggactcacactggagagaaaccctataaatgtaaacagtgtgggaaagccttcatttcttccaactcttttctctaccatgaaaggattcatactggagagaaaccctatgagtgtaagcaatgtggtaaagcctttagatctgcctcaatccttcaaaagcatgtaaggactcacgctggctagaaactctatggatgtaagcaatatggtaaagtccttagatgggactcagaacttcaaatgcacggaaggattcactgcagagacacctgtaatctcagcattttgggaagccaaggcaggaggattgcttaagctgaagaggttgagaccagcttgggcaatatggtgagacgttatctctattacataataaaataaaataggccaggcacagtggctcatgcctgtaatcccagcactttgggaggtggaggcagggag

SEQ ID NO: 90903 - DNA, 2723 bp, Homo sapiens
agaaaatcattgtggagaaacttctagccagattccagatgacacactgaacaaaaaaacttctcctggagtaaaatcatgtgaaagcagtgtgtgtggagaagtcttcgtgggtcattcttcccttaataggcacattagagctgacactgcacacaagccgtctgagtatcaggaatatggacaggagccatataagtgtcaacaacgtaagaaagccttcagatgtcacccctcctttcaaatgcaagaaaaggctcacactggagaaaaactctatgattgtaaagaatgtggaaaaaccttcatatcccattcaagcattcaaagacacatgataatgcacaatggagatggaacttataaatgtaagttttgtgggaaagcctgcccttgtctcagcatatatcttatacatgaacgagttcacactggagagaaaccatataaatgtaaacaatgtggtaaagcctttagttattcaacttcccttcaaatacatgaaagaactcacactggagagaagccttatgaatgtaaggaatgtgggaaagcattcggtagtcccaattccctttatgaacatagaagaactcacactggagagaagccatatgaatgcaaacaatgtggaaaagccttcagatggttccattcctttcaaatacatgaaagaactcacagtgaggagaaggcttatgaatgtaccaaatgtgggaaagcattcaagtgtcccagttatctttgtagacatgaagtgacccactctgggaaaaagccctgtgaatgtaaacaatgtgggaaagcattatcttatcttaactttcaaagacacatgaaaatgcacactagaatgagaccttataaatgtaagactgtggaaaagcctttgattctcccagttcgttttgaagacatgaaagaactcacactggagagaaaccttatgaatgcaagcactgtggtaaagccttcaatcgttccagttcctttcactatcatgaaaggactcacactggagagaaaccctatgaatgtaagcagtgtagtaaagccttcatttcttccacttcctttcgatatcatgaaaggactcacactggagagaaaccgtatgagtgtaagcaatgtgggaaagccttcagatctgcctcacaccttcaaatgcatggaaggactcacactcaagagaaaccctatgaatgtaagcagtgtggtaaagccttcattttttccacttcctttcgatatcatgaaaggactcacactggagagaaaccctatgagtgtaagcaatgtgggaaagccttcacatctgcctcacaccttcaaatgcatgaaaggactcacactggaaagcaactgtatgaatctaaacaatgtgaaaaaacctttggatctgtcagaaaccttcaaattcatgaaaagacacaccctggagagaaaccctataaggaatatggaaaagcattcaacaatttctcttcctttcaaatacatgcaacaatgcacagaggacagaatgcctatgaatgtaaagagtgtgacaaagcattcatatctgccaagatccttcgagtacatgcaagaacacaccctggagagaaaccctatgaatgtaaggaatgcggaaaagcgttcaattatttttcttctttgcgtatacacaaaaggatgcacactggagagaaaccatattaatgtaaggattgtgggaaagcattcagtttgcctggttcctttcgtagacataaaagggctcacactggagtgaaaccgtatgaatgcaaggaatgtggcaaagccttcacttcttctggttcctttcagtgtcataaaaggattcacactggagagaaaccctatgagtgtaagcagtgtggtaaagccttcatttcttccactgccattcgtagacatgaaaggactcacactggagagaaaccctatgagtgtaagcaatgtggaaaagcctttatttctttcagttccattcagtaccatgaaaggactcacactggagagaaacagtatgagtgtaagcagtgtggtaaagccttcatgtcttctactgcatttcagtatcatgaaaagacccacaccagagagaaacactatgaatgtaagcagtgtgggaaagccttcatttcttccggtagccttcgatatcatgaaaggactcacactggagagaaaccctatgaatgtaagcagtgtggtaaagccttcagatctgccactcaacttcagatgcatagaaagattcacactggcgagaaaccctatgaatgtaagcaatgtgggaaagcctacagatctgtctcacaacttctggtgcatgaaaggactcacactgtagagcaaccctatgaatataagcaatatgggaaagccttcagatttgctaagaaccttcaaatacagacaatgaatgtaaacaattaaatgtttatagcagctgcatactaacatgttattctgtattttttttttctttttgagacagagtctcgctctgtcacccaggctggagtgcagtggcgtgatctcagctcactgcaagctccacctcctgggttcacgccattctcctgcctcagtctcctgagtagctgggactacaggtgcctgccaccacacccggctgattttttgtattttttagtagagacggagtttcatcgtgttagccaggatggtctcaatctcctgacctcgtgatc

SEQ ID NO: 90904 - DNA, 1026 bp, Homo sapiens
gtcagcatgggtcagtcatcccttaatagacacatcaaagatcacagtggacatgaaccaaaggaatatcaggaatatggagagaagccagatacacgtaaccagtgttggaaacccttcagttctcaccactcctttcgaacacatgagataattcacactggagagaaactctatgattgtaaggaatgtggaaaaaccttcttttctctcaaaagaattagaagacacatcatcacacacagtggatatacaccatataaatgtaaggtgtgtgggaaagcttttgattatcccagtagatttcgaacacatgaaagaagtcacactggagagaaaccctatgaatgtcaggaatgtggaaaagccttcacttgtatcacaagtgttcgaagacacatgataaagcacactggagatggaccttataaatgtaaggtatgtgggaaaccctttcattctctgagttcatttcaagtgcatgaaagaattcacactggagaaaaaccctttaaatgtaagcaatgtggtaaagccttcagttgttccccaaccttacgaatacatgaaagaacccatactggagagaaaccttatgaatgcaagcagtgtgggaaggccttcagttatctcccctcccttcgactacatgaaagaattcacactggtgagaaacccttcgtatgtaaacaatgtggtaaagcctttagatctgccagtacctttcaaatacatgaaaggactcacactggagaaaaaccttatgaatgtaaggaatgtggggaagcattcagttgtatcccaagtatgcgaagacacatgataaaacatactggagaaggaccttataaatgtaaggtatgtgggaaaccctttcattctctgagtccatttcgaatacatgaaagaactcacactggagagaaaccttatgtatgtaaacattgtggtaaagctttcgtttcttcaacatcaattcgaatacatgaaagaactcatactggagagaaaccctatgagtgtaag

SEQ ID NO: 90905 - DNA, 1053 bp, Homo sapiens
cttctttgttatgccacaactatgccatgggtgttatcccccactaaacccaaaggtcaagctctctgttgtgggagaggcgcatgaagcagcagcaatagcactttagggtcttgggaaagcttctgctgttaaagagtgtggactcagtccatcatctaatggctgctgttccccaccttccctccctgtcctctttttgaaggactgctcttccaggggcagccacataatgaccaacctctgacagtgtatacagtcccccctccactcccactctttacatttggggcaacccaggcatcagtcacaacttcactataaatacacaggtctcaggccgccactgcgagaggagccgccaccatgtccgcgcatctgcaatggatggtcgtgcagaactgctccagtttctgatcaagaggactatgccgacctacagcaccaagcccagtaacttgaaggccccagctccttccgctacaacgggctgattcaccacaagactgtgggcgtggagccggcagccgaggacaaaggtgtggtggtggtcacgaagcagagatccggccagccgaagcctgccacctcctacgcgcggaccaccatcaacaagaatgctggcgtcacgctcagcagcatcagacacatgatcctcaagaacaagtaccgccccgacctgcgcatggcagccatccgcagggtcagcgccatcctgtgcagccagaagcctgtgatggtgaagcggaagcggacccgcgccaccaagagctcctgagccccctgcccccaaagcaataaagagtcagctggctttctcaccaccagcccctcatgcccgcaaaaaacaaaaacaaaaacaaaaaaacaaaacaaaaacacaggtaggtccttgcccaggatgtaaacccaggaccactttaaggaaggccctactcccatactccagctccccaattccaaggaattatcaaaaactgtcaactaaagtcagctgaacctagaaccagacttggtagggctcaacaatggaagaaacacagagcagcacag

SEQ ID NO: 90906 - DNA, 1032 bp, Homo sapiens
aagccctatgttgtagccacagctggagcctgggtcctctgcacagagactctggtgtgggtcttaacgaggtggtcagtgaattcctgatagggagacttggtgaatacagtctccttccagaggtcaggggttaggtagctgtaggtcttagagatgacatcaaaggtggccttggcgaagttgcccaggatggcagtgcagccccgggctgaggtgtatcagtcactgataccagccatcatgagcagcttcttgggcacaggcgctgagacgatgccagtgtccctgggtgcggggatgaggcgcaccagcacagagccgcagtggcctgtcaccttgcaagggacggtgtggggcttgccgatcttgttcccccagtagcctctgcgcacgaggacagtggagagcttggccaggatgatggccccgcggatggcagtggctgcctccttggagcacttaactcccagacggacatggccattgtagtccccgatggcaacaaacgccttgaacctggtgcactggccggcacgggtctgcttctgcactggtgtaatcaaaacctcgtccttgagagaggcccccaggaacaagtcaatgatctcagattccttgatgggcagggagaagagatagatctcctccagggactagatcttcatgtccttgaccaggcagcccagcttggtaacgggcatccacttcttatcctcggccttgcctctcagagctccgcggccccggccccggatgccactgccgaaatctccgcggaagccactgcggttccccatcccagggtccccagggcctctggacccccgcgctgcacctgcgtcatcagccatttggtgttttcttggagaagaagctataccttttaatatttatcttttagttatctccatgtgattatgtattatctccatatgattatatattgtgtttttactggattagcattcatgttgaacataccgcctttgtgggctttcatctgtgaaataattctcagtcatttaattc

SEQ ID NO: 90907 - DNA, 2627 bp, Homo sapiens
ctgtaatcctagcactttgggaggccaaggtgggcagatcacctgaggtgtggaggttgaggccagcctggccaacatggcaaaaccctgcctctactaaaaatgcaaaaattagccaggtgtggtggtgggtacctgtaatcccagctactcatgaagctgaggcaggagaactgcttgaacccaggagacggaggttgcagtgagccaagattgtgccactgcactgcagcctgggcaacagagtaagactctgtctcaaaaaaaaaaaaaaaaagaaataaactctatgtgatgaattttattgttttgataatagctctggtcaagtactcttcctgagcattcatgacatacactttccctgaaaatggcaaaagtgtaattctactacctactaatgattgtgaaataatcaataattataaaattattaattttaaaaagccactaattgtgcgttttgttttgtttttttctcacagaagtcatatggtagagaggctctgtgaaaggaaagaaggtagtcagtttggagaaaccatcagtcagactccaaatcctaaaccaaacaagaaaacttttactagagtaaaaccatatgaatgtagtgtgtgtggaaaggactatatgtgtcattcatctcttaataggcacatgagatctcatactgaacatagatcatatgaatatcacaaatatggagagaaatcatatgaatgtaaggaatgtgggaaaagattcagctttcgaagttcatttcgaatacatgaaagaactcacactggagagaaaccctataaatgtaaacagtgtggtaaggctttcagttggcccagttcctttcaaatacatgaaagaactcatactggagagaaaccttatgaatgtaaggaatgtgggaaggccttcatttatcacacaacctttcgaggacacatgagaatgcacacaggggagaaaccctataaatgtaaagaatgcgggaaaacgttcagtcatcccagttcttttcgaaatcatgaaagaactcactctggagagaaaccctatgaatgtaaacaatgtggaaaagctttcagatattaccaaacttttcaaatacatgaaaggactcacactggggaaaaaccctatcagtgtaagcaatgtggtaaagctcttagttgtcccacatcctttcgaagtcatgaaaggattcacactggagaaaaaccctataaatgtaaaaaatgtgggaaagccttcagttttcctagttcctttagaaaacatgaaagaattcatacaggagagaaaccctatgattgtaaggaatgtgggaaagcattcatttctcttccaagctatcgaagacatatgataatgcacactggaaatggaccttataaatgcaaggaatgtgggaaagcctttgattgtcctagttcttttcaaatccatgaacgaactcacactggagagaaaccctatgaatgtaaacagtgtggtaaagccttcagttgttccagttcctttcgaatgcatgaaagaactcacactggagagaaaccccatgaatgtaaacaatgtggtaaagccttcagttgttccagttctgttcgaatacatgaaaggactcacactggagagaaaccctatgaatgtaaacagtgtggtaaagccttcagttgttccagttcctttcgaatgcatgaaagaattcacactggagagaaaccctatgaatgtaaacagtgtggtaaagcctttagtttttctagttcctttcggatgcatgaaaggactcacactggagagaaaccctatgaatgtaaacaatgtggtaaagccttcagttgttccagttcctttcgaatgcatgaaaggactcacactggggagaaaccctatgaatgtaaacagtgtggtaaggcgtttagttgttccagttccattcgaatacatgaaaggactcacactggagagaaaccttatgagtgtaaacaatgtggtaaggccttcagttgttctagttctgttcgaatgcatgaaaggactcacactggagtgaaaccctatgaatgtaaacaatgtgacaaagccttcagttgctcacgttcctttcgaatccatgaacgaactcacactggagagaaaccctatgcatgtcaacaatgtggtaaagccttcaagtgttcccgttcctttcgaatacatgaaagagttcatagtggagagtaaccctatgtatataagcaatatggcaaagttttcagttgtcctatttcctttttttttttttttttttttgagttgaattctcactctgttgccctggctggagtgcagtagagtgatctcagctcactgcaacctctgtctcctgggttcaagcgattctcctgcctcagcttcctgagtagctgggacaacaggtgtgaacgaccatgcccacttaatttttgtatttttagtagagatggggtttcgccatgttggccaggctggtctcgaactcctgacctcagacgatccacctgccttggcctcccaaagtgttggattacaggtgtgagccaccacacccggcccccatttccttttgaagacatgaaattattcatatttcagagaaaccctataag

SEQ ID NO: 90908 - DNA, 1033 bp, Homo sapiens
agcgaaaccccgtctccaccaaaaaaaatacgaaaaccagtcaggcgtggcggcgcgcgcgcctgcaatcgcaggcactcggcaggctgaggcaggagaatcaggcagggaggttgcagtgtgccgagatggcagcagtacagtccagcttcggctctgcatcagagggagaccgtggaaagagagggagagggagaccgtggggagagggagagggagagtatcgtatagcatttctctaagatgctgtgtatcctgtcattggagagcataagacttgaagtgatcatactaaaaatgtagaaataatttccaagtattcatggtggtgttaaatttatgaagaagtaagtgtggacgaagatttgagttctgatgacaaagttacaggataaatggagaaaattatatatgaacttttaatgaactgagtttatatccccagtgctgtcagtctcacccatcctcccctatacatgtgggatgtttcaggactcagtggtctttgaggatgtggctgtgaacttcacccaggaggagtgggctttgctgggtccctctcagaagaaactctacagagatgtgatgcaagaaacctttgttaacttggcctctataggtaagaatgaaattattccctcacttagtcaattagagaacaagtgtttcttgctcatcagcaaggttccaaggtttagaatgttgaaagggaatactttggtaaataaatcagacaggataacagctcatcctagatttagaatctaataatttttctgtaatttcgaataggtttaatgatttttctgggcctgcattttaggggaaaactgggaggagaagaacattgaagatcacaaaaatcaggggagaaagctaaggtgagttgtacttacaaaagaaaatactgtcttatgagagaatcttagcatgccattaggtttaaaaaatgaataattgaaacaaataagccccatttcatatttatttattttttgaaaatttttgccaagaacgttttcttaaaaatggt

SEQ ID NO: 90909 - DNA, 1053 bp, Homo sapiens
aatacaaaactattaataatacggtactcattctttacagaagtcctatggttgaagcactctgtgaaaataaagaagattgtccatgtggaaaaagcactagccagattcctgatcttaatacgaacctggaaactcctactggattaaaaccatgtgactgcagtgtgtgtggggaagtcttcatgcatcaggtctcccttaataggcacatgagatctcacactgaacagaaaccaaatgagtgtcacgaatatggagagaagccacataaatgcaaagaatgtgggaaaaccttcactcgcagctccagtattcgaacccatgaaagaattcacactggagagaaaccctatgaatgtaaggaatgtggcaaagccttcgcatttctcttttcctttcgaaaccatataagaattcatactggagagacaccctatgaatgtaaggaatgtgggaaggcattcagatatctcactgctcttcggcgccatgaaaaaaatcacactggagagaaaccctacaaatgtaaacagtgtggaaaagcctttatatattaccagccttttctaacccacgaaaggactcacactggagagaaaccttatgaatgtaagcaatgtgggaaagccttcagttgtcccacgtacttacggagtcatgagaaaactcatactggagagaaaccttttgtatgtagggaatgtgggagagccttcttttctcactcaagccttcgaaaacacgtgaaaacccacaccggagttcaaccttatacatgtaagaaatgtggggaagccttcaagtcatctagttcctgtgaagtgcacgaaagaactcattttggagaaaaaccctatgaatgtaaacaatgtggtaaagccttcaattcttcaagttaccttcagttgcacgaaagagttcacactggcgagaaaacttacgaatgtaaagaatgtggtaaagcctttctttattccactcactttcgaatccatgaaagaacccatactagagagaaaccctatgaatgcaaacagtgtggtcgggtct

SEQ ID NO: 90910 - DNA, 1077 bp, Homo sapiens
tcccagctacttgggaggccgaggtaggagaattgcttgaagctgggaggtggaggttgcagtgagctgagatcgcaccattgcactccagcctggggaacaagaacaagactccgtctcaaaaaagaaaaaagaactttagttctactacccgataatacatataaaatcattaatacacaaccagtattaccgtgcttctaattttttacagaagccatacgggagagagactctgtgaaggtaaagaaggtagtcaatgtgcagaaaacttcagtcccaatctcagtgtgacgaagaagactgccggagtaaaaccatatgagtgtactatctgtggaaaagccttcatgcgtctctcatcccttactagacacatgaggtctcacactggatacgagctatttgagaagccatataaatgtaaggagtgtgagaaagcctttagttatctcaaatcctttcaaagacatgaaaggagtcacactggagaaaaaccctataaatgtaaacaatgtggaaaaaccttcatatatcaccagccctttcaaagacatgagcggactcacattggagaaaaaccctatgaatgtaagcaatgtggaaaagctcttagttgttccagttcgcttcgagttcatgaaaggattcacactggagaaaagccctatgaatgtaaacaatgtgggaaagccttcagttgttccagttctattcgagtacacgaaagaactcacactggagagaaaccctatgcatgtaaggaatgtgggaaagccttcatttcccacacaagtgttctaacacacatgataacacacaacggagatagaccttataaatgcaaagaatgtggaaaggcattcatttttcccagttttttacgagtacatgaaagaattcacactggagagaaaccctataaatgtaaacaatgtggtaaagccttcagatgttccacctccattcaaattcatgaaagaattcatactggagagaagccctataaatgtaaagaatgtgggaaatctttcagtgcacgcccagcctttcgagtacacgtgagagtgcatactg

SEQ ID NO: 90911 - DNA, 1147 bp, Homo sapiens
cggattgagaccatcctggccaacatggtgaaaccccatctccactaaaaatacaaaaaatttctctttcccttcagtgtgccactgaagatcctggtgtcgccatgggccgccgccccgcccgttgttaccggtattgtaagaacaagccgtacccaaagtctcgcttctgccgaggtgtccctgatgccaagattcgcatttttgacctggggcggaaaaaggcaaaagtggatgagtttccgctctgtggccacatggtgtcagatgaatatgagcagctgtcctctgaagccctggaggctgcccgaatttgtgccaataagtacatggtaaaaagttgtggcaaagatggcttccatatccgggtgcggctccaccccttccacgtcatccgcatcaacaagatgtcgtcctgtgctggggctgacaggctccaaacaggaatgcgaggtgcctttggaaagccccagggcactgtggccagggttcacattggccaagttatcatgtccatccgcaccaagctgcagaacaaggagcgtgtgattgaggccctgcgcagggccaagttcaagtttcctggccgccagaagatccacatctcaaagaagtggggcttcaccaagttcaatgctgatgaatttgaagacatggtggctgaaaagcggctcatcccagatggctgtggggtcaagtatatccccaatcgtggccctctggacaagtggtgggccctgcactcatgagggcttccaatgtgctgcccccctcttaatactcaccaataaattctacttcctgtccacctaaaaaatacaaaaaaaaaaaaaacaacaacaaaaaattagctggtcatggtggcgggtgcctgtagtcccagctactcgggaggccgaggcaggagactggcatgaacccgggaagggagactgggactccctctatcacccatgttggagtgtgctggcctgatcaaaacacactgcaacctcagaatcctgggctcaagcaatccccccgtctcagcctcccaaagtgttgggatgacttgcttgagctgccatgcccagcctctccctaatttttctaagccagcctgtagaggctgggaatcagccctggccattcagggaatccgtggagg

SEQ ID NO: 90912 - DNA, 3582 bp, Homo sapiens
tacaaaaaaatcagccgggtgtggtggcgggcacctgtagtcccagctactcgggaggctgaggcaggagaatggcgtgaagccgggaggcggagcttgcagtgagccgagatcgcgccactgcactccagcctgggtgacagagcgagactccatctcaaaaaaaaaaaaaaaaaaaaaagagttggggagccagatcccaagcctgatcagctcacccccaaccccaggcgggattatcgacccacctggaaactgaaccagacggagcccgtggcaggaaactactatccagtcaacacccggatttacatcacggtagctctcccccatcctgcacctccccacctcgatagaaagggaatcaccccttatctgcagcatctcaaagctgcctggggttggggttgactgccctctactttcacccttcaactcccaggatggaaacatgcagctgactgtgctgactgaccgctcccaggggggcagcagcctgagagatggctcgctggagctcatggtgagtgggtcagagccccatccgagccagggtcctcccaacctggacccctgctggaccttgaaggctgtttctggcccagttctctgctttcaggccccactaagctgaggactccgtttctttcttttcttctctttgagacggagttttgctcttgttgtccaagctggagtgcaatagtactatctcagctcactgcaacctctgcctcctgggttcaagtgattgtcctgcctcagccttccgagtagctgggcttacaggcacacaccatcacgcccggctaattttggtatttttagtagagatggggtttcaccatgttggccaggctggtctcgaactccttacctcaggtgatccactcacctcggcctcccaaagtgctgggattacaggcgtgaaccaccgctcccggccaaggactccatttctgtgtgtggcttttcctctccgtttttctccatctcctgcccaggctccctccacgctctggcgtgccatatccaggcccccctgttaggcatttacctccttccggcctggttcccatgcctacttggatcctgcctctgctggggttgccctaccagaccctcaccttcatcctcatccgttcctcccaccctttaatttcttttgacattcccacacgcccttacccagtttctggcccaaggacacccacaaacccacgactctcaccccctcctggccactctccccccaggtgcaccgaaggctgctgaaggacgatggacgcggagtatcggagccactaatggagaacgggtcgggggcgtgggtgcgagggcgccacctggtgctgctggacacagcccaggctgcagccgccggacaccggctcctggcggagcaggaggtcctggcccctcaggtggtgctggccccgggtggcggcgccgcctacaatctcggggctcctccgcgcacgcaggtgaggggcagcggggtaggcagagaggaccggattgaagtctaccagggagccgggtttgggtgcggagtttcctaggctcagcggggatccatttggccataattagccccaaaccctcgggccaaccccatcccctgggcagtccccgcccagtgccagcccagtcccaacccccctggactgtgtagaggcacagccctagctcatgcccctaaaccaccaactcacctccggccccgcccatttcactttagccccgccctctcaccgcccccaggctctgtcctgcctcacccagccccgcggcttcagccccgccgtaactcccaaagtctcaggtcacatcagttctgctccatcgggactcgaaccctaagcttgggaccgacccatctccccattggctcagtcctccctgtcacggccctggccgctcctctcggctgagccttgcccctctccggcgaaaccccgcccctacaacctagccctgcctcctgacctggctcggccccgcccttctccatccaggccccgcccctctccaactcagccccgccctctctcccgcagttctcagggctgcgcagggacctgccgccctcggtgcacctgctcacgctggccagctggggccccgaaatggtgctgctgcgcttggagcaccagtttgccgtaggagaggattccggacgtaacctgagcgcccccgttaccttgaacttgagggtgagaagggcaaaattgagaaggagatcggagagaggcaagagagagggagagaagagaaacctggctttgccccaactcatctgggcccatccccttccccgcaggacctgttctccaccttcaccatcacccgcctgcaggagaccacgctggtggccaaccagctccgcgaggcagcctccaggctcaagtggacaacaaacacaggtggggccctggtcaggggtagggaaggggtggagtcttacctggggccggcaggtgggggcaatgtgtgaggcatgggatgttggccaggacccaaaaaggtcatgagggtatggggcagagtccagacccaggttaggggcttaaaggatctgaaatgggtgcggcaaaccaggaatgggtcttgaggtttgtgggtgctgtttagtcccaagaacaagatttgaaaatccccatccatgtctagttctgggagggtgttcatcacccctggggtcagattgagggtacgaggacagtggccagattgagggtatgaggacattggacctgggggtggtattcggggccggggaagcaggttaagagtctgggattgaggccctggagacagattcggggatatgcagctgtgtctagacccaggggaggaagcatcgtggggtgagtcagaggaagtctgcacctcctcactcctccttccccctgcacctctccaggccccacaccccaccaaactccgtaccagctggacccggccaacatcacgctggaacccatggaaatccgcactttcctggcctcagttcaatggaaggaggtggatggttaggtctgctgggatgggccctccaagcccaagcctcctgctccgggggcagaccagactctgactctcctcttggggctgctgccattaaaacgctactactaagactcaggtcgctctgtgactgagtgtgggttttttttgtctgttatttgcttgttagagggggacagaatttatgacccagagccgggtgtggtggcttgctcctgtaatcctaacaactctggaggctgaggagagagaatcacttgagcccaggagatctagactagcctgggccacaaaatgaggccctgtatgtacaaaaaatttaaaaaattagctgggtgaagtgtctgtattcccaactacttgggagaattgcttgagcacaggaggtcaaggctgcagtaagtgataatcacaccactgcactccagcctgggcaagagagccagatcctatctcttcgtgtgtgtgtgtgtgtgtgtgagggacagagtctccctctgtcgcctaggctggagtgcagtggcgcaatcttggctcactgcaacctccgcc

SEQ ID NO: 90913 - DNA, 1019 bp, Homo sapiens
ctccatcctgggcaacaagagcaaaactctgtctcaaaaaaaaaaaaagaaaaaagaattatgtgggccaggcgcggtggctcacgcctgtaatcccagcactttgggaggccgaggcgggctgatcacgaggtcaggagatcgagaccatccttgctaacacggtgaaaccccatctctactaaaaatacaaaaaattagccgggtgtggtggcgggtgcctgtagtcccagctactcgggaggctgaggcaggagaatggtgtgaacccgggaggcggagcttgcagtgagccgagatcgcgccactgcactcccgcctgggcaaaagagcgagactccgtctcaaaaaaaaaaaaaaaaaaagaattatgtggcggtgactgaaggttgaccttgatgtaggccttaatggggtttatggccagggttgggggacatttgtaggactcacctctgctcaggtacagactgacatccacctcacccgtgtgcccgcagacacccttggtgcaggaggtgcaccagaacttctcagcttggtgttcccaggtggttcgcctgtacccaggacagcggcacctggagctagagtggtcggtggggccgatacctgtggggtgagtggcacaggctgggagaggggtgtggaagcaagggcagaggggtttatccaaggctcacaaccttgccatcccattgggtacagcgacacctgggggaaggaggtcatcagccgttttgacacaccgctggagacaaagggacgcttctacacagacagcaatggccgggagatcctggagaggaggtggggggtgactgagagcactgagggggtggtctgtggtgtgttggggcccaggggtggtgagggaaatttgctgattacatgagtgtgggagacagaggacgaagggagagtgaagggcgggggagccaggcagggtgcagtggctcacgcctgtaatcccagcactttgggaagccgaggcgggcagatcacaaggtcaggagatc

SEQ ID NO: 90914 - DNA, 1031 bp, Homo sapiens
ggtgggcacctgtaatcccagctacttggatagctgaggcacgagaatcacttgaacccgggaggtggggggtgcagtgagccaagattgcaccactgtactctagcctgggctacagagtgagactcagtctcaaaaaaaaaaaaagaaaaaagaaaaattaaaaaaagaaaacacacacacatacacacacaaacccatctgtggacccttttctgcccagcacatccgggcaacgtttgatcctgacacagggctgttgatggagattatgaacatgaatcagcaactcctgctgcctgttcgccagaccttcttctggtaagggaagatcaccaggcctgagggtggggtggtggtgctcggcatggagctagggccccttacctgactctcacctgccccaactccaggtacaacgccagtataggtgacaacgaaagtgaccaggcctcaggtgcctacatcttcagacccaaccaacagaaaccgctgcctgtgagccgctgggctcagatccacctggtgaaggtcagggactaggaatgatgagtgggcagttgggaatggggaagttatggagcccaagagggtggtgggccatgtgtagagtgagggtaggggaggatttacttttccttcagatcagtgggctaagacccacagatcagcgggggaaatatttgagggtccttccatagaattgatattcatagctggtcgtatgagagtctccccataggacacatcatacaaagccattcacatctgctgtggacgtttacatacttagttttggaaattgggggtggggcattcccacttggcccatgaatcaggagagccaaatatcactgcttgaagaattcaccaaagtctgtagtaagaggagcttctatctggagtgaatatttgagagtccacccttggattgattgggtttgggtgagtctcagggtgaatgcctatgggtgcatctggctaggaacagtggtttcccagggcctctcattgatgtttgactttcatag

SEQ ID NO: 90915 - DNA, 1088 bp, Homo sapiens
gtggtggcgggcacctgtagtcccaggtactcatgaggctgaggctggagaatggcgtgaacccaagaggtggagcttgcagtgagctgagattgagccactgcactacagcctgggcaacaaagtaagactccgtcccaaaaaaaaaaagttgtgttttttggtaacaatctgacagtcctgcaaaacgattattcctgccctataatgtcacacttagtttttccacaaaagtttttaataataaagttggaattattgtaaaagtttagtaaaatttcaggtttattcttgcatctctgaaatccttttaaaaaaggctagtggtcatgtttgacttcagccaaaattcattttcacacccaaccattggcttgcacgccaaatatgtatttagagaaactgaacctatgggatgcatgaatgtgcacacatgtgtggaagtgtgggcccccaggaaggtgcggactcccgagggctcactccgtcgcctcccccagcagcaggcaaaaggaagcagtgtccatgttctctactccacccccgcttgttacctctgggagctgaacaaggccaacctcacctggtatttggggaaactggggagcttgggggggttggcatgccccgtgggtcatgaccctgccctcaatgcccctgccgctgtaggtcagtgaaacatgacgacttcttcccttacgcggatggcccccaccagttctggaccggttacttttccagtcggccggccctcaaacgctacgagcgcctcagctacaacttcctgcaggtgggtaggagccgggctagagggggcatgcagccccgaggcccgacaggctgggcgccccaacatacccctctgcctccaggtgtgcaaccagctggaggcgctggtgggcctggcggccaacgtgggaccctatggctccggagacagtgcacccctcagtaagtgtcgggcccaagaggggaagaggtttgcggctgaagttggaaaccacccctaggccgcccccctcgagtttcttctttttttttttttttttttttttttttgagacggagtctcgatttgtctcccaggc

SEQ ID NO: 90916 - DNA, 1024 bp, Homo sapiens
actcctagactcaagcgatcctcctgcctcagtctcctgagtagctgggattacaggtgtgagcccctgtaatcatgttctcatgccccctggaggaagatgctattctattcaccatcacaatgtccccctcctggatttatgtgcattcctcattagaagagatagcataggctgggcaagagatagcatggcatggtgactggatgccctcttctaggtagtgggtccaagagaactgctcaacaactggtggctacttttatctgtgtccccacgctcccaagtgccatacccccacccatgcctgtgcacccaacatccttgaccccatatacatcaaaacacagctatacacagggatggcccaggatcctctggcttcaggactcccctcttgcctgcagggccggtattaccgcaccaaccacactgtgatgaccatgggctcggacttccaatatgagaatgccaacatgtggttcaagaaccttgacaagctcatccggctggtaaatgcgcaggtcagtgcgcctaccctgtggtacccttgtgcacatgtgcgcttgcatccgggggccttgggttatgtgcatagctctcagtgctgtctttgttttctattgttctattgtggtcattctataacaaatgaccacacacttagcagctcaaaacaacagaaatacattgtcttacagttctgtaggtaagaagtccagcatgaggccgggcgcaatggctcatgcctgtaatcccagcatgttgggaggctgagccgggcagatcacgaggtcaggaattcgagaccagcctgaccaacatggtgaaacgctgtctctactaaaaatacagaaattagctgggtgtgatggtgcgtgcctgtaatcccagctactcgggagcctgaggcaggggaatctcttgaatccgggaggcggaggttgcagtgagcggagattgtaccactgcactccagcctgggccacagagaaagactctgtctcaaaaaaaaaaaaaaaaa

SEQ ID NO: 90917 - DNA, 1024 bp, Homo sapiens
cagtctgcccgtgttgtgcaggctggtctcaaaaactcctgggtttaagtgatcctcctgttttggcctcccagaaggctgggatcataggcaagagccaccacatcgacctagcactgctttttaacctgtgctctgacctgcccctcccaagcagaggggagtttggtggtgagagggctgggcactaattcacactgccttttcctccctcatccccagatgggcttcgacggcttcttctttgggcgccttgattatcaagataagtgggtacggatgcagaagctggagatggagcaggtgtggcgggccagcaccagcctgaagcccccgaccgcggacctcttcactggtagggggcttggtgagggcagggccagccatggtgccacacactcagaagggccctgggcttgatatctgctctgttgtcactgtcctggaattcctatagtctgggaacaaaggccctgcatttccttttgcattgggacacaaattctgaagcccatcctgggtgggacatggccggctttgaaaccagggaaggtctgggtgatgggccaccccttgaacttggtgtgacctgcaggtgtgcttcccaatggttacaacccgccaaggaatctgtgctgggatgtgctgtgtgtcgatcagccgctggtggaggaccctcgcagccccgagtacaacgccaaggagctggtcgattacttcctaaatgtggccactgcccaggtaaccctggtgtccagaaccttcgagtccggtatatacaatacaatgagctctttccatggtacaggcatcccctaacacgttctccttatttttaatttttttgagacagtcttactctgtcacccaggctggagtgcagtggtgcgatctcggctcactgcaacctctgcctcctgggttcaaacaagcacatccagctaatttttgtatttttgcactggggtctcatcatgttgtccaggctggtctcaaactcctgagctcaagtgatctgcttgcc

SEQ ID NO: 90918 - DNA, 1512 bp, Homo sapiens
aaccgtggaccagtacttttatggaagtgagtagaggatggggactggtccctgggatccccatggtccctgtaatccctctgggtcctggacattagggtggggccagtgctaccctaatatccagggtttgggctcctctgtctaggaataacccccttggctctgctgttccctgagagccttatccctgttatccacagtcaagaatgacatccagcacgccggtgtgcagtacatcctggactcggtcatctctgccttgctggcagatcccacccgtcgcttcatttacgtggagattgccttcttctcccgttggtggcaccagcagacaaatgccacacaggaagtcgtgcgagaccttgtgcgccagggtgagcctaccccaaggaagtgaaaagaggaagcccagcccagcttctgcttctgcatctctggtttctgagatttgtcatgccacgtgcaagctgtataacatgcgtgtcgctccgcctgcctggactctccatttggagacctcctatacatcccacaaagccccacctgctgtgcatcctctgggaagcctgccatgcagggggcctctttcccatatctgggaactatggcctgggagcgacccctcttgtccttccgccagaaatgtgtacacaggcaggctttcacattcccagtatcacccaccctactcccactcctggctctgaccgctgaccctgaccttgcctgtcctggcacagggcgcctggagttcgccaatggtggctgggtgatgaacgatgaggcagccacccactacggtgccatcgtggaccagatgacacttgggctgcgctttctggaggacacatttggcaatgatgggcgaccccgtgtggcctggcacattgaccccttcggccactctcgggagcaggcctcgctgtttgcgcaggtgcgacccgggacctctcttgggcccacttcttcactcactctggctcctccctcgcccagtcaaaccccgccctctccctgcaatctcacaaggaccaggcccaggcctaggcctgttgaagccctgccccttgagtgagccgtaaagccagtggcttttgagctctggcctcagccggctatgcccagcccaggctgacccagctccggctggctccgccctctcccctaataggcccctcttggtgttctggccccacccactagctcgggtcctggctcctccctaaaccgggtggcaagtggatgcctaggctgccttaaaaacaggttcattacctgtgctcagaccccatccatcctcaggctgtggaagggggaacctcattcctggagtcaggcctgctctgcgctttgacagtgctggggaggtgaacctgggttctgatgttggacccgccctctccctgctagcccaaggtggtgagttctgaaacttccccaagcttggaaataagctggaggcctctctgtttcagccctacgtgtttttgtttttgttttttgagacag

SEQ ID NO: 90919 - DNA, 1095 bp, Homo sapiens
tccttccttgcagccttaaatcggtctgtacggaaaattccgcgccttagaaacccacgcttgggtgtaaccttattattgttcttcctgacctacttcctgtttatcacttccgggttcatcattttggcatttcggtgatcgggttggaactattgaagcccgctttcaggttcttttccccattttccctttgaaaggaagacttctggcttctcctaaatctccgttctctgggtaaggggagtccaagcctctgtcatgaggaacggaaatgcgagggcctcgggtgttactctaaaatccgccctcagcttgcacgccggaagctgcgattcctgcagcggaagaggcgtgatctggccttcgactcgctatgtccactaacaatatgtcggacccacggaggccgaacaaagtgctgaggtgaggaccccagcgtcgtgggcacgggttcgggttgtgggtgtggatcggggccctgggaagcgcctgtctatcccgggggcaggacctgagcgcccctgaccctcgagcctgtcgcaggtacaagcccccgccgagcgaatgtaacccggccttggacgacccgacgccggactacatgaacctgctgggcatgatcttcagcatgtgcggcctcatgcttaaggtgggcggggttgagcttctatgggtgtagttggacctgagaacgaggcccgggggcgggtttggaatgaagcggggtgtcttgtcattgctgatggggcgggacctgagatcggccgggagtggggctgcgatgacgctgggccgagaaagccccagtctttggtgaagtcaaggattcgagtcaggttggggatgtggcagattggtctgcgagtggggccaggctttgaagcaacttggagaggagttgtggaaaaagggcagggtcttaagcatgtgggatgtcagagtctctcttggtcctgagagacgcaggccagacagtaggactagaaaccacgtatctagagtatgccatgagcaggtgggactgaggaattccgggtggggcaaggtcccagctgcatcagatggaatcagtgggcatgatctggtgtctgg

SEQ ID NO: 90920 - DNA, 1034 bp, Homo sapiens
aataataaggttacacccaagcgtgggtttctaaggcgcggaattttccgtacagaccgatttaaggctgcaaggaaggagtcctgggagcatggctttccctgagccaaagccgcggcctccagagctgccgcagaaacggttgaagacgctggactgcgggcagggggcagtgcgagccgtacgatttaatggtgagcgccttcgtcttcattccgggtcctcctcccgcctcctgagatcgacggcccagtaacccccgcctggtgttccccagtggatggcaattactgcctgacgtgcggcagtgacaagacgctgaagctgtggaacccgcttcgggggacgctgctgcggacgtacagcggccacggctacgaggtgctggatgcggccgggtgagccggggaccaggctgggatgggagcgctgaggctgggatccgaggtcgatgctgatcctcctcctcctttactccagctcctttgacaacagtagtctctgctccggcggcggggacaaggcggtggttctgtgggatgtggcatcagggcaggtcgtgcgcaaattccggggccacgcaggggtgagtgaaagcctggagaccctcatttgagtggaggggacccgtattagcgcataggtggtgacacggccacccccattacaccgtaaggatcccttccccagatgacgatcccccactccgcatgccaggctaggcagtcaccaacccctgtccttgctgttcccccaaaacctttcacctccccttcgcccttgctttaaccgacactgggaaccctgcctttatcccagtcctccaaagtccagcctcctctgagtggcaataactttctcagaaggtgaacacggtgcagtttaatgaagaggccacagttatcctgtccggtgagtctggggcctaagcacgggggcccagggtgctgccctccccctccaaacctgacctcaccatcatgctggcctcacaggctctattgattccagtatccgctgttgggattgccgct

SEQ ID NO: 90921 - DNA, 1116 bp, Homo sapiens
gcctgctgggccctgtgggctgaggcggggctttggcttttgcactgagagaagtgggagaggacttgactcgggttcccatgctccccctggtggccatgtggtgaacagatggtggcaggtgagtgagaactccagtccaggacagtggtgaccatgcagggatcaggaggcaggcggtggttggatttggagggcttctgaagatagagttgctggcagctcctgccttgcagatggggcagggttgttgacacctggctgttgggtctggggaaacacagccatcgttgcccagcagctctagtgaccccagacattgacatgggccctgtctgggagcgaatgtctgtgaagggcttccttcatctgggacacacctctcagcctgtttggctacggtgtcctccctctgtgtctgtctcctgtgactggctgactgggcccaccgtgcccccgcctccccacagcggaacggggccgactacgctgtttacatcaacacagcccaggagtttgatggctctgactcaggtgcccgaccagacgaggctgtctcctggggcaagatccgggtggatgcacagcccgtcaaggtaagcgctggctgggtggggcatagggtctctgggacgatgagtgtgggtcccatggcttacccaggttcccccctacccaggtctatgctgacgcctccctggtcttccccctgcttgtggctgaaacctttgcccagaagatggatgccttcatgcatgagaagaacgaggactgagcggctgcggtcccaggaaggtcttaccccctcttctatttattaatttgcagacccagcccctcccctactttttggtcagctacgtctctagaataagatggtatctgaagtccttccatgtctgtgtctcggtccttggtcctgttggtgggtcccctggcttcagcctgctccatcctctgcctcataggcctcctctcgccagcactggacgctgcctcccatggcggtcagcaggcagggctctgttgggtggtaggccagcgactgcaccacaccggaacccacaggcagggccagagccagcgcaccctgtggagcgaggggtagggagtggt

SEQ ID NO: 90922 - DNA, 1028 bp, Homo sapiens
aggaggcagaggttgcagtgagctgagatagtgccattgcactccagcctgggcaacgagtgaaactccgtctcagggaataaaaaaaaagagagagaaacagctcagcaagctaagaataggctggttctttatgtgccaggcactatactaagtgttttctgtgggttttctcatataggcctcatctgtgagaggtgtttctgttatgcttataattgaggaaacagtcctagagaaattaggcaccccatccacagtcagatagtcatatagccagcatggagacgaggctctgagctccagccactgtcctgtcatgttctctgcagaaccacatccctgtgtttagtcccgcacttacagacggctcgctgggcgacatgatcttcttccattcctacaagaacccgggcctggtcctggacatcgttgagggtgaggcgctagggccacagaggagaggggaaggagggctggctgagtccaaggcctgacttcggcgctcttcccccagacctgaggctcatcaacacacaggccatctttgccaagtgcactgggatgatcattctgggcgggggcgtggtcaagcaccacattgccaatgccaacctcatggtgagtgggggtggcgcttcggcccactctgcagacatgctgtgtggtgggcctatgccatgtgctgggtagacagcatgaactagacaggccaggatccctgctccccgggactgatgttctagtaggggagatagcaaacaagtgacatccacgtcagggggcagtcattgctacggggaatactaaatgatggcatgagaagagaaaggggtgctgtccaacaagaggttttggaaggaggcttctggaagtgtgagctgggagcaggggtttggggaggcatctcccaggagctatgtggttgtctcccgtgccaggagtttgtgctgctgtactagcattgagcttctggattgcaaagttcccaggagagggaacagccattgcaaaggctctggggcgcc

SEQ ID NO: 90923 - DNA, 1071 bp, Homo sapiens
tgtagcagagctccctcataagagtcactggacaaggatgaggttagaagttctgcccagaatgagggcaggggcttccttcttgggccaaattcactgccttgtggctgcaggtggacgtattggtgaccacagctggcggcgtggaggaagacctcatcaagtgcctggcgcccacatacttgggcgagtttagcctcagggggaaggagctccgggagaacgggatcaataggtgagaaccctgagtggtgttgggcaggggagctggaccaagggtcctggggcctgatgcctacatgcctcctgttctcaggatcggaaacctgctggtgcccaatgagaattactgcaagtttgaggactggctgatgcccattctggaccagatggtgatggagcagaacacagaggtggggctggggcaacctggaggggccagttcagtgggagtcaggggaggcatggcctgaaggtcacatcctctcctagggtgtaaagtggacgccttctaagatgatcgcccggctgggcaaggagatcaacaacccagagtccgtgtattactgggcccagaaggtgaggacctaagcgggagcaaagtagccagactttggcatgtgttaacttatttcatctttccagcctcctggggattcagtactgttattctcagcatcctcactcttagatgaggagactcaaacacagataggcgtggtaattttttttttttttgagacaggatcttgctctgtcacctaggctggagtgcagtggtgtgatcacagctcattgcagcctcaacctcctggggccaagcagtcctcccacctcagcctctcgagtagctgggaccacaggcacatgccatcatgcccagctaattttaaaaattttttgtagagatgggggtctccctgtgtttcccaggctggtcttgaactcctggcgtcaggcagtcctcccaccttggcctcccaaagtgctgggattacaggcgtgagccactgtgcccagccaggctaggtaattttgtctgaagtcacacagataactagtggggcctca

SEQ ID NO: 90924 - DNA, 1044 bp, Homo sapiens
ttttgagacagagtctcgctctgtcgcccaggctggagtgcagtggcgcaatctcggctcactgcaagctctgcctcccaggttcatgccattctcctgcctcagcctcccgagtaactgggactacaggtgcccgccaccacacccggctaattttttctgtttttagtagagatggggtttcaccgtgttagccaggatggtctcgatctcctgaactcgtgacccgcccgccttggcctcccaaagtgccaggattacaggcgtgagccactgcgcccggccgagggtcacttcttaagcgtcacccatggacaagatttcggtcaccaggcagagttagacacagtttcatccttcctcagccacttttgtctaatgggatagtgagcccggttcgtgccctcacaagtctccaaagccttcacatgctgcataacgctctgttcttccttcccttatagctgcagctgtcacctccacctcctctgggaagccttccctgaactcccactgggtcagtggcctcttctgggacccagggctgacgtctctttccctcctgcaagaatgtgagaccctgggtgtcatctgtatctcaaacacaccctcctaacagtgcatacggccaacaggattattcactcactctacaattcatgtagtctattctctatggtgggctccgtgctaggcactaaggatttagtggtgaacaagaccaagatgtggaccctgccctactggagcccacaatctgattgggaagatagaaagttaacaatagtggtgagtgctatcaggccttttttgttttttgttttttttggagacagagtttcgctcttgttgcccaggctggagtgcaatggcgcgatctccactcatcgcaacctctgcctcccagtttcaagcaattctcctgcctcagcctcccgagtagctgggattacaggcatgagccatcacgcccggctaattcttgtatttttagtagagatggggtttcactatgttggtcaggctagtctcgaactcctgacc

SEQ ID NO: 90925 - DNA, 1050 bp, Homo sapiens
tctgtgctgagggcaacctggtggtggccggctctggagacctgtcgctagaggtctggaggctgcaggcctgagcaggtgggcgtggatgtggatactgcctgccggaggctgggcttcctcctctgttcttgggggaccatccccaatgttggtgctgcctccgccccgtgggcctagggcacaaggagtcccagccacattcgggtgagcgtcctggcctgggccctatgcccgggggaagggtgaaattggggttcaggcccacccagggggccgcttcccactcttgggccctggttttgttatgatttggatgccccgctctcagttgagagcgaaggagaaataaacctgacatgttggtgcttgggcctggagtgtgagtgtggtttgcctgctggggttctgcctgtgcctgcttggggctgtggggctgcgggcctgcatgggagtgactgggagagatagcaagtctgggctgggggtgcatgtcagctgttgctgtgcatttgaagagggagagtcctgaggatcgtgggcatctgtgtctatgatgtcacgtgtgtgtgtgatgtgtgacgcgtgtggtgtatagattatgactcaaatcctggccatttgtctgcacggtgggaaagggtacctgctcaggctatcccatgggtgctggcgagggcaagagggatggcgtgctctccgtctggggctccagggtgtgtgtgtgctgctgtggctgtgaccccgggggcaggcagggagggaggctgggccaggtacgcacctggcccctgcaagcccaaagtccctctggtctcccatctcagcccagctcagccatgccctgagaagtattcacttcatgtttattgaggccccctggtttgcccaggccacagggtggcattgccctgggttcataggatggcatagggcttcttctccttgaaggagttggtggcggccgggatgcccacaaggaaggggtcattcttggcctgctccgtgcagaacttcagcagatcggcggccatctttggacacctgcag

SEQ ID NO: 90926 - DNA, 1036 bp, Homo sapiens
agcttcccaaagtgcagggattacagatgtgagccaccgcgcccggccatttttcttttttttaaatggagaacggggtcttgccacgttgcccaaggtgatcttgaactcctgggctcggatgatctgcccatatcagcctcccaaaattctgagattacaggtgtgagccactgtgcctggcctatttattcattctacttttgttaattgaagggccagtgtaccttgtccaggcagagctggagcggggctgcgggataggcatgtttcaggccaacctgagggtggatgcaagactgagaccaccttggtcagctctgtgctaagaacagtagatgggatcggaggagggatatgggatgtggacggggatgggcagaggcctggggctcctgtggaagcctggatttacctgaggcgggagaggagagatgggtcactctgtggggtgggggaatgagcagatcgagggttttgccagacaggatggagacccgggatgctctcatgggctggggggggccttcgaggggctctgatatccctcctcaccggcccatcacccatgaagccggcccagccctgttgaagcaccagcaactacactccagacccgtgctgaccctgctggcggatgaccggcacatcatctcaggcagcgaggaccacaccctggtggtggtggaccgccgagccaacagcgtcctgcagcgtctgcaggtgggccctccccaggggcctggagggatggggactgttgcaggcccagcccggcctgagctgtcccgtcccttgtccctctcgtagctggactcctacctgctctgcatgtcctaccaggaaccccagctctgggctggtgacaaccagggcctgctgcacgtcttcgccaaccgcaacggctgcttccagcttatccgggtctgctggagctcctgcccctgactgtccctccccccgggcttccttcctacccgagcccctggtggtgtgggggagggcgggccttgggagagcctcgactgagtgttgc

SEQ ID NO: 90927 - DNA, 1090 bp, Homo sapiens
agggtccctgcccactgggcaccctactcgtggtaacccacagagaagaactttgactggccggcagcctgcattgcgctggagcagcacctgtcccgctgggcagaggatgggcgctgggtcgaatacttctgcctggccgaaggccacgtggcttccgttgactcagtgctgctgctccaggtgagacggggtctgtggggggccaggcagggtgggccagggtggccctgacaacatcaccttgctccctttccagggtgggtcactctgtctgtcgggctcccgagatcgcaacgtcaacttgtgggacctgcggcagctggggacggagtccaaccaggttctgatcaagaccttaggcactaagcgaaatagtacccatgaggtgaggagtcaggtggggataggaggtatgaggcctgagtagggcatcttggttaaggccccaggttttggtacaggaccgcatagatttgaatctgacttttctaaccttggtgtgactttgagtgagatgtgtgacttctctgtgcctcagtttctacttctgtccagtgggtgattaggatgaggatgaaggagatgcattatgcattaatgtggacatgcattaagctcaggctttttttttttttttttttgagacggagtctcgttctgtcacccaggctggagtgtggcatgatctcagctcactgcaacctctgcttcccgggttcaagcggttctcctgcctcagcctcctgagtagctgggactacaggtgcatgccaccacacctgtctaattttttttttttttttttgagatggagtctcactctgttgctaggctggagtgtagtgatgcaatctcggctcactgcaacctctgcctcccaggtttaagcaattctcctgcctcagcctcctgagtagctaggaccaccatgcccagctaatttttttatttttggtagagacagggtttcaccatgttggtcaggatggtctcgatctccagacctcgtggtctgcccgcctcagcctcccaaagtgctgggattacaggcatgagtcacctggcctttatttatttatatttttat

SEQ ID NO: 90928 - DNA, 1338 bp, Homo sapiens
caattctagagaaccttccggaatagtctgggaacatggtcaaggtggaaggggctcccctagagagggtgggggtgtagttacttcccagttggccagaaaactgggccttgcagacccccttagcattttttccctttttttccttccctgctttctacttctttggggagccccttgtgttttggagtctgactggagtctcgcatcctggggcctgctccatccatccctcctgggcgccagaccctccatccaagccctgtgtctttccatagtcagggtcaggccctgcatctattccaaggggcactcagtacacattccataaattagctgggtgtccctgcacgcccaccccatgaaactcgagcaggtctctggaagccatttgttaaaaaaaaaaaaaaaagttttaaaaataccttttaattttctggtaattccagttctttgaagcatcctctgctgggtcttggggtgtgtggatggattggctgtctgatgggattggtaacccctcgctactcaagatggggggatacaaacaccttcagggaaggggagcctggttcttctcgttttcctttttttttttttttttaaaaaaaaactatttaattttttaatttatttttggttgttttttgcacaatgaagtttcagcttctcaaccttctcccctacccagggctgtggacccagactggccttgagccacagtccctctttccctcctcaccctcttccccctgcgggctcccgggtctgtccatttgttactgtgctgtgctggggattggcgccgaggtggcgtgagattccacttgtgtagaactttgttgagtaaagatcagtttcttgtgaactccttagtctgtggcttcctgtgtccttggctttggtagtgaagaaatgtcgggggcaccggggatacttgagagtgggaagatagacgaatgtgaaagatggaagattaaatttgtaacatatatgaaatgtgcagctcattctctgggacttcagctcactaagggtgagccattagtgtcacagcccaggttcaagatgcccctctgccgtactctaaactgagtggtaaggggtgaggccttgccgcactcttatcatcagctgaccctgggtcaaggttttcatagaaggttcagcccagccccaggccgagggtaatttaattaatattagttacaattactcaggcaaatgagaagtagtttcagctgtggggggaaaccacaatcttcagaataaaatctttcttttttttgagaccgggtcttgctccgtcacccaggctggagtgcagtggcgcaatca

SEQ ID NO: 90929 - DNA, 1050 bp, Homo sapiens
gacgagtccctctgccattccagccatcaccatcggccgcttgggctacgtgtgcccccaggaggtggcacccatgctgcagcagttcatccggccttggtgtgtgtccacgtgtcaagcctgctgtgtggtgggcgggactggcccaaccccctccctcgcctgtgcatttccagccccatctgcctactgactccctgccctgccccacccccacagatgcatgtcccaggcccactcactgatccccagtgacccagccctccacagatgcatgcccagcctgccctctgacctccagctgctcaccttcccacaggtgcacgtccctcaggaacatcagggacaacgaggagaaggactcagccttccgcggcatctgcatgatgatcggtgtcaacccggggggcgttgtgcaggttggggcagctgggctctgagggcaggcgcgggcgctgggctcgggcggcccctcacctgggatccgtcacgtttcaggactttattttcttctgcgatgctgtagcctcctgggtgagcccgaaggatgaccttcgggacatgttttataaggtgaggctctgtctgggccctgatctagttccgggagcaggcaggggtgagaccatctggtaacaatggggcctggggatgggggaagaggcgcactccccttgttctgcccctgcctacccctcaccaccaccctccccacagattctccacggcttcaaagaccaagttggggaagataactggcagcagttctctgagcaattcccgccgctgctcaaggagaggctggcggctttctatggggtctaggtgatcatggagactgccaggtaaggagactgcagctggcaagtcagcactgtcttgggggccgaaaggtcccaggccatgaccttcctcctccccctgcaggtttctgtctgcgtcgtcgtcggagggattactggggagtgcgctgcatccggaagtcgctgtgccctggttgaggggggttagggaggagtgagtgggactcaaatccagatgccttccccg

SEQ ID NO: 90930 - DNA, 1071 bp, Homo sapiens
tctcaaactcctgacctcaagtgatctgcctgcctcggcctgccaaagtgctggagattacaggcatgaaccactgcgcctggccctaacactgtgccactttatatcaaggacttgcacatccgtggatttttatatctgcagggacctggaaagaatcccccacggacactgagggatgaccgttggggcactgccatctcccatttgcagatgtgggctggaggctagggaggttaaggaacagctaggagctctagaactggaaagtggcagaggctggacatgcaccagggactgtgccccctgagctgtcctggttagaaggaggggagcctagccacactgatcttacttgaatccccaggactcgatgcctgaggtccggcagagctcctttgccctcctgggagacctcaccaaagcctgcttcatccatgtcaagccctgtatcggtacgacactcgccttgtccctaacccatgaccccagccccggcctcaagtgatggagagcaatacccggggatgactgtgaccacattgggatgtattcgtactgtctgatggggcctgctggactaggtcctgcagcttaccctggctggccctccttctcagcacccctgtttctccccaccagccgagttcatgcccattctgggcaccaacctgaacccagagttcatctccgtctgcaacaacgccacctgggccattggtgaaatctgcatgcagatgggtgagtgccctgcaagtggcaacacgcgccccccattagcctgttctcaacctgggggcgggagcctagctctgactgacagcttccttcaaggcaagtctcttgggggtcgtcaggggtggagccaagcagaaaggtcatttgtgattggcttctctaaagaggagggataggagggctgttctgattggaccgttttgtgtagttggctaaaagactcattcggattggttgggtgactttggctttttttttcctttgacttgggcagcgtgttgtcaccttagcgactccagagaagcctctgttgtttggagggtgtgggtctgt

SEQ ID NO: 90931 - DNA, 1950 bp, Homo sapiens
cagctacttgggaggctgaggcaggagaattgtttgaaccaggaggtgaaggttgcggtgagccatgatcgtaccactgcgccccagcctgggcgacagagcgagactctgcctcaaaaaaaaataaagataacccggggctttgggatgagaggcttctgttgtttcccctcctgtgcctgcctttacctggctctgtgaaatgagtctgggccagtgatttaaactctaagcctcagtttccctatatgttgtgtgcggctgactcttctctccatacggtgggtgtggctgggcccaatcaaactgccccctcttggttccctttccttgtaggctgcatgcagggcatggtgccctacctgcctgagctgatcccgcacctgatccagtgcctgtcggataagaaggccttggtccgctccatcgcctgctggacgctgagccgctatgcccactgggtggtcagccagccacccgacatgcacctcaagcccctgatgacagagctgctcaaacgcatcctggatggcaacaagagggtacaggaggcggcctgcaggtgaccctggacccctgatcccacagcccccactctcccccggccaccctctgggaagtgatgacacctgtgactgttgatgtggaactgatttatcgcgtattcgtactggctgatcctgagttgccctccccaactgcccatggcccagtgtcacctgccatggtccactgagcccccgcttcatcctccctcccaccagtgcttttgccaccctggaggaagaggcctgcacggagctggtgccctacctcagctacatcctggacacccttgtctttgcctttgggaaataccagcacaagaacctgctcatcctctatgacgccattggcaccctggccgactctgtaggccaccacctcaaccagccggtgagaccccagagcggctcccgcctcccgatccccgtgcccctgggcatccagtgacctggtggcaaccccgtgttgcacgccagggacgtggccgtgacctcgacaggcagacagacagacccggccccgccctcgccctgctcccagtctagtgggggagaaagacagttatgagacagcgtggtaagtgctgtgcttcgggaaccaggaggtggtaacccaggctcccggggggtggggtggggcgggcggtgcttggacaggtgagaagaatgaaggcctcgaggtctggccagatggcaggcctttcagggtcccatgagccacggtgaggcgctcaggcctcatcactcgggcaacaggtacctgagtcacagtctgccaccccgacccagggagcgcccatttcgtgctccctctccaggaatacatccagaagctgatgcccccactgatccagaagtggaatgagctcaaggacgaagacaaggacctcttccccctgctggaggtgagtgggctcctgcccctcacccgaaacccatcctgcccaccctgcctgagttctccccacctgccttcctccctgccagtgtctgtcatcggtggccaccgccctgcagagtggcttcctgccttactgtgagcccgtctaccagcgctgtgtcaccctggtgcagaagacactggctcaggccatggtgagcaaccctaggcccgtcacctgtgcttctgcattggcctgcctcgggcctgctccacttacccgtgcccctgtcggcatctgtgtctagatgtacacccagcaccctgagcagtatgaggctcccgacaaggacttcatgatcgtagcactggatctgctcagcggcctggccgagggcctgggtggtcacgtggagcagctggtggcccgcagcaacatcatgacattgctgttccagtgcatgcaggtgggtggggaccctggacagtgatgacacccagcagcctgcgtgggctgcccctggt

SEQ ID NO: 90932 - DNA, 1170 bp, Homo sapiens
cctaggctatgattatagagcgaggattatcataatattggaataaaaagtaattgctacaaactaatgattaatgatattcatatataatcatatctaagatctatatctggtataactattcttgttttatattttattatactggaacagctcgtgtcctctgtctcttgcctcggtgcctgggtggcttgccgcccacagggttagaccctgcttcttaagaaaaaaaaaaaaaaacctttctctggaggcaggagtggtatcatttatatcctaatcatagcggcagagactagattccgataattccccagagggaaatggatcaatttgcacctagcagtaccatcatgctctgcagggtctgctctgtggctgattggggggctggtcactctgttggcacctgtttgcctcctccccaagctgtgcctccccccaacttttgccacggcccctgcatccccataaacagtccctctctgtgcaggttgatccccatcttggtgaatgggatgaagtactcggaaattgacatcatcctgctcaaggtcaggcagggcccacccagcatgggtgggcatgggcgtgggtgtcgcggctgtggtccccaaagtacttaacagtctgcctgtcccccagggggatgtggaggaggatgaggctgtccccgacagtgagcaggacatcaagccacgcttccacaagtcacgcacggtcacactgccccacgaggctgagcggcctgatggctccgaggacgcggaggatgacgatgatgatgatgctctgtccgactggaatttgagtgtgtgcccctgcctgggggtggtggtggggtggcaagccctggactccctcttgggaggtgactagaagctgaggcagaagctgattagaagctgatcgtggccgggcgcagtggcttacgcctgtaatcccagcactttggaaggctgaggcgggcggatcacgaggtcaggagatcaacaccatcctggctaacacagtgaaaccccgtctctactaaaaatacaaaaaattagtcgggcgtggtgtcgggcgcctgtagtcccagctactcgggaggctgaggcaggaaaacggcatgaacccaggaggcggagcttgcagtgagccgagatagcgccactgcactccggcctg

SEQ ID NO: 90933 - DNA, 1989 bp, Homo sapiens
tgcacggcccctcccagttttttttgctaatttatctttacttcatagcttgcttccagctcccaagggtgaggattttgtgttttgctctgtgctgtgcctcagggcctggaacagagttgactcacagtaaggctcagggtgcctactgagtcaaggagtacccttctacctatgtcaaggccaggagcggtggctcacgcctgtaatctcagtgcttttggaggccaaggcaggaggattgcttgaggccaggagttttaggccagcctgggcaacatagtgagatcccatctctacaaacaattttaaaaattagttgggcgtggtggcatgtgcctgcagtcccagctacttaggaggctgaggcaggaagatggcttgaggccaggagtttgaggctgctgtggactattgattgtgccacagcagtccagcctgggcaacagagctaattctatctcttacaaagaaaaaaaaaaggaggggggatgtagagggcgtacatgggctagggaacagaaaggcagcactgggggtgtccagtgggagggggaggtgctaggcagcccctgcccagcctcaggcagcgtcctttcccggccgccccaggcattctcatcaccaccatcgcttccaagggtgagctgcagatgtggcccgagctgctgccccagctctgcaacctgcttaactcggaggattacaacacttgtgaggtaggcaagaagccatggatggccagagcgagtactggggggctgggaccaccacccaccacccacgtttgtctctctgcccctctgcactcagggagcctttggagccctgcagaagatctgtgaagactcatcagagcttctggacagtgacgccctcaacaggcccctcaacatcatgatccccaagttcctgcagttcttcaagcactgcagtcccaagatccggtgggtgcagctccctgggggcttccagggagcctggagtgggcagggtcagggtgacccacgtgtctgctccccgccaggtcccacgccatcgcctgcgtgaaccagttcatcatggaccgggcccaggcgctgatggacaatattgacaccttcatcgaggtgggccgctgggctgggggtgggcagggcgaggactgagggcccctacaactgaccctgttcctccctgcagcacctatttgccctggctgtggatgatgaccccgaggtgcggaagaatgtgtgccgtgccctggtgatgcttctggaagtgcggattgacaggctcatcccccacatgcacagcatcatccaggtgtgcatggtcaaggccagcccaggcgggcaggcagggggccggtggcaggggtcagggagccacccccagccaggccaggcctcagcttctcccccctaccacagtacatgctgcagaggacccaggaccatgatgagaacgttgcccttgaggcctgtgagttctggctgacgctggccgagcagcccatctgcaaggaagtcctggcctcccatctggtccagtgagtgctgctgctgcccactgtcctaccccagcttcgaccccttgctatgcctctgccttcccttctggtcacctgctgtgcttctctcagtccacatccttgtcagtttacattcagtatatatttatgtgtaagtggtaagaatgccactttttgaagacttcaaaattaggtaactgataggtggaaagaaatgaaaaatcaatggccacatgtggtggctgacacctgtaatcctagcactttgggaggccgaggcgggcagatcacaaggtcagaagatcgagaccagcctggctaacacggtgaaaccccatttctactaaaaatataaaaaaatagctgggcgtggtggcaggcgcctgtagtcccagctgcttgggagggtgaggcaggagaattgcttgaacccaggaggctgaggttgtagtgagccaaggtcgtgccactgcact

SEQ ID NO: 90934 - DNA, 1061 bp, Homo sapiens
cgccgccgcctgtggcccgtttccacatcccccctcccgcgctcccgagcccgcgactgcgcggccgaggatggcgcagctggcggggaccccgcacttgggcgggcgtggatcggaggcctccgcctgtccgccgagggcgttcccgtcgtcatgcggccaccgcggcctcaggggctccacctgggtctcacacggagccccagagacccagcgctgaccccggcccctacctccgcagcttgccttgcgccatggactggcagccagacgagcagggcctgcagcaggtcctgcagctgctcaaagactcacagtcgcccaacacagccactcagcgcatcgtgcaggatgtatccttccttccttccggggctgggggagccgggtagatgcgtgcagtttccaaaggccagagagagaaagagagggactgactcccctagtccccagattttttctgctgtgcggaggatctgccctggacagagaaggattacaattcctgggtcccatttccagagctgcggggattgttatagaaaatgatgaaaattcctaatgttcatcgaacgctagcatctactccattaactattaaagtaggccctggcccaacggggtggctcatgcctgtaatcggagcactttggtaggccgaagcaggtagatcgcttgggcccaggagtttgagaccagcctgggcaacatagggagaccccatctctacaaaaaatacaaaaaatagctaggtgtggtggcatgcacatgtagtcccagctacttgggaggatgaggtgggaggatggctagagcccaggaggtagaggttgtggtgagctgagattgtgccactgtactccagccaccctgggcgacagagccagaccctgtctcaaagaaaagatatataggccaggcgcggtggttcacgcctgcaatcccagcactttgggaggccgaggcggacggatcacctgaggtcaggagttttgagaccagcctggccaacatggagaaaccctgtctctactaaaaatacaaaaattaagccaggtgtg

SEQ ID NO: 90935 - DNA, 1038 bp, Homo sapiens
gaggccaaagaaacggcaactctttggtcacgtgaccggaccttgtctcagcccgggtttcccaagtgccagggcacgtgtgaaggttgaaccttccgattggctcggcgggaccagtttgaacggagtacgggagccgcggcggctcacctacggccgcgtttttcttttttttttttctttctttcttttttttttttttttttttttttaattctctctctttggctccctccttccgcgcgagtctctggagaagccgcagcgcgagttgccgccgctgctgcccggggccgggtaagtgggcctcactcagagcccgaccctcttggccccggcttgcgtcgacccccgccgggcaccgagcctgcgccgcgcgcggcccgggcgtcggggccgcgcccgaccgggaaaggccgggaagccggttgggcccgatcctcctggcagctagaacgggccgggcgggggaggggggaaccgagcagagcttagggggtggggcctcggagccaggccatgtcggggctcctcaagaagagggccagtgggactgctggggtcgggctggaggggatctgattgggggaagcgtctggggactgcttggggcctgattgggggacgtcgcgaggatcgggtgtgtgtaggggcctgtttcggtggggcttggttgggtctgattgggggaggccgcactgaaaagttgagcggggtggggggaggggagctcgttgggtcctgacagggaggggcgtcagacttcggcctagagggttttcttggatctgacttcgaggcgttgctgggatccgttgaggggaatgccccggggggtgtttacccaggccgaactgggggaggctgcaaggatcggaccagggggttactgacacgaggtggtggggggctcggccgaacttgactgggagaggcaacagagatccgtcagcaggggttactgctgacagggtcggagggaatttcagggagaggcttggccagacctgattggggaaggcgactgggatcggtcca

SEQ ID NO: 90936 - DNA, 1737 bp, Homo sapiens
cttcaggtgatctacccgattctacctcccaaagtgctgggattacaggcctgagccaccgcgcctggtcaaaaagggggtggttctaactttcatcttagggtagctgtgaaaatgaaaggagatgatacatccacagcacttggcacagggcttggcatacagtacatgctcaataaagggagctgttgccacctcttgtggtccctgctagggagggtgaggccttggcgtggaaagtgagaacagagctggtccctactgaggtggacactcttcttgctccctgggagggcaccgcgggcccagggcaggcgctgagtcgcgtgtgctcctctctgattgctgcgcaggtcggccggctggcggagctgggcgcggcgtcaggacgggccaccaggccgggctaggaaggtgtagtgggcctcagcgccgccaagggcggtcccggctcctgtaaccgttgcagtcttctgtcccttcacccaggtgggcaaacgcagaggcgggaacaaactagccctcaagacgggaatagtagccaagaagcagaagacggaggatgaggtgagccagcttggtgcagggggtccacccacattgcctttcccttccagcttttgcgcccagccttctccctccctgtctggtatccaggccttttatgagtgtgcctggcagggtaggagggctgtcaatgggtccccagataacttgactttataatcttcagctcaaacccagagtcttctgggtgacactgggaatgggtcacctgtctcagggcagtcctgaccctggttcctggcacccccgtcctaacccgtatcccctttccacaggtattaacaagtaaaggtgacgcgtgggccaagtacatggcagaagtgaaaaagtacaaagctcaccagtgcggtgacgatgataaaactcggcccctggtgaaatgacgcccctcccccacctgcccatggcctgggactctctgcgatgtacataactatttaatgcagcggcagcggcgacagccttccctgagaggacttaaaagcagaaggaaaccgagatgcttcccgcagccgtggacgattctccaggactctttttttaccttgagcacttgcctcgtgagacttcatagaacagtggtttactgtcccccccttctcacctcctcattctctctggctctttctgtcttcctcttctcaccctcctccctccccttagccatcacttctgggaagtaaagaacttgacttagtgccggagctgtgtgcttggtttgtcttctttgcgctgtcggacctaagccttccccctgttgctggcattgtacctgtcaaagcctgggcctgacccagtaaggagcgggatatggaagggttaggaaggacaggggcacatcccctcctgtaggcctggactttccccaagacctatctcccctcactgctgcatctctaccgtgccaccttaggctcactttctcttcacagttccattttggcttggccaaagctgttgcattgtgcattcagcagacacttaggagcatctattatgtgccagggctctgcaaggctctgggacaacagctgggagcacgcagaccacaccctccctgcccttacagaaggagacagacacaaacaaaaaggggaagcccttttgcagctagggaggaggcgggtatgtcttttaggtgacatttgattagagtcctgagggaggtga

SEQ ID NO: 90937 - DNA, 1916 bp, Homo sapiens
ctgggcgtggtggcgcatgtctgtaatcccagctactcgggaggctgaggcaggagaatcgcttgaacctgggaggtggaggttgtggtgagccgagatcgcgccactgcactccagcctgggaaacaagagggaaactccgtctgaaaaaaaaagaaaaaaaaaaaacgaaacaaaaaaacccgcgagacgggggctcctccccctagccccgccccttcgggttggttccctcattcgccccgcccccgctgcgggcgctggagggcctgaccgctcttcccggcatgcattgttcgggacgaggcgagtcgggcgccaagcgcggggccggagcggccttcccggagtcctttgcgcggcacctggcgacaaaatggctgcccgagggagacgggcggagcctcagggccgggaggctccgggccccgcgggcggtggcggtggcgggagccgttgggctgagtcgggatcggggacgtcgcccgagagcggggacgaggaggtgtcgggcgcgggttcgagcccggtgtcgggcggcgtgaacttgttcgccaacgacggcagcttcctggagctgttcaagcggaagatggaggaggagcagcggcagcggcaggaggagccgcccccgggtccgcagcgacccgaccagtcggccgccgccgctggccccggggatccgaagaggaagggcggtccgggctccacacttagcttcgtaaggagccgtgggggtgggggcgggcgccacggcctgtcttggcagcgggagtcggggcccgtgaagggggatcgggaccgaagtccactttccgttctgaatgaggggcccgtccgggtcacccgctgagggtgtggaacttggattcccgacaactggggtctaggggcgggagtggggactccaggagcttgcccgtgggaactgggagctgaggaattgcctaggaatcagcactgtggagaatgaggaaacgtggatatcaggattcctgtttgagtggtacccggaccttgggtcatgggaccaccactaattgtgaggaaagggagtaaatttaagtctggactctgagctatatgtgttagactcagaccacgtactatgtaaggacaattacttatctaggacaattgcttgacttccttgtatcttattcgaccaacctccatttattgagcaatttacctcgtgctaggcattgtgctaggtgctggtatgcagtggtgagcttacagacaagatcgctgctttcctggagcctctgggtttgcctaccctcattttccctagttgcaaaaatagacatcatagcatctcttgatgtggtgagggttttatgaggtgatcctggaaaagtggttagcacagagcctgtcttccaggaagggctaaactggtggttctcaattggggcagttccctccacccccacatttggcaaagtctggagacatttttggttgtcagaactgcgggagggggtgctagtgacatctatgggtagaggccagggatgctgctcaacttcctaccatgcgtggggcagcgccctcccacccccaaacaaagaataatccagctcaaaatgttattagtgccaggttgagaaactctggattaagtaaatagggcatatattgatttttggctctgagcttgccatgtctgtggtgttaagatcaagtccctgtagtgtggaggaaaaagtgttgagaataacaagactgggggctctagttctggatccagcatgtgattttgggcaaatgatctaacctctgcaagcctcagtttcttcatttgttaaaaatgggcgtgggttgggtgcagtggctcacacctgtaattccaacattttgggaggtcgaggtgggtggatcgcttaagcccaggagttggagaccagcct

SEQ ID NO: 90938 - DNA, 1062 bp, Homo sapiens
ctaccgtgaagaatagagggaaaatgatggacataaagttgagcctatggagtcaggccaaggaggaccgggaatctaacttcaccgaaagggcatggactgggtgtttggctggttgctaaggtgaggttggcgctaccggaacataagagtgattggtgtaagtaagaaaagacatagccaatgaaaggagagctgcaagacctagggcccaatcagtgaaagggagtagcctagaccgtaccgatgtgttcattaggtagggggaacccttggaaaattatagaccagaggttgacaaagtgaaccctggaagcaaagaatagtgaaaatataatttatatttctcctaaaaggcaagtaatgaggaaattaactcatgctcctagcttcgctaggaatgtgatagagaatttcccctgtaggttcttcgtatggtgcgctccgctggatcacgtgagccagttccaaaatggcggcaggggtggccgggtggggggttgaggcagaggagttcgaagatgctcctgatgtggagccgctggagcctacacttagcaacatcatcgagcagcgcagcctgaagtggatcttcgtcgggggcaagggtggtgtgggcaagaccacctgcaggtaaggaggctgcggcgggggccaggaggcgtgtaggatataccactgggcgaaggggaggccaaggaccggcttttccaccacgaccggggcatgggggctggcgggggtctttgggtttcactctctggaagttacctggagcaaatgagaaagacctcaatgcagccctagcaccctctgagttggaccatccgtgttggggctcaagtgccgaaccacagtgaactcagcgcccgggggacggggaagcacttagatatccccatcagctggaccgtacctgagtgaatccagagttgtgggtgagggcggcaccagaacaagcaatcctagtttggtgaaccttggtgttttatgcccaaggcgagagtgagggtggaaagcgagggagagagcacgtgatgagactgtcccaggcagctacag

SEQ ID NO: 90939 - DNA, 1003 bp, Homo sapiens
cggcggttgcagtgagccaaaatcacgccattgtactccagcctgggcaacagagtgagactccatttcaaaaaaaaaaaaaaaagaaagaaagaaatggaaaagctagtatttgaccaaccccaggaatctgcttatgggcctgagcctttaaccactgggaggtatcaggagtcatccctcgggtgtttagtgaacccccaacccaggaggtcgccgcaggtaagctatgagccctcccacatcccccctgcagatgtgcaacatgctgggcctgggggacatgaacgcagaccagctggcctccaagctggaggagacgctgcccgtcatccgctcagtcagcgaacagttcaaggaccctgtgagtggtggtctggctggcggtgagaggcccgggggctgaggacaggggcagaccccgcccctcactgtcctctctcgtgccctgtaggagcagacaactttcatctgcgtatgcattgctgagttcctgtccctgtatgagacagagaggctgatccaggagctggccaagtgcaagattgacacacacaatataattgtcaaccagctcgtcttccccgaccccgagaagccctgcaagatgtgtgaggcccgtcacaagatccaggccaagtatctggaccaggtgtgcccacccacccagcactggctcagcagaggcacctctgcccctttattctctgatcttttgctccaccatctggccctctgccctctagcctcctgccctttgcccccacatttcagatccttcacccttattccggccatagaggactgtggctggcctggcctaggtccctgtgaccctggagagcagggggtctagcccagtgatctctgaccatagtgatgcagctcccacttatgacaccttaagctcctgccctatattctctccctgactctggaagctttctagctttaccgcttctattgatccacactctgtctctgccttcctgccccctgacca

SEQ ID NO: 90940 - DNA, 1046 bp, Homo sapiens
ttcacactcaccctccaccctccccaccccctcggggcagagtttgcacaaagtcccccccataatacagggggagccacttgggcaggaggcagggaggggtccattccccctggtggggctggtggggagctgtagttgccccctacctctcccacctcttgctcttcaataaaatgatcttaaactgctgtattgttgacattgggaggtgagggtaagcacctttatgtacagttgcacaggttgtgcactggacagaagtgtcacatctagaggggcccattcacaacagagacctaatagagatgcatgtttattgtggcaactttggaaggagggtgtcttgggtgagagatacctttgtctcattctgtgtgggttaaggtgtccctgttgggcctgtgaagcctggaatggaagacagaggcattttcccacttccttggaggctcagagcgtgggaactgggaggccccttggccagccccaggctggtggggagcagagcagattaggccggcagtgggcccggcactgcctgctgtttggtttgggaattagtgggcgccctggggagaggccaggcctgccagactggggattaacagtctccaccccccaattcctgcccccatgggatggcatcagcccctcccagcaaagggctgcagcaagggggctggttagtgggcagggtgacagaggactccggctggaggggctcctgaagtctcatcctgactccagagcggtctcaggctgtgggcacacaggcctggaaggcacctagtggacccccttatcccctgcccttcgctcctccctctgccactgcctgggctgctattgttgtccccacttgggagactcaggatggggtatgaccttgagagtttacaagttccaagccagagctggctaggggggacagaaagggggttcctgaggacacacgtgagtcggtgttcaggccgggcgcggtggctcacacctgtaatcccagcactttgggaggccgaggtgggtggatcacttgaggccag

SEQ ID NO: 90941 - DNA, 1050 bp, Homo sapiens
ggctgctggatggagtgcttgagagtagaagaagctagcaagggaagatggtggctgaaccagcttgggagctgtgggatgggaagaagtggacagcaggggctgttccggggcatacctgctaagggtgcggagggttgtggctctgacagctgtggagccggtgggaccagggcacacagccccaggcatgaggggcaggcagagagggctctgtggccatgtaggggcatttctggctggcggggaggtctgtggctaccactgggacaaaagagaagccagcccggaggtcagcccactgctgctcatccccggcccacaggcagaagcttcatgaggcagatctggagttgcagaggaagcgggagtacattgaggagctggagccacccactgacagcagcagtaagtaggacctagtgaccagagggtggggagatcccagagcccagcagcgtggagctgatgggccacctcttccgccagcagcccggcggatcgaggagctgcagcataacttgcagaagaaggacgcggacttgcgggccatggaggagcgataccgccgctacgtggacaaggcccgcatggtgaggacgctgggtgttcccacaagttgcctgccctggcttcttactttttgtgcctcctattgagtcaaacctcctgcttgcacatctgtgcccccaactcatacctgtcataccccaccataagacagacttctgcatgattccccactgctactgattgtcacattaaaatactgcacagctggctgggtgccgtggctcatggctgtaatcccagcactttgggaggtcaaggcaggcggaacatgaggtcaggagtttgagaccagcctggccaacatggtgaaaccccatctctactaaaaatacaaaaattagctgggcatggtggtgggtgcctgtaatcccagctactcaggaggctgaggcaggaaaatcatttgaacccgggaggcggaggttgcagttagctgagattgtgccactgcgctccagcctaggcgacagggcaaga

SEQ ID NO: 90942 - DNA, 1141 bp, Homo sapiens
cgagactccatctcaaacaaacaaaaagccaaaactaaccaaacaaacaaacaaaaaaaccccgaaaaactgtcccatcctagttcttcccatttctgcttcccgctttccagcagtcccatcccagctgttcgaatccactcttgtagctccgcccctgcctagccccacccactatcccagcttagagctccgtccactttaaccctgggccgggaacctgaacccgtagtaggtcctcggtgctccaaccccatggtctggctgggctcttccccagggctctgtcccgcccctagctccactctccctgagccccagcgagcctgcgaggtgactcgaccctggccctgctctctcctcccgggtctgcagggagacgctcctgcggcttcagctggagaacaagcggctgtgcaggcaggaggcggccgaccgggagcggcaggaggagctgcagcgccacctggaggatgccaaccgcgcgcgccacgggttggagacgcagcaccggtgagcgcctggggacctacctgcgcggagcagggacagagggggccaaaagtgggcacaggcactaagcggccccccaccctcgcaggctgaaccagcagcagctatccgagctgcgggcccaggtggaggacctgcagaaagccctgcaggagcaggggggcaagactgaagatgtgagtgtcacccaccacctcccagcctggccctcccttgtgccccgaagtaaccctcctctctctcccatgctgcccgatgccccatacaggccattgtaagtaccatgggcccaggatggcaccccctaccctcaccctgggaaggaagaattagggcctctctggatcccccactcaccttgcctcttctctctcccagtccattttgctgaaaaggaagctggaggaacatttgtaagtcgcagaaagagggaactcctcgtgggggcatggatttgatattagtggggagtttcttaggcatgtgccaccatgcctggctgattttttatatttttagtagagacggggtttcactatgttggccaggctggtctcggactcctgaccccagatgatccacccgctttggcctcccaaagtgctgggattacaggcatgagccaccg

SEQ ID NO: 90943 - DNA, 1019 bp, Homo sapiens
acagaataggatgagatgagcagggaaggagaagtgaggtggagagaggatgggacctacagattcagagtgggaggcctctgaacttgtccacagttccttgttcctccctaggtcagcaatctgaagatggtcttacggagcctagtagagtactcccaggatgtgagtaactgtaaagggattcagggggttgagttgggagaagggtgggcccatgagcccctgacacccccttctccccaggtcctggcgcatcctgtgtcagaagagcatctcccagatgtgagcctcattggagagttctcagacccggcagagctcggcaagctgcttcagctggtgctgggctgtgccatcagttgcgagaaaaagcagggtatggggagcttagggggtccccagggctggcctgaggaaatcctccttcctccccacctcacccctgggtctcagcctcccccaccttgatccccagaccacatccagagaatcatgacgctggaagaatcggttcagcatgtggtgatggaagccatccaagaggtgggtgggggcactcagtgtgcaattggaaaatgtcaggagaggggacatctctagggcagagagaactgggcacaggtcctgccctggtaaggtctggactctgcctggaactcagctggccagacatctctgtctcatgtgtctgccagctcctcccagctctaagtcgcaatctagcaggctcaagggatctggcttccctctgtgttggaggcaggagggcagcctctgggctggggttattgggcagaactggccttgacgggaggatggagaggttctcaggttggatagtagatactttgaaggctggcctcagatatccagttcattacaatgccccttcccactcctcagctcatgaccaaagacactcctgactccctgtcaccagagacgtatggcaactttgacagccaggtaagagatttgggggaaaggtgttccaggcacagggatcagcaaatcca

SEQ ID NO: 90944 - DNA, 1050 bp, Homo sapiens
tgacacacatggagacaaacacaataggctagaaacataggggcaagacagacacagagtgaactatatgtgagacaagcaggcaacatgtgcatgctgataggagagacagtcactttcagcaccagcaccccgagagccacacgagagatatgcagacacaggcatgcactatcagatcctgacacgcaagagaaggcaacacacacacaccccagatctccaactcagaagatagagacaagacaagagagacaaacctagggacagagatgatgtgttcacagtatggcagagagtccctggcaccctggcccaccactgttgcacacacatcagagatgctcccagggacaccaagccgaagccttagaggtacacaccatctcaccaggaacacacacatgtgggacctggcaacagattgggtagatctgggcagactgacacattcacagacatggtctggccagacagtcacacccagtgcagagaggcacagacaggccacagtgggacattcataaacacatcggcacagaaagaccatgacaaaacctgtttgcacacacacacatgcacacatacaaacggagatcagtaacaggcaacatacagatcagccacagaacacacacatggaaacaagccacagacctcacacacagagaccacacacacacaccaaacacaaaccagccacagacctctttttcacacacacacacacacaccagatcgtatacacacatacatacagaccagccacagacctctttttcacacacacacaaatgcacattacagatcgtatacacacagaccagccacagacctcttttacacacacacaaacagatcatatacacacatacagaccagccacagaccacacacacaaacacacatacacaccgacacaagttagccataggaactttgaaacaacctacacgtacatacatctagaccatgtgcaacccatcctatagagctcacacacacacagagtggaacagaactctacacagataagccctacatagacct

SEQ ID NO: 90945 - DNA, 1047 bp, Homo sapiens
gcacctccttccatgcgtaccccgaggtcctttgagcccctccccctgcagccccgccgagccacccggcccgtggccgctgtttacaaggacacgcgcttcctgacagtgacgcgagccgcctcctccccttccccacgctcgaggaggggggcgcgggggcccggctccggcgacggccaatcggagcgcacttccgtggctgactagcgcggtataaaggcgtgtggctcaggctgagcggctgggaccttgagagcggccaggccagcctcggagccagcagggagctgggagctgggggaaacgacgccaggaaagctatcgcgccagagagggcgacgggggctcgggaagcctgacagggcttttgcgcacagctgccggctggctgctacccgcccgcgccagcccccgagaacgcgcgaccaggcacccagtccggtcaccgcagcggagagctcgccgctcgctgcagcgaggcccggagcggccccgcagggaccctccccagaccgcctgggccgcccggatgtgcactaaaatggaacagcccttctaccacgacgactcatacacagctacgggatacggccgggcccctggtggcctctctctacacgactacaaactcctgaaaccgagcctggcggtcaacctggccgacccctaccggagtctcaaagcgcctggggctcgcggacccggcccagagggcggcggtggcggcagctacttttctggtcagggctcggacaccggcgcgtctctcaagctcgcctcttcggagctggaacgcctgattgtccccaacagcaacggcgtgatcacgacgacgcctacacccccgggacagtacttttacccccgcgggggtggcagcggtggaggtgcagggggcgcagggggcggcgtcaccgaggagcaggagggcttcgccgacggctttgtcaaagccctggacgatctgcacaagatgaaccacgtgacaccccccaacgtgtccctgggcgctaccggggggcccccggctgggcccgggggcgt

SEQ ID NO: 90946 - DNA, 1316 bp, Homo sapiens
ggaagctggagcgcatcgcgcgcctggaggacaaggtgaagacgctcaaggccgagaacgcggggctgtcgagtaccgccggcctcctccgggagcaggtggcccagctcaaacagaaggtcatgacccacgtcagcaacggctgtcagctgctgcttggggtcaagggacacgccttctgaacgtcccctgcccctttacggacaccccctcgcttggacggctgggcacacgcctcccactggggtccagggagcaggcggtgggcacccaccctgggacctaggggcgccgcaaaccacactggactccggccctcctaccctgcgcccagtccttccacctcgacgtttacaagcccccccttccacttttttttgtatgttttttttctgctggaaacagactcgattcatattgaatataatatatttgtgtatttaacagggaggggaagagggggcgatcgcggcggagctggccccgccgcctggtactcaagcccgcggggacattgggaaggggacccccgccccctgccctcccctctctgcaccgtactgtggaaaagaaacacgcacttagtctctaaagagtttattttaagacgtgtttgtgtttgtgtgtgtttgttctttttattgaatctatttaagtaaaaaaaaaattggttctttattaatttctgttgtctttttttccaagctgggagggcggggggaaaaaaaaaagcactggtttgcccccagctcagtgctgttggtggctcggtcctgtatgtgtccccctcgtcggttcggcgcaggcatcttgtggtcccagcccaggagtcccacccttcccgcgtccccagatctccagggttggatggttggggcgcgggacgcggtccagggacccaggagctgaaggcagggtgctccggccgagacttggagtgcgcaggcgcgtccccgcccagccgcgcgcgccggggctttccccgctgacgcagcggaagcgctgcccatacaaggaccgattctgcccagtgacgcgaccgcggtctctgggcagattccgggaatcccctcccccgctctgccgggcagggccgcggcgccgggaagggggccgggattttcccgggcaggcggctgcccgggcacggaaagccccaggcctgggtccagagcgcccgcggtgggcgggcagcgctcctgggctccgggagccacccctgtgccaccttcaagacactggcgcctaggccccgccgcgcccacgccccctccgtctgacctgaccggggcggagggttgctgctgcctccgctg

SEQ ID NO: 90947 - DNA, 1051 bp, Homo sapiens
gtattagggaaaggtgtgagtctgtgttggtgtgctctgtcctttcgtcctcccctgcaacccccttccttcttcaggctcaggcttgggaaactgaccctgtggttgctcatcttcgccacacggtggcggtcttatcacatgcttagtgcctgctcttttcctgcttgcgctcaaggcggtttcggaggggtagggtatgccgtttgtcccttgcaaatcccaggatgccctacatccagaaatctggccatgcaaggcaaagcccacattttgtcaccagccagcctgggttcaaatgccgtttaagagctgtgatcgtctctgggtctcttcagcagtaaaatgggactgcaaacccagatcaccatgcacgtggtaaaatttgtaggagataagttatgtgaagctcggggctgaggcccctgtgtagggcccagttcctagttcctaagacggcttcctcgagctgaaaggaacccagcccagtgtagtcttatggggaagagggtggggacccagtcttaagagcagaaccaagaatgagagcctgagctacgtgcagagtgcagagtccctgctgtgagctctgccccaccccaggctggaaaggttgcctgtctgcccctggggtgggagggtggcagttaggctagaaggcaggtattagcagcaaggcagggttcccaggggtgcagtttaatattgtgtgcgttcaggaaagtagttttgctactctatgccccaatttcctcctacagaacagggctaatatgctcatttaatccacagatccactattaatgctggtacccacctaataccctctaagggtcactcatctcccttggaatttaatctacactcctccccaaggcccctgctcagtctcccttgacatctgccctgttgtggttcactccattccagacaggctggcttcctgctgttctttcacaggctcacctggctacatgaattttgccatttaagagctgctcccaaggccgggcgcagtggctcacgcctgtaatcccagcactttgggagg

SEQ ID NO: 90948 - DNA, 1258 bp, Homo sapiens
caggctgctttggcccgatcctgactttagtgctggccgcctttgctttccatccgctatagtggcctcctttgtccttgcgggggaaaccgaggccacagccttgcagcgcaggcctgatcgcccgacttcccgccccctgctcgtgcgggcctcactgtctccttctgggctgggggcttgcgacaccgccctccggccgactcgctcgtggggtgctggtggcagtggctgggtcactcgtgctctggtcaggagagcgggtctccggcagcctccgggcctcgtagaccgggtacccgggagggtgagggttagtgctgtcgcctccgccgtgctgactcagtcatagggcccagcacgcagcgcgaccttgggttgggaggacaaagtgtcttcccgggcgcactgaccgggcgggggtctcagctttcagtcatggcctccggtaacgcgcgcatcggaaagccagcccctgacttcaaggccacagcggtggttgatggcgccttcaaagaggtgaagctgtcggactacaaaggtgagcgccgcccggagggggcccaggtagaagcggggccgtgcatgagagaagctgggccctaactcctctgtgtccctcctccccagggaagtacgtggtcctctttttctaccctctggacttcacttttgtgtgccccaccgagatcatcgcgttcagcaaccgtgcagaggacttccgcaagctgggctgtgaagtgctgggcgtctcggtggactctcagttcacccacctggcttggtatgagcaggggccaaagagggaggttgcagctaagctcacaccctcaggtcctagcagtgtggcttcgtggccattgctcaacctctggaacctgcgtttccccatcgtgaaaataatggaaacattgccgcccaagtctttaaggatgatgacagtaattagcatttgacaactagttgcctggtatatagagttgcagatgcaactcagatgcaactctatctactctatgtacttagttcccaggagggaggctgtgctgccctatttcatgaagatggaaactccagttcaccgaagtgaagggctgtaccccatgacacagctagaggaggatggggactcttaacacaggctctctgctgggtgatgctgcaagttacaagtacatgtgaagccacttagctggagctgtgcctctcaaactcagtcttcccagccatggggatacagtccttgcacccaacccag

SEQ ID NO: 90949 - DNA, 7429 bp, Homo sapiens
aagcggggctacctggtccaggggacttagaatgtgtacagaagcagggaccgcaagtacagggcctgaatccaagtggcagttggggacccagtgatgcggtgacccgtgtcctgggagtggggtgatatttgactctctagttccccgttaggctgggtcttcgaagctacgtctcagtttccctcttatttccccctcttcccaccgggccacgcaggcggggccccagagaccgtgaagcagagcttgcaaagtgaccccgtccaccgaattccccaagctgagtgttcggccatagcccttcgggactacaattcccaggagggcgcacggcagcgacgtcggcgtcggctgcgtaagcgtccacggcggcgggagcgccaggggcgtgttctgcccgcggattggccggaagcaggcgccgcttcgaggcccgcggaaaacgcgcgccgagacccgctcctgcagtattagttcttgcagctggtggtggcggctgaggcggcatggatctcagcgagctggagagagacaatacaggccgctgtcgcctgagttcgcctgtgcccgcggtgtgccgcaaggagccttgcgtcctgggcgtcgatgaggcgggcaggggccccgtgctgggtgcgcccctagggccagggaggggaggggcgtggtacggaggatgcgggaaacgggagtcgggattgcactgcaccaagggaggggatgtggtcgtggtgatggcacctaaagaagcagtgatgatagaacagggatgaatggcaactttcacgggctcagtgattggaccccggctgccagaaaactgacaccccttctccccaggccccatggtctacgccatctgttattgtcccctgcctcgcctggcagatctggaggcgctgaaagtggcaggtgagcccgaggtgtgcgtctggggaagggattcctgggtatgtgcaggggcaggtgagaactgaaaggggagggcaggaactgggagaaccagctgttccccttctcttccaaacctcctcccagactcaaagaccctattggagagcgagcgggaaaggctgtttgcgaaaatggaggacacggactttgtcggctgggcgctggatgtgctgtctccaaacctcatctctaccagcatgcttgggcggtgaggggtccccgggaggggcagccagcatgggctgaccaagctttgttcctagaatgagattaactgggctctgttccccaccacagggtcaaatacaacctgaactccctgtcacatgatacagccactgggcttatacagtatgcattggaccagggcgtgaacgtcacccaggtgagttaactgtaagttgtccccatttggtcatctcaggataaaatggggacaaaacaggagttcgagactgcagtgagccatgatcatgccacagcactccatcctgggtgacaaaggaagccccccaactcaaaaatggaggcagggcgcagtggctcacgcctataatcgcagcactttgggaagccgcggcgggtagatcaccggaggtcaagagttcgagaccagcctgaccaacatggtgaaaccccgtctctactaaaaatacaaaaattagctggacgtggtggcaggcgcctgtaatcctagctactcaggaggctgagacaggagaatcgcttgaacccaggaggcagaagttgcagtgagccaagattgtgccattgcactccaacccgggcaacagagcaagaccctgtctcaaaaaaataaaaaataaaaaataaactaaaaatgggagaccaggcgcagtggctcacggctgtaatcccagcgtttcaggaggctgaggcaggcagatcacctgaggtcaggagttgaagaccatcctggccaacatggtgaaacctcatctctactgaaaatacaaaaaattagcccagcatggtggcgggtgcctgtaatcccacctattggtgaggccgaggcagaagaattgctcgaacccgggaggcggaggttgcagtgaggtgagatcgcgccattgcactccagcctgggggacagagcgaaaaataaaaataaaaataaaataaaaaataaatgtgggcaaaaatgtgcagtgtgcagattcagcatcagatacgtctggagtgcctcgggcatattcattgctactgttgatttcgtgctcctgtttctgccctaaatgtgtgccacactgacgaccacagtgtagcccctagtcccgtctccatctaatctctccctcatcctaaaggctcagtctccagaacaaatcctacattgtctacctgtcacctctgtcctagcccaggacaccccccactccctggacacctgctgagtgtcgtctctcgtccctcaccctcctatcccctccaatctgttccccaagcagcaacagaaggtagtctttttgaaatgcacatctcgacatttagttttccgatcacagtggaaattaaatcaggaaaattcacagtcgagtggggcagaattacattaaattaccagagaaaaacataaatcagcattgcctcgaatgctctcaatgaaagaatggaccgttctgagagaataacaaggcaaaataaccttgacgtaggaattgtatgctgggtatggtggctcacgcctgtaatcccagcactttgggaagctgaggtgagcaaattggttgaggctaggagttccagaccagcctgggcaacatagcgagactccatctccacaaaaagaagaagaaagaaaggaattatagcaaggtagaccctgctgaggagggacctgaggaccaggcccaaatgcagagctggcgatacagtaactggtgtagacagacaagggccctacccgtaggcgttcagggcctagcctgggcagaaagatggtcagctggaggttgggcgcagtagctcacgcctgtaatcccagcactttgggaggccgaggcgggcggatcatcaggtcaggagttcgagaccagcctgaccaacatggtgaaaccccatctctactaaaaataaaaaataaaaaaataaaacatgaaagatggtcagctggtaaacaaaaaataaaggttgtttctgaaaacagtagtgctgtggagataccactttctcccagcagctcttggaccctctcttcggtgctgcagccaaaggcccccatgcatgggcccagcatcatgaacctggtcccagctcagggcctttgtactggctgttctcacacctagagccctcttccccagatctctgcacagttcacttcctcacctccttcaagcctttattcaccactacacctagctaactttttattttttgtagaaacagggtctccatatgttgcccaggttggtctcaaccacctgccctcaagcgatcctcccacttcggcttcctaaagtgttgggattacaggcttgtgctaacgcactctaccaatttttttctagtgttttctgccacctcagttcctagaacagtatgtggcatgcagtaggtgctaaataagttagagtaaaagcagcgtgatagagaaagcctcttcaggaggtgagttttttctttattttattgtatttattttatgtttttataaagatggggtctcactgtgttgccaagcctggcctcaaactcccaggatcaagcgatcctcccgcctcagcctcccaaagtgctgggatcacaggcctgaacaactttgcctggtctaggaggagatgttcgagttgaaatccctgattgatccatcctggggacgtgctggagaagaggattctgggtagcaggaagaacgtgccagggctgtgaggctagagcattggtacagttgtttgttcaattaatatgtgtctgttgctgtggcaggtattcgtggacaccgtagggatgccagagacataccaggcgcggctgcagcaaagttttcccgggattgaggtgacggtcaaggccaaagcagatgccctctacccggtggttagtgctgccagcatctgtgccaaggtcagtaccctactagccatggctggcttccaccatcccactatataggggccaggcatggccaccaaagggaaggagggagattccaggtgcctgttttgcccacaggtggcccgggaccaggccgtgaagaaatggcagttcgtggagaaactgcaggacttggatactgattatggctcaggctaccccaatggtgagcagacacgtgaccatggtactaatgttgaaatggccagggctgagcacacttctgaggttttctttttttcctttctgtcatttatcattttattttgcttattttttgtttttatttgttatttttgtttattttttgagacggagtttcgctctttttgcccaggctggagtgtaatggtgcgatctcggctcaccgcaacctccacctcctggcttcaagcgattctcctgcctcagcctcgcgagtagctgggattacaggcatgtgccaccacacccagctaattttgtgtttttagtagagactagttttctccatgttggtcaggctggtcttgaactcctgacctcaggtgatctgcctggctcagcctcccaaagtgctgggattacaggcatgagccaccgtgcccagcctattttttgtttttatagagatggggtcttgtcatgttgcccaggctggtctcaaattcctggagtcaagcagtcctcccaccttggtctttcaaagtgctgggattacagccatgagccaccacccctggccctttttttcttctttttttaaagagatggggtctccctatgttgcccagcctggtcttgaattcctgggcttaagtgatcctcctgccttggactcccaaatagctaggattacaggtgtgaactactgtgcctggctggaggttttctaaattgctctggtcaccctactccacagtgaaagaggccaagtgttagacagtggtgccatttgtttatggccacacagccagtgagtgatagagctgaattccaggccataggattgctgctgtcttccccgcttcccactttgctgtctttctggagccccagtgatggactgagacccaaggtgggcatttgtccctttgttaaggggaaggggaccaggcgtggtggctcatgcctgtaatcccagcactttgggaagctgaggtaggagaaccgcttgagtcctcgagttcaagaccagcctgggcaacatagcgagacccccatctctataaaaaatttaaaaaattagccggttatagtggtgcccacctgtagtcccagctactctggaggaggaggctaaggtgggtgggttgcttgagcccaggagttggaggctgcagtgagctatgattatgccactgcactccagccttggtgacaagatgagatcttgtgtcaaaaaaaaaaataatgttagccaggcgtggtggctcacacctgtaatcccaggactttgggaggctgaggcaggtggatcctttgaggtcaggagttctagaccagcctgaccaacgtggtgaaaccccatctctactaaaaatacaaaattagctggacgtggtggcacacgcccgtaatcccagcaactcgggaggctgaggcaggagaattacttaaacctgggaggtggaggttgcagtgagccgagatcgcataattgcactccagcctgggaaatgagcaaaattccatctcaaaataataataataataataataataatatttaatgacaggctgggccaggtggctcatgcccgtaatcctagcattttaagagacagaggcaggtagatcatgtgaactcaggaattcacaaccagcctgggcaatatgacaagaccccatctctacaaaaaatacaaaaattaggtgtggtggtgcgcacctgtagtcccagctacttgggaggctgaggtgagaggatggcttgagcctgggaggcagaggttgcattgagctgtgataatgtcactgcactccagcctgggtaatagagcgagaccctatctcaaaaaaataaaaaggctgggtgtggtgtttacacctgtaatcccagcactttgggaggctgaggtgggtggatcacctgaggtcaggagtttgagaccagcctgcctgtccaatatggtgaaaccccgtctctactaaaaatacaaaaattagccaggtatggtggtgggtggctgtagtcccagctacttgggaggctgaggcaggagaatcgcttgaacctgggaggcggaggttgcagtgagccgagatcgcaccattgcactacagcctgggtgacagagcaagactccatttcaaaaaataagtaaataaaataaaaatgtttaatgacttgttcttggaggtcaaggagatgtctcagaggcagtctccctgcactgcccttttagcagctcttggccaggtaaaggtcctgtggcaagaaggtgcttcagaccataggaggtgccccaggtactcaggaggaagccttagaagagcggcaaggaggccgggcgtggtggctcatgcctgtaatcccagcactttgggaggccgaggggggtagatcacgaggtcaagcaattgagaccatcctggccaacatggtgaaacctcgtcactactaaaaacacaaaatttagctgggcatggtggcatgcgcctgtagtcccagctacttgggaggctgaggcaggagaatcgcttgaatccgggaggtggaggttgcagtgagctgagatcgcgccactgcactccagcctggctacagagtgggactccatctcaaagaaaaaaaaaagagtggcagggagcttgaatgttatggtgcaacttggactgtcaccattgcccaccctaccccagatcccaagacaaaagcgtggttgaaggagcacgtggagcctgtgttcggcttcccccagtttgtccggttcagctggcgcacggcccagaccatcctggagaaagaggcggaagatgttatatggtgggtgtcatggatgtcctgggggtgctatagggaaggaaggagggaggccagcgttcagccctgcctgagagggttgctccctgtgtaagtggtcactgtcatcacctctctcccacagggaggactcagcatccgagaatcaggagggactcaggaagatcacatcctacttcctcaatgaagggtcccaagcccgtccccgttcttcccaccgatatttcctggaacgcggcctggagtcagcaaccagcctctagcagctgcctctacgcgctctacctgcttccccaacccagacattaaaattgtttaaggagaaccacacgtaggggatgtacttttgggacagaagcaaggtgggagtgtgctctgcagccgggtcca

SEQ ID NO: 90950 - DNA, 1060 bp, Homo sapiens
gtgctgcttcacctcaaaagcgccgcctgggacggaagggattccagccacagctgatggccaacccagcagcccagccccgccccccatgtcttccgccccggggccacagcacaggctgggcctggggttttggaggcctgctctctatcagtgggccctcagctcctctgcatggcggacttacctgccccaagcctgaccagagggttggtctgcaggaggctggatatgaggagttgggcctccgtaggtagggcctcatccccctcgggccacaggatgtcatctgcaaaacaaaacggaacttaggggcggtttttgttgttgttgttgtttggacacaggatctcactgtgtcacccagctggagtgcagtggcacgatcatggctcactgcagccttgacctcctgagtgcaagcgatcctctggggggtcgcttttgaaatccctggaaccctgagcctgtccatctctccgtgcacaccacactctgcccctgtacactgccaagccacgtaccactgatgacctgtccaaatagctcctctggtgtgtctccgaagaagggcacacagcccaccaggaactcgtagaggatgatccccatagcccaccagtccactggcttgccgtagccttgacgcaggatgacctcgggcgcgatgtactctggggtcccacacacctgggggcaggctgtcagcccacgccccagccagaggagggccctcaagggagagctgtgccccccaccaggccctgggttcccgaggtcctgcagggtcactccaccctcagcgacccccatgcccgcacacacacctgtttgtccaggaactctcgggcgtccttctcgatgtggccttcatataagttggtggtgaggctcatgagccccatcttggagaggccgaaatctgtgagcttgatgtgacccatggaggtgataaggaggctgtaggcacaggtggggatctcagggatgaggcccgtccattctgcctcctggcctcccgagggacagagggagtgatgggaaagatcaaagctcactt

SEQ ID NO: 90951 - DNA, 1984 bp, Homo sapiens
cagtgagtctccgcctaaaataaaaaagtaaaagaaaaaagaaacaggtttagagagggaagaggcatagagggtcacagaggtgtctcacccaggctaactggtttgagctggaggggccttttccccaccaccctccactctgtgatggagactccacccatgagtactcacccagacaatgtggtggacactatagacatccgtgtcacccatgtagacacggatggcacgcagtgtgaagccatacttcttgcccgagcgctggatggtgatgggggagcggagcccactgacagctggtgagtagtcccggctgggtgaggagtcccgtgaggatgggttggaggacagagatcgtggagacatgggactagcaaggggtgaacttccatgtgggtccactacagacacacaaccatggtcagaaatcagaaccaagaagatagacatctccctgtatctgctcctccctcctcccaaggcagtggcagagcagcctctcattggtccagcctggagccaatcacggtggacagggaaaatgcagcattttcattggtctgtcctgcctcaaatggggggcagcccctcccctgccaggtggggcccagcattacctgcaggaatcatgacagataaggcagtggctgaggctgatttgatgactttgcccccagttcgagaaggcctcttctctactgccacatcccctgacatctgctggtgccgcgcccggcgcagaaccaagtcattggtagcccttgggcctgatgcatccccatccttcgagggtgggcagaggtcacctgggcgtggacggtcagctgcaacagaaagcaagtgtgttaggaattagtccaaggccagggatttcccacatactgtttccctgcctggaatgctctttccactttttacccttgatggatggtgagtttcatctgagcaggtaacctgcatgcctcactgctcctcatatagagacatagtctgtatcggtctgtatcactgactgaccatggtattggggtgtttctaatgttaagaatcccaaattgggctgggtgtggtggctcacgactgtaaccccagcactttggtaggccaaggaaggcagatcacttgaggtcaggagttcgagaccagccttgccaacatgaagaaaccctgtctctactaaaaatacaaaaattagccgggggtagtggcgcgcgcctgtaatcccagctactcgggaggctgaggtgcgagaaccacttgaacttgggaggtggaggttgcagtgagccgagatcacgccactgcactccatcctgggtgatggagtgagactctgtctcaaaaaaaaaaaaaaaaaaaaaaatcccaaattgcaatgtgaataggacctgagatctttcataaacagcaccaggctcgtgggatgctcactatatgaccagtaggacattggggaagattggggaaggcagcacgatagggcactcactggcctcggagtccccggcgctggaggtgccttccccttgagtctcctctttgggggcccgtgcatccagggatcccgcggggtcggagctgggccggggaggcctgcgcagccgggcctcatcctcgtcctcttggggggcgctgaagcggctgggctccagcagcgccgagaaacggcggcgggcgcccaaagggggactggcctctccctccaggaaactggcctcggacgcggagaatcgcttgctgcatggagggggcgtggttatggaagacacgcccccttcgaccccgcccccaaactccgccattcccctgctcacatctccggagagccccctctccaggtcttctcacgcagggtcaggccgcccagcccctcccgcttgccggccaccttctcctcggggcccttggtgctcggctcccgcttgctgctccctgcagctgctactggggtcttgggctcgtgctgcgacagctgctccat

SEQ ID NO: 90952 - DNA, 1130 bp, Homo sapiens
gcctccgagtagctgagaccacaggtgtgtgccaccaaacccaactagttttttaagttttttgtagagatggggtctctctatgttgcccctaatcttgactcctgggctcaagtgatccttctgcctcagcctcccaaagtgctgtgattacaggtgtgactcatcccagcccctctttttttgtttgtttgtttgtttgtttgtttgagatggagtctcactctgttgcccaggttggagtgcagtggcacaatcttggctcactgcaacatccacctcccgggttcaagggattcttctgcctcagcttcctaagtagctgggactgcaggcgagcgccaccatgccaggctaatttttgtatttttagtagagatggggtttcaccatattggccaggctggtctcaaactcctgacctcgtgatctgcccgcctcggcctcccaaagtgctggggttacaggcgtgagccaccgcgcccagcccgcagcccctcttaattgtcctcttccctttgcttgttggtcatttgttcccgccacctttcccgtgctcttcccttctccatcctcatctgtgcccctcccgcctaagttccacccactgctcaaagaccaggctgtttacggctgtgcccacctctcctggccctccttggcggagggtcgcttgttcctccgagccattttagccttgtagctgctgcgccttgcgggaccaatgcggatagaggtattttcgaagggcgttgtggtcactgctaccttgttgccactctgggggaagaatgcgggaaaatgctctgctaggggctgctcaggcctcccccaccctccgcccagggtgcctccttccctgcactcaccttaaggatcagctccacgacctcaggatgcaccatgccatgcacaggctccccattcacgtgggtgatgaggtccccagcacagagtcctgcctcctgggctgggcctccttcctccacatgctgggaaaagagcaccccatagggacagggttagtgggattggtaacaaggaaagctcctaaacttatatgcaggacacttagctctgcatgcattagaatcctcataacaccttgtgaaatagttattattcctccc

SEQ ID NO: 90953 - DNA, 1755 bp, Homo sapiens
gcgtggtgcgctcctccaccacctccaacacccagcgctcccggccccggggggcctcgggcacggaaggcgccaggggtgcgggttcctgcaaccccttggagtccgcgcccagaggctgaggcaccacagccttagccccgggccgcgcaggctctacgacaatgggtaccaggggtgtgcccgcctcgccagagctgctgcgccggcctgtctcgtgttcctgcaccgggctcagcgccgccttggccacagccctggccatcccgccagtgccatcctccgtctgcacgctctgatgccgcgtgcagccgacgtcccgctccagggtccggccaccgggggtcgtcgcgcggggtggggtgcacgcctcggcgccccccggggattccttctccttgctcgacactggtggcctggaggcaccctcgggcagcaacgggtccgcgcccaggctcaaaggtgactcctgtcggcccaggcggcggacggcgacctgccggggcgcgccaaggccctcgactgggggcgtctcaccgtcggactcggcaaggctatgcagcgccagctcgccatggaagtccttgcggaaatccgggtggcccacctcgaggctgtgtttgcgcagcgcgcccttcttgtccgcactcaaagaggctcccagcttctcggccgactgcacgcgcttgaggagcggcgagcgagggggctcggcactcttggggcgcgggcgcacgacgggaggcgatgagtgcagtttggccgggaagctctgagtagtgtgcgagctgcccaccgtgtggcccggcagtggcggcggtgacgcctgcgtgggggacggcgtgtgtgccagcggcgatagagggatgttgccggccgacttgcatcgcgcagagcggtactggcgatggagctttggcgacagtccgtgcagcgtgctgggccgaatgtggtgcgacgccgacgacgcaggcgagttgggcgtgctcgaggctggggagctgctctgggatgaggcgcctgcgggagacaggaggtgaagcgagtgagtacagcccaagcaccagccaggccaccccgcgctgctcggtccccgcgcaggtgcaggaggtaatacctaggtaggcggagtcaggcgtggagcggtagctgtgcgtgggcgagcgcgccggcagcccgtgcgtaggcgagcccgggagactatcgctggatgacagcgagcggttcagcgacgacagcgagcggctagtatgcagcaggttcgactgcttcgtgatcttccggaagagggagctgcgcttcttgctgcgggacagggagggggccaagcgtccttgacctggacgccagagctcagggctcctcccatttcacggcctcacaacggtaaccacccaccccttctggcccttccctctccagctacaacccacctatcaagataaagaacttcctttagctcagtgctgcttggctcctcccacttcagtccccacccaccccctttggccactcctagtccaagctagaaacaagcatccaaacaaaaccaacctgttctgccccgcccacctctctagctcctccctcttccactacaatccacctatcaagatagaacttcctttagctcctcctacttcaggccccgcccaactttaggccactcccaattctggctacaaacactcatccaaacaaaaccatttttttttttttttttgagacgaagtttcgctcttgtcgcccaggctg

SEQ ID NO: 90954 - DNA, 1492 bp, Homo sapiens
ctcaaaaaaaaaaaaaaaaaaaaaaaaaaaaaaagaggaagaacaaaggtcccaagagttggacccaggttgtagggctggaataaaaaataaaatacaaacttgtgcctgatccagaaacccgggcgggagttgggtcagacagaagagcgtgggctgggattagctaccacgaaaaggaacggtggccaggctccaggagacgctggagcgccgggcccgtcgtgggcgtggtctgggcagactcagcgttgccttttgcctctccaaaacgcagcatcgcgtctcgggggaggagtctgtaccctcgtgatgtccccgccccggttcccaggcaagtttagggaagtgaaaggcgccaggtgccagtcctggcctctgatgtaacccagcgccccgcagtcccgacacagattcctggatctcagccccatagcagctatgatcccgctgctgctggcagcgctgctgtgcgtccccgccggggccctgacctgctacggggactccgggcagcctgtagactggtgagtgcgcagcggggggcctaccatcgccccggggtccggctgcggtcactcaaccgggatggctacctcctcggggaaccctggggtgccttctcttccctctctcctatttctgtgcattctccgacctccaggttcgtggtctacaagctgccagctcttagagggtccggggaggcggcgcagagagggctgcagtacaagtatctggacgagagctccggaggctggcgggacggcagggcactcatcaacagcccggagggggccgtgggccgaagcctgcagccgctgtaccggagcaacaccagccaggtgaagggggccccgggccaactaggggcgaaactctagggctgccctgcctgggaggaatttcacgttgcctccgtttatccgcccgcagctcgccttcctgctctacaatgaccaaccgcctcaacccagcaaggctcaggactcttccatgcgtgggcacacgaagggtgaggcctggattgggggctggggagagactcgggtcccatttttccaaggtaacccctgacgtgcatggggtggtcggggagatctgcactgtcagaccctgggcatctattccccccaacttttttttttctttgtttttgagacggtgggagttcgctctgtcacccaagctggagtgcagtggcacaatcttggctcactgcaatctctgcctctggggttgaagcaattctcctgtctcagcctcccaagtagctggtattaaaggcgcaccatcacaccaggctaattttcatatttttagtacagacgaggtttcaccatgttggccaggctggtctcgaactcctggtttctacctcaagtgatctacccgccttggcctcccaaagtgctgggattacaggaatgagccaccctgcccagccgagttcctatgcatttttccaagctaacccctgacctccatagtg

SEQ ID NO: 90955 - DNA, 1098 bp, Homo sapiens
aagactaaccctgtgtccaaagccaagtcaaatatcaagggttggggggttcagggtttgagggtccaggtgctgggtaaaaacagacattgggtctccaaagaaggagagacttgggggtcttccctcagttaactttcctggaaaaggcagaaagggtattctgggaagaagctgtgggaccccctgtccccctgattgaggctccacagccctccccctccccagtaaacagcaacaaccgtgctgatggcgggacttggcacgagctccccgccaagcattatcagacaccccagacgttggaggctgctatcaggtgggggcccaggccagctagagctctgtcctccggtgaaggggagggctgggagttgggtcttcaaattagcctggcgttcaatttgcctgggttgggacctcccagggtctcagccctgcagcaggaggaagcccctgacaactggcccaccattgtctactggggacccttgggtggcactgcatgggactgcatggaggctggttcagtgccagctgctttagtgcgatgggggcagccaagggaaaagtgaccctctctcctcctgggtgggataggaccgttggatcaagccacaggcagtacctgacctgcaggagaccagtgccctggctctgggcctggctgctccttgattctgcccaacatgaggagaggatctgagtttctacaacaggaacctccactctggtgccctgggagcctgggaaggggacatggatacgtattacagacacataactcatagtcactcattggaagactgaggcaggaggatcacttgacaccaggatttcaagaccagcctgggcaacataaaacctatctctccaacaaaaagctgtgagtggtggtgcatgcccatagtcccagctactcaggaggctgaggtgggaggattgcctgagcccaggaggtcgggactgcactgaactataatcacaccactgcagtccagcctggggcacagaaagcaagactctgtcgctggaaaaaaaaaaaagttgggtggccatctttattcctggcagatcaacctgggtgacacaaacaaa

SEQ ID NO: 90956 - DNA, 1036 bp, Homo sapiens
cagggtcagaggcactaaggcagtgagtgcgctgtgcctgcggggccggagaaaagtcacctgatcagtctcgcttgcagctcgcactagccggggggcgacatgggtgttggggggtagggctgatgagggtccgagaagggagggcacagtgatcttgcggactggaccgaggcgaattccccttcccagcctcgcgtcccgagtttgactggcaggacccgctggtgctggaggagcagctgaccacagatgagatcctcatcagggacaccttccgcacctactgccaggagagactcatgcctcgcatcctgttggccaatcgcaacgaaggtgggcgggctggtgggtgccctgagactgctcctccgcctggagccatagccaccccacctcaaggcccctctgtccttggggctggggcttcctgtggcctaggcctgggcctgaatttgggcactggtccctttgcagtttttcatcgggagatcatttcggagatgggggagttgggtgtgctgggccccaccatcaaaggtaggaacaagtatctctccacacactgcagaaccctctgtattctgaaagcctcttcctccttccctccctccctttcttccttccttctctttcttttcttttccttttctttcctttcttcttcccccccaacagagtctggctctgttgcccaggctggagtgcagtggcacgatcttggctcactgcaaattctgcctcccaggctcaagcgattctcctgcctccacccctctagtagctgggattacaggtatgtgccaccatgcctggctaatttttgtatttttagtagagacagggtttcactgtgttggccaggctggtctcaaactcctgacctcaggtgatccgcccacctcagcctcctaaagtgctgggattacaggcatgagccaccacgttcagccttctttttgagatggagtttcgctcttgttgtccaggctggagtgcagtgatgcaatcttggctcactgcagcctccacctcc

SEQ ID NO: 90957 - DNA, 1539 bp, Homo sapiens
gggcctggtggaaggaagacagtctctgaggtctggaactcaagggtggggctgtcccctgagcctattctgtccctatctcaaagatagcataagtggccacctggacccccgccagaccctgggcttcacctggagatctgatccctggccagcctgactgtccccctctgtgaccaccgtcatctccctatgctttctgtgttccccagtccagcccaaagtttaaagtccaccaggttcctgctggccatttgcagtggctcacacctataatcccagcactttgggagggtgaagtgagaagatcccttgagcccaagagttcgaaaccagcctgggcaacgtaaggagaccccatgtctattagaaaaacaaaaaaaggaaagagcctatgtgacctgcgctaagtggacgttggccctcttccgtggtgtctcggaggtgttcagctgcttcaagatgaagctgaacatctccttcccagccactggctgccagaaactcattgaagtggacgatgaacgcaaactttgtactttttatgagaagcgtatggccacagaagttgctgttgacgctctgggtgaagaatggaagggttacgtggtcggaatcagtggtgggaacaataaacaaggtttccccttgaaacagggtgtcttgacccatggccgtgtccacttgctactgagtaaggggcattcctattacagaccaaggagaactggagaaagaaagagaagatcagttcatggttgcatcgtggatgccaatctgagtgttctcaacttggttattgtaaaaaaaaggagagaagggtattcctggactgactgagactatgatgcctcgtcacctggggcccagtacagctagcagaatccgtaaacttttcagtctctctaaagaaaatgatgtctgccagtatgttgtaaaaaagcccttaaacaaagaaggtaagaaacctaggaccaaagcacccaagattcagcgccttgtcactccacatgtcctgcagcacaaacagcggcgtattgctctgaagcagccgcatattaagaaaaataaagaagaggctgcagaatatgctaaacttttggccaagagaatgaaggaggctaagaagcaccagggacaaatcgtgaagagacgcagactgtcctctctgcgagcttccacttctaagtctgaatccagtcagaaataagattttttgagtaacaaataagatcagattcgcaaaaaaaaaaaaaaacccacaaggccctgtgtgaccaggcctctgctgacctttccacctcatctctggccactcatgtgatcctcccagccagacttagctacttgaaattctccagaagtaccaccagttctttacacatctgttccctctcccagcactgctcttccccacagcctcctcctgcttaactcctcacacccttccagtttggccaactccttcctgattccctgggtccccctccccatcttggcattgtgatcatgactttggggtaacctgtctcttgaaag

SEQ ID NO: 90958 - DNA, 1012 bp, Homo sapiens
caaactggaagggtgtgaggagttaagcaggaggaggctgtggggaagagcagtgctgggagagggaacagatgtgtaaagaactggtggtacttctggagaatttcaagtagctaagtctggctgggaggatcacatgagtggccagagatgaggtggaaaggtcagcagaggcctggtcacacagggccttgtgggtttttttttttttttgcgaatctgatcttatttgttactcaaaaaatcttatttctgactggattcagacttagaagtggaagctcgcagagaggacagtctgcgtctcttcacgatttgtccctggtgcttcttagcctccttcattctcttggccaaaagtttagcatattctgcagcctcttctttatttttcttaatatgcggctgcttcagagcaatacgccgctgtttgtgctgcaggacatgtggagtgacaaggcgctgaatcttgggtgctttggtcctaggtttcttaccttctttgtttaagggcttttttacaacatactggcagacatcattttctttagagagactgaaaagtttacggattctgctagctgtactgggccccaggtgacgaggcatcatagtctcagtcagtccaggaatacccttctctccttttttttacaataaccaagttgagaacactcagattggcatccacgatgcaaccatgaactgatcttctctttctttctccagttctccttggtctgtaataggaatgccccttactcagtagcaagtggacacggccatgggtcaagacaccctgtttcaaggggaaaccttgtttattgttcccaccactgattccgaccacgtaacccttccattcttcacccagagcgtcaacagcaacttctgtggccatacgcttctcataaaaagtacaaagtttgcgttcatcgtccacttcaatgagtttctggcagccagtggctgggaaggagatgttcagcttcatcttgaagcagctgaacac

SEQ ID NO: 90959 - DNA, 1023 bp, Homo sapiens
actggccaggaaccagctgattcagaagaagctggcagacatgctcactgagattaccctgggccttcacgcctgcctgcagctcggccgcttgaaggaccaggacaagtaggggctgtgtggtgggggcggggggatggcagcggtggctggaggaccttgtgtccttcctggagagaaaggtccttcctgcctggtggccctggggacctgaaccttctgctgtccctcttgtccttgatgggctgggctgaggacagccccactggtccctcattgggagcttggctgcatcagggaatccccaccccgggctaggtttgcttggagcatcgggatgccaggatccccagtccttgttaccctcatgtgccactcccagggctgcccccgagatggtttctctgctgaagaggaataactgtgggaaagccctggacatcgcccgccaggcccgagacatgctgggggggaatgggatttctgacgagtatcacgtgatccggcacgccatgaacctggaggccgtgaacacctacgaaggtaggagctggacctcagagggctcactgaggcctcagtgtctggggagggggtacagggaggtgggacggggacaggtctgagtccaactccacctatcactaagtgacagtgtgacctggggcgagccttacccctctgtccctcatctggagttactcacatggggactgtggaagtgaagtgcttcatgcagcacacagaggccccatcaggccttgcgaggggctcccagctctttctcccacatgctcgggaggagggatgttcctgagacaggtaagctccgaaggcagcccaggggtgaggcccgactcctagcaggctggtggacgcaagggagtgagcgaagctacacgcaggaatcaacgctccattttgttaagagacaaaagtcatcttcagatgacggtgtttgcaccctgtaactgatggtgatttacatgggggtccagaaccccttgcttggtgggaagacag

SEQ ID NO: 90960 - DNA, 1008 bp, Homo sapiens
agtggtctcgatctcctgacctcgtgatccgcccgcctcggcctcccaaagtgttaggattacaggcgtgagccaccacacccgtcctagcttttatatttttaatagagatgggttttcaccatgttggccaggttggtcttgaactcctggcctcaagtaatccacccaccttggcctaccaaagtgctggggttacaggcatgagccaccgtgcccagcctattttgtcattttcataagataaattgcagaaatctaagaaacccacttaacacagatgtcttgtgatacctcttgtttgattttccgagaacacatcttattgtttaacaggtttcggatctgacagagaaattagaggagaggatctatcagatttataatgaccacaacaagatcatccaggaaaagctccaagagttcacccagaaaatggcaaagatcagccatttggagacagagctcaaacaagtctgccacagcgtggagactgtgtacaaagacctgtgtctccagcctgaggtatgagtaaactcacagggggggcgctgcctgaggaagaggacagggatggcccagccaagagtaaatgtgaacagaaaccaggcacccagccctgaccccgccaggccacagtccctgcaaagcccttggtgcactcaccatcttgtttgtgatcccctataacatggtgtgtctgagctgagaagccaaaccgttgtcatgtcccactgttgtatgagcagctctgtggtgacagaaaggacaaagtcccttgcacccctgccactcagaaatcatcccctctgcccacagccctggcacagaccggcactgctaacctgggtttcttttttacagcagagcctaagactcagatgggggccagaccactctaggggaaagtccccaccacgtcccggcaactcacagcccccagacgtgttcgtttcttctgtggctgaaactacttctcaggtggttaccagtaaaccggcctgacac

SEQ ID NO: 90961 - DNA, 1046 bp, Homo sapiens
ttttgtttgttaaagttaattggtgaatgcaggcccagggaagcctatgattcattagcatcctgattaatatgcagctgctgtgtattaagaaaaatgaaatcaaaagggataaatccccaaaggagaggttggaaaaataaagaagctctcagcagacatctgatgcaggcctttgtcctaccatgaaactcgaattagctgaattcaagtgatttttttttttttttactgtttgcttagctgccatgaaaaccggttccagcctcatcccttgagccttaaaaaggagcagctctgaaccattagcagctcaagcaggttgtgaacaatcacacaaaaagaaacacctggtgctctcatcgattttaattttagggtctgaaactgttgagagcatccaggagaggctgagacaacaaggtgaactgggtacgaggaggtgtgggagccccaatgtcagtgctgcattcatttagatattcagcaaactgatgaaacctttggggtgctgcaaaacaaatgagtagggtgtagtctgcaccctcaaggtgtcgtgcgctggaggggactgatgttcataaactttggcagctttgtgaccagcaaggcctaggtatagcggggggtagagaagcaaaagttccaaatgttccattatgaaggaggcaggaagggaaagtcattccaggcaaaggctgacatgtttggggaaattgtggtaggtccccaattgctgcagatggaggggctgtagaaaacagtaaggctagatcgggcttggtggctcacgcctgtaatcccagcactttgggaggccaaggcgggcagatcacgaggtcaggagttcgagaccagcctggctaacatggtgaaaccctgtctctactaaaaatacaaaagttagctgggtgcagtggtgggcacctgtaatcctagctacttgggaagctgaggcaggagaattgcttgaacccgggaggcagaggttgcagtgagccgagatcgtgccactgcactccagcctaggtgacagagcaagactc

SEQ ID NO: 90962 - DNA, 1041 bp, Homo sapiens
aactcctgacctcgtgatctgcccgccttggcctcccaaagtgctgggattacaggcgtgagccaccaagcccgatctagccttactgttttctacagcccctccatctgcagcaattggggacctaccacaatttccccaaacatgtcagcctttgcctggaatgactttcccttcctgcctccttcataatggaacatttggaacttttgcttctctaccccccgctatacctaggccttgctggtcacaaagctgccaaagtttatgaacatcagtcccctccagcgcacgacaccttgagggtgcagactacaccctactcatttgttttgcagcaccccaaaggtttcatcagtttgctgaatatctaaatgaatgcagcactgacattggggctcccacacctcctcgtacccagttcaccttgttgtctcagcctctcctggatgctctcaacagtttcagaccctaaaattaaaatcgatgagagcaccaggtgtttctttttgtgtgattgttcacaacctgcttgagctgctaatggttcagagctgctcctttttaaggctcaagggatgaggctggaaccggttttcatggcagctaagcaaacagtaaaaaaaaaaaaaaatcacttgaattcagctaattcgagtttcatggtaggacaaaggcctgcatcagatgtctgctgagagcttctttatttttccaacctctcctttggggatttatcccttttgatttcatttttcttaatacacagcagctgcatattaatcaggatgctaatgaatcataggcttccctgggcctgcattcaccaattaactttaacaaacaaaatgcgtggtgtcctctctgctggctttcccggttcctaggctggcttctgttgccgaaccctggaccgaggccagagaatgcaagtcagcccaacacagcacgtcgggtgtgcatggcctgcgcccggattgggcagcgggctgggggctgtgaacacagcgctgcgttcatctattatggtctgtccttcta

SEQ ID NO: 90963 - DNA, 1055 bp, Homo sapiens
ggaggcttttatggggggtgtggggggggtggcctttagcagggcagatggaggaagtgccttgtgccataagacacaggaaggggatgagggaggatgtttcccggccatgatgtactggggccagctcctaccggcttgaaagagccaattctacacatctcttcccaacttggcatttagcgtcttcatgttggtagcctgaaattggctaatggtgggaggctctgcaccacggaaattggcaaacactacgaatcagggcttcccccccatcacacagccagttgctaaatgcttacaagcacatcactgctgtctgctttccagcttgtggtggtttccggtaggtggtggcttctctggcagagacaagaacatgagttctgtgttgtccttgtttatctgagccactttcggtggccagggacatccacatgtccaggatacagttcaactttctgacccggaactcggggtggggtgagggtctggagatggttctgtgggagtcattgtttcagcagcagctgtggaatgaatgagctcacctggagaaggagtgagaggagggtcaggacagggccctgaggactctaggcagaaagcaagccagcttccctctcctcgcacattcctctgctggaaagcaggccacgcgtgaaatggtttataggtgtgtgctgtcaattggagaccaaaaaaaaagggaagcaatggttgaagtcgtttgtttgctaataccttactgcggaatagcatgtttagaccaggatctgtgtagtgaagagacacagaccgctgcaaatcatttagagacttcaaggagctccacaggaaccctgggccaaaaaacagatagattaaaaccagtgcaggggccagttaatagatccagcagcagatactcagcaacatgattaaaatgttaacacgtttccagagagaaaaggagaggttgaggaactggctcatcagcttccattcaaaccttcccccttcctggctgtacttcagcaaaacattgttttgcccaagcgccagagattctgttg

SEQ ID NO: 90964 - DNA, 1029 bp, Homo sapiens
cagcctgggcgacagaccaagatcttgtctcaaaaaaaaaaaaaaattgttatggagtatattttccaaggcagagtggatgaagttagaagcaccgaataaatacaggactctgagatccgtataacctgggcgccccgtggaacccaggagcctcacaggggcacacaagcgcacccagagcgcgccgtcctgctcccaaggggcgccgactgcgcgcgcagcccgcggaccgcgaaactgctgcttaacggtcggccccgcccagttggccgcgcaagttctcaaagagggcggggccgggagcacgcgtcacaacacactcgtccgcgggagcgcagctggccaggggcggggtcggcgcatgcgcagagggtgcgagcttgaaggcgggaaaatacggaatggagcgacagggagtacgcggcgcttgtttccttctcgcgcgtggggcgggcggacagataggcagggaacggctgcgatcccagccatctccagcggacccgagcccggccgcttgtcctttgccattggggctccctctcatcaggcctggcctcaaatttcctgactgactgaacccggccctgactgacgcactgacgggtctgatttccacacatggcgcgtggccggaacggagtagagaaaggcacaaacacccacgcaccgcacccgtttctttcatttctttttttttttttttttgagacgaagtatcactctgtcgcccagtctggagtgcagtggcgtgatctcggctcactgcaacctctgcctcccgggttcaagtgattctccttcctcagcctcccgagtagctgggattacaggcacgcaccaccacgtcagctaatttttgtatttttagtagagacggggtttcaccatattgctcaggctgttctcgcactcctgacctcgtgatccgcccgcctccgcctcccaaagtgctgggattacaggcgtgagccaccgcgcccggcctcatctcttttctcctacctcttctcctttctcgaagga

SEQ ID NO: 90965 - DNA, 1041 bp, Homo sapiens
gaggttgcagtaagcccagattgcaccaccgcactccagcctggacaacagtgagaccctgtctgaaaaaaaaaaaggggtgggaaatgctcgttgactgacctgatgttgctctgtcctgcccagatccagcggaggccctgcagctcccaatggactatgtccagcgggtcaagcggacccactctcagggcggctacggctcacaggggtgaggcaggacttacctggtatggaagggaaggaggctggggacccctgggccattgcatggacttcccaccttccctcctgaaggtacaagtataactggaagctggacgaggcccggaaaaacctactgcgaacccacaccacatcagccagcgcccgtgcgctctaccgccttgcccagaaggtgcggttggcccaggcgggggccccagtggggagagggtgctgtcaaagggaccttctgacccatacctgggcctggctcggttgtcacccctagaagcccttcactccggtcaagtacttctccatcgaccgcgtattccggaatgagaccctggacgccacgcacctggctgagttccaccagatcgagggcgtggtggcggatcatggtctcaccttgggccacctcatgggcgttctgcgggagttcttcaccaagctgggtgagcaggggggcaggggtgggccatggtggtgaggcagcgggcaggtgtgttgatcaccagcattatcctccaaacccctgctctcctgcccgccccccacttcctgcaggtatcacgcaactccgcttcaagccagcctacaacccatacacagagcccagcatggaggtgttcagctaccaccaaggtcagggtaggccctggtactggggtgggagggaggtctcaggctactatggtttggcctgggtccccccattgccatgcctgtaccccacctcccaagctcaccacctagacccagaacctgtaccagcagtgcccagaaactcaacacgcactgcccgtcttttctgtcctgcctctgcaggcctga

SEQ ID NO: 90966 - DNA, 7407 bp, Homo sapiens
gagctggctaagaaagccttgcccagcccctccacctagagggaatgggagggagagaagctgagggcagggtcccggtcccgcgtggagacagctgcgctcccgcggtttctttaaacgcccagatgggcaacgacgcgcgcggacgagggcggggttgggttcaggtctggtcacatgacctggcctgaggtgctcgcggcccccaccccaccagtgggcgtcccccccacgcgtggtcgaccatcattggtcggtggtgaggccaatagaaatcggccatctgggaacccagcgttccgaggcgcagcctaacatagtgaaccgacgaaggtccaatggaaaaagacggccatgggcatagaccaatgacaaagtggcaggggcgggcccaagggctgggtcaggttggtttgagaggcgggtgggtataaaagtgcaaggcgggcggcggcgtccgtccgtactgcagagccgctgccggagggtcgttttaaagggcccgcgcgttgccgccccctcggcccgccatgctgctatccgtgccgctgctgctcggcctcctcggcctggccgtcgccgagcctgccgtctacttcaaggagcagtttctggacggaggtaacgcctggtcccgcctcgaggccgccccgacgacgcggccggcccccgatcctggatctgcgttgtcgcccgtaattaccgtttagaggtccaacacggtggcctcccgggactagagccgcgggcgatttctcttctgcgtccctggggagcgcggagggcgtagcggcctcccgcggcgggagttagggttagcccgaggatctctgaaggcacccgacgtgtcaaactagaggttggaatggggagtgtcggggatctcctttcctgtccccagcagcttgtggctctcggcagatgtttggtgtggggggggattagcacagccgctctgacctacccctctaatcccccacttagacgggtggacttcccgctggatcgaatccaaacacaagtcagattttggcaaattcgttctcagttccggcaagttctacggtgacgaggagaaagataaaggtaagagcctaggagtgggtgctcagatccgggaggacttcctggcagaagtccttgtctgtacacacacagccgggacagtccccttggaggaggacaggtggaggaagtgggggagtcttctctattctctaagtcgagggtcctcgcgagtcaaggcccaacggtgacctcactaccgtcccgtctcaggtttgcagacaagccaggatgcacgcttttatgctctgtcggccagtttcgagcctttcagcaacaaaggccagacgctggtggtgcagttcacggtgaaacatgagcagaacatcgactgtgggggcggctatgtgaagctgtttcctaatagtttggaccagacagacatgcacggagactcagaatacaacatcatgtttggtgagggcctgcttcctggtgctgatctctgtcccattagttagagggagacccagaccccattgactttcttaataatgattttttttggaaggggagctaaaagaataagtcccagcaacaatttattgcattatgatcgcagatctaggctgttaatttaatttgcgtgtttgtatatagttatttcccaatcttactaatgaggattttgagttctagagcactgattttttttttttctcctttaaacttaaggctccacccacagcccattcaggacagaatcagggtctgagtttctcttctcagccttgacagacccgagttgaagaaccaggtcttccttttataaagaggggtgagagcctcgagatgatgggtagtctctgactcttaactggatctgcttcacacctaggtcccgacatctgtggccctggcaccaagaaggttcatgtcatcttcaactacaagggcaagaacgtgctgatcaacaaggacatccgttgcaaggtgtgcctgggggtggtggcaaatggctgtcatggggagattcagaggtcagcctcattggggggtggcccccgctcaccttcttccttcttcaggatgatgagtttacacacctgtacacactgattgtgcggccagacaacacctatgaggtgaagattgacaacagccaggtggagtccggctccttggaagacgattgggacttcctgccacccaagaagataaaggatcctgatgcttcaaaaccggaagactgggatgagcgggccaagatcgatgatcccacagactccaagcctgaggttggtgtttgggcaggggctctgctctccacattggagggtgtggaagacatctgggccaactctgatctcttcatctaccccccaggactgggacaagcccgagcatatccctgaccctgatgctaagaagcccgaggactgggatgaagagatggacggagagtgggaacccccagtgattcagaaccctgagtacaaggtgagtttggggctctgagcagggctggggctcacagtggggagtgcaccaaccttactcacccttcggtttccttctcccttctgcagggtgagtggaagccccggcagatcgacaacccagattacaagggcacttggatccacccagaaattgacaaccccgagtattctcccgatcccagtatctatgcctatgataactttggcgtgctgggcctggacctctggcaggtgagacttggaggaaaaaggaggatccctggggtacctcaagtgcataagatcacccaagaggaaagggacagggtaggcaccccaggtgagtctgactcaaaaatggtacttcttgtaaacagtacttcctggtctgtccctgtgaagtcctcacagcaacccctttaaggttatacttgctgtgcaccaagtacttccccaagtacttttatgcaaatcaacttctttacccccaaagacctagaaggtggtcaggtaacccagttagttagctggggctgggcacagtggctcacccttacaatcacggtactttgggaggctgagacagaggattgcttgaggccaggagttacacaactcaacctagcttggcaacacagcgaggagaccctatctctacaaaaaaaatttttttttttgagacagagtttcactcttgttgctgaggctggagtgcaatggcacgatctcagctcactgcgccctccgtctcctggtttcaagcgattctcctgcctcagcctccggagtagctgggattacaggcatgtgctactatggatgccaggctaatttttttttttttttttttttttgagaccgtgccttgctctgtcgcccaggctggagtgcagtggtgtgatctctgctcactgcaagctccgcacgaccccccaggttcactccattcttctgcctcagggtcccgagtaactgggactacaggcaccccccaccatgcctggctaatttttttgtatttttttttttagtacagacatggtttcaccgtgttagccaggatggtctccatctcctgacctcatgaaccacccaccttggcctcccaaagtgctgggattacaggcgtgagccacctcacccagcctttttgtagagacagggcttcatgttgcccaggttggtctcgaactcctggcctcaggtcatctgcccgcctcggcctcccaaagtgctgggattacaagggttagccaccatgcctagcctctacaaaaactttaaaaattggcgagatgtcatgcatacctgtagtcccaactaccaaggaagaaggatgatcacttgagcctggggcatcgaggctgcagtgagccatgattatgtcactgcactccagcctcggtgacagagtgagaccctctcaaaaaaagttgggacttggccggacacagtggctcacacctgtaatcccagcactttgggaggccaaggcgggtggatcacaaggtcaggagatggagaccatcctggctaacatggtgaatgaaaccccatctctagtaaaaatacaaaaaatttgccaggtgtggtggtgggcgcctgtagtcccagctactcgggaggctgaggcaaaaggatgacgtgaacccgggaggcggagcttgcagtgagctgagatcatgccattgcactccagcctgggtgatagcgagactctgtcccaaaaaaaaaaaaaaatgctgggactgaatttttgtctgttttggtcactgaaataccttctgtgcccaagacagttctggcatgtagtaggtacctgaaaaatacctgaataagagagtgagaaacaagaaacaggtgcagagaactgaagtcagtggcccaaggtcatgggggtaggaaaccacaaagctggggtttgaacctgggcagtacagcacctgagtctctccatctttttttttttttttttttaagacagagtcttgctctgtcacccaggttggagtgcagtggcttgatctcggctcactgcagcctctgccttccaggttcaagtgattctcatgcctcatcctctcgagcagctggaattacaggcatgcgccacgacgctgggcttttttttttttgagatggaatttcactcttgttgcccaggctggagtgcaatgatgcaatctcggcggctcaccacaacctctgcatcccagattcaagcgattctcctgcctcggcctcctgagtagctgggattacagggatgcgccatcacagaccccgggctaattttttttagtagagacagagtttcactatgttgcccaggttggtctcgaactcctggcctcaagtgatccgttcgccatgacctcccaaagtgctgggattacaggcatgagcccgtcccgtccctggctgtctctccatctttccatcttttttttttttttttttttttttggagatggagtctcactctgtcacccaggctggagtgcagtggcacgatcttggctcactgcaagctccgcctcctgggttcacatcattctcctgtctcagcctcccaaatagctgggactacaggcacttgccaccacgcctggctgattttttgtatttttagtagagacggggtttcaccgtgttagccagggtggtctcgatctcctgacctcgtgatccgcccaccttggcctctgggcgaggattacaggcgtgatccacctcacctggcctctccatctttttaactgcagtgtcagcggtgttccttgtcttctctgcagatgcaggcagcagaatatagtggttataggaacacaggtggaaaccctgtccaaagcaagggctatcgggtatcacctctgaccatccttcccattcatcctccaggtcaagtctggcaccatctttgacaacttcctcatcaccaacgatgaggcatacgctgaggagtttggcaacgagacgtggggcgtaacaaaggtgaggcctggtcctggtcctgatgtcgggggcgggcagggctggcagggggcaaggccctgaggtgtgtgctctgcctgcaggcagcagagaaacaaatgaaggacaaacaggacgaggagcagaggcttaaggaggaggaagaagacaagaaacgcaaagaggaggaggaggcagaggacaaggaggatgatgaggacaaagatgaggatgaggaggatgaggaggacaaggaggaagatgaggaggaagatgtccccggccaggccaaggacgagctgtagagaggcctgcctccagggctggactgaggcctgagcgctcctgccgcagagctggccgcgccaaataatgtctctgtgagactcgagaactttcatttttttccaggctggttcggatttggggtggattttggttttgttcccctcctccactctcccccaccccctccccgcccttttttttttttttttttaaactggtattttatctttgattctccttcagccctcacccctggttctcatctttcttgatcaacatcttttcttgcctctgtccccttctctcatctcttagctcccctccaacctggggggcagtggtgtggagaagccacaggcctgagatttcatctgctctccttcctggagcccagaggagggcagcagaagggggtggtgtctccaaccccccagcactgaggaagaacggggctcttctcatttcacccctccctttctcccctgcccccaggactgggccacttctgggtggggcagtgggtcccagattggctcacactgagaatgtaagaactacaaacaaaatttctattaaattaaattttgtgtctccctcctgtgtctccttctggggaaagacagacttaaggaaacccagcagtggtctttttggggggggggggggtttccagtatatctcctttttcagctattgctagagaggttgctgagtgttccacaagattccagggacccttatttaccccataaccctcaaaaccaacgggggaatggctgttgctgctgtaaatactccacatactaacttactgaatccttgaacctaactggtaagttttggttctgcttatttatttatttttaagatagactctcgctctgttgtccaggctggcgtacagtggctcaatctggttcaccctgccccttaaactggcctttttcatgcttctattcctttggggtcctgtggctcagcccaacccctctgggatgcctccaggactggtagatccaagggagaattctgtatttaatgtagtgaggctttgaaagttaacatctttaaatacttctggggtcagattaggtatagtacaacaaagtactcctgcccggagacccaagaatgaaaattgtaggttcattccaaaactccagatccctaaagaatgaatgaggctacaaaatggcaccttgcccccgcttccaacttaaggttttttttctgtgcttggtggcctttcaggtatttctagttttgagtaactttcactttgactgctctacaagggttcctgccaggatacccagaccagaataaaactcatttgggggccgggtacggtggttcacgcctgtaatcccagcactttgggaggccgaggcgggtggatcacctgaggtcaggagttttgagaccagcctggccaacacggtgaaacccaatacaaaaaattatccgggcgtggtggggggtgcctgtaatcccagttactcgggaggctgaggcaggagaattgcatgaacccggaaggcggaagctgcagtgagccgagatcgcgccactgcactccagcctgggtgacagagactgtttgaaagaaaaaattctcatttggaagaggcaaaatgaggtttttacagaagaaatacaa

SEQ ID NO: 90967 - DNA, 1035 bp, Homo sapiens
cctctacatccttcccgcctgcccccacctcaggcatgtcccatcccccacctgccgccagagaggacaagagcccatcagaggaatccgcccccacgacgtccccagagtctgtgtcagggtaaggcgggggcagcagtcccagcttgggccctgtcctcctagcacattccagcgtccacataagtggtcccacacacctggagggagggcaagccgccagaagccagggtccgatttctctctcttgaatttgcagctctgttccctcttcaggtagcagcgggcgagaggaagacgcggcctccacgctaggtgggtgggtggtccccagggcagaggtgactgggtgccccagccatcagctgggccttgtctgggtgcgggagggcctgggagctgccctttcctcttcctggtgacctaggctttgctgcttcctccacagtgacgggctctgagtatgagacgatgctgacggagatcatgtccatgggctatgagcgagagcgggtcgtggccgccctgagagccagctacaacaacccccaccgagccgtggagtatctgctcacggtgaggtggggcttccgcctcccggggaggccttgagggagtacccgggcgtcactgccctgatgggcggttgggaaggcaaaacctgccctgaaaagcctttgggtagtgattctagccactaaaggcttcccacaggaggctggatgtgagtgatgggtgggcctctggagggcagggccgaggcctcatctgtgtcctgccagggcatggaggagggtggcagcaggaggtctgtgcattagaactaaacaggacccctgacagggaattcctgggagccccgagccggaacacggttctgtccaggagagccaggtatcggagcagccggccacggaagcaggtgggtgtgcacatgccgcatctgccctccaggtacctgactcacattacactccaccccgcagtgctcctaggagcccggcgtggtgtctgactgcaccccttcctactacc

SEQ ID NO: 90968 - DNA, 1661 bp, Homo sapiens
gccaccgtgcccggcttatttcttggctcacttaaaagcacatcatcagctcttccagggtagggcttgtgtcgactgctatgttgtgtttggccagaacaggctcctctggatatttgcctgactgaatgaaaaagcaagggctgtgatgacctggggagaggaggggaccagggctgtgaattaccttcccttccccaccctctcctgcagcaaatcagccggcaccaggagcagttcatccagatgctgaacgagccccctggggagctggcggacatctcagatgtggagggggaggtgggcgccataggagaggaggccccgcagatgaactacatccaggtgacgccgcaggagaaagaagctatagagagggtaagaggcctggctgaggggtgactgcaggtgggcaggacccctaccctctcctgctcacacttaacctatcttcccacagttgaaggccctgggcttcccagagagcctggtcatccaggcctatttcgcgtgtgaaaaaaatgagaacttggctgccaacttcctcctgagtcagaactttgatgacgagtgatgccaggaagccaggccaccgaagcccccaccctacccttattccatgaaagttttataaaagaaaaaatatatatatattcatgtttatttaagaaatggaaaaaaaaatcaaaaatcttaaaaaaacaagcaaacagtccagcttcctgtcctcctaaagtggcccctgttcccatctcccgggccagacagctgtccccccgtcctcctccccagcccagcctgctcagagaagctggcaggactgggaggcgacagatgggcccctcttggcctctgtcccagctctctgcagccagacggaaaggcggctgcttgcctctccatcctccgaaaaacccctgaggacccccccccatcctcttctaggatgaggggaagctggagccccaactttgatcctccattggagtggcccaaatctttccatctagggcaagtcctgaaaggcccaaggccccctccccagtctggccttggcctccagcctggagaagggctaacatcagctcattgtcaaggccacccccaccccagaacagaaccgtgtctctgataaaggttttgaagtgaataaagttttaaaaactagccctatggtctgtgcctgctggggctccccgcgcccacctgtctgggtcttggggggctggctgggcacaggcaggcatggtgacgggtgcctggaagggggagaggagtctgtgagtccctgcagattgaggcttccggtgtctcctcccccagtgtgtcatttccaggcagtggaccccagcccaacgttacaaggactgcttctccccggcccccaccatcatcaccacagtctgttttggctatacttccccccccaccagccttgtaattggctaattactggagatgaatgttggtaaacagaagccttcttctcttctgccatctgcttctccattatttgcccattgtacaccccccttttcctcccactgaagccccagttagtcagcagggcctagagtccctgtccccttttgagtacagccaagtgggggattccccagctcttaagtattgggggaggaaccaggggacccagagaggca

SEQ ID NO: 90969 - DNA, 1085 bp, Homo sapiens
agtggaaccaagaccccacgctcaagcagccccttgcccaccaggctgccagcccggcctcccatgccaagcacgccagacatctgagcctgctcccccatggcttgggtgagacaccagcccctcagatttcacagcaccctgggagagaaaatgcctgtggatacgccggtgacatggctaggaaggggctggggcggctgcgagacccagggcgatggccggtgcttggctctgtgtgattgtaggcccaggttacgacagttccagtgtgccaggatggctggagaggggagtgggcatggtgtctccaggctgccagcccttcatggtgggcagggaaacccttcagctctgggcaggtggctgctgtcggctggtcagtggggtctggcctgcccctccctaacaatcacatctctgtttttacaaatctttctgcttccatggtttgccccgctggtctctgtttttatgacaacctctttcctttgctgtctttttctcggtctgtttttatcggtctctggtgtattctgcccttttccatctctctttctccatctctgtccttttgtatgtctctgactgtctctgtctctgattccagttttggccccatctctgctcccccctccactggcgtctcggactctctctctctctgtctctctggcctgcctctctctctttccctctctctctctcccttttctttttttcaaaccagaattggcttcgattttaaagtcaataaatgattgagcaggaacgagcttggagcagcggggccctggcggggaaaggtactgtgggcgagggggaagggcggggggaaaaatctccttctagaaaaagcatcgaaattcagggcggccgggtggggcggttcctggagctgctggagtccattgtagccacagtcctgagtctcaggcggagagaggggtggggggtggatggatggacccccatccccatcccaaccctgccaagaaacagagacacaaccaggatgtgaactcacgtacaccaccatcaccgccaagatggggatgtaagtgtcctgttcacaccgatgtcca

SEQ ID NO: 90970 - DNA, 1007 bp, Homo sapiens
ctatttagtgagtggagacccaggatgctgctcagtcccctacaatggaacccctcaaccctcgccgaccacaaagaatgatccagccccaaatgtcagtagtgccaaggttggaaaccctgccatgcatccccagatacacagtaacacacacaggcacagctaacccttgacactcattacacatgcacccacatacacagtcacacccaaacaagacgccagctgacagtgtcacacacacacactctccctcactaggacccaggcattgtcgcatatataccccatttcccctgccaaacccaggcacagtcggcgtgccatgtacacagtccagtgttaccccagcacacagggacgagagccacacccccacacatattcgcacctgggccacacctggcagtggttggaaatggtgcctgagagctgagacctgccctggtggcacctcccctctgcttgtcagccacaaccagctgtctttgcgcagcagctacagccaccccagcttctcaggatagaattgggagccccaaatccctgccctggtttgtagaagcctggggtgagacaaagcctggaaaaaccacatgcccatccctgcccaggacactcgcagtcttctagactccgtggtcgagggctccaccctcacctccttgctcctggcagccaccgagagaagggatggggacaaagctaggttctttttttttttttttttaaacagtctcactctgttgcccaggctagagtgtagtggtgcaatctcagctcactgcaaccttggcctcccaggctcaagcaattctcatgcctcagcctcccgagtagctgggattacagatgtgcactatcacacctggctaatttttgtatttttagtagagacagggtttctccatgttggccagactggtctcaaactcctggcctcaagtgatccgcccgcctcggcctcccaaagtgctgggattacaggcgtgagccactgtgcctgg

SEQ ID NO: 90971 - DNA, 1011 bp, Homo sapiens
ggagctttcgagcacaggtactcgagccctgcgccccaacggggagctccaggtgggtccgtgagcccgctctggtgcccacacacatggctccaggcccacgcgggtacacacctccccagcctgcacacgcgtgtttcacatgagtcacacacctgccaggccgctcagggcatctggcttcaaagcggcattcaggttgttgcgggagccggcagggaagggaggcctaattccacctcccccatccctctcggaacacccgcctccccatatgtccctggggcacaggtgggacatcccagaactgccgctgcccagtggcgcccctgcatgtgctatatttatatttgaaatttgtacctttatatatactttttatatgtaagaaccgctcccccctcttcccgctccacgtttgtacttggattttaccacccccactaggcttcgacccaaacctgcaaaaaccatttcgccaggcagggatgtagggggaggcgggagcagccctccccctctccactgcggacggacatcccacgttcttaaagaccggggaccccccctcccccaagggccggactgcagctccgaatcccgcagccccagaaacacaatcgcgggggtgggtgctggcggcgagacgttgctttttggtgtgtgtttgctgttaccgcttaaattaaccctgagtgacggcttgcaattcgccacaaagaggccatttaatgccccccaccaccccacctcgggagaaatttccacttgcccccgagtccagctcgggccgcacgctacccgccctccaggccttcgctccaggtgcgcccgggcggtggaggcgagttccctgcgcgcatcatggacttcaggagtgagggtgggtgggttttggaggggtgggagcagaggcaggggggtgtgccgggactccccagacgctccactgcccaatcatagctctttgatatcccagcccggctggagaaagttagatggtactccagc

SEQ ID NO: 90972 - DNA, 1029 bp, Homo sapiens
gcggccctatcggggcaggggtctactcttgctgagctagttaaggccctggctagagatggcctgtgaggactttagccacctttgagtagagctgcggtgtcccctgcccctggcttcagccttccctgctcctttcactgtgctggccagcggggagaaggagaacaccacttgagcagatcagtggggccctggctgcagctgccccggccgcaggcctggctcctgtgcctctgagcctgggtccagatttcccatgtctctgccttttgtcctggagctgagctgagcatgtcaggggccggcggtcgcggcattgtgggcctccggctgaggccgccagccgtaagatggctgccaaggtctaaaatggctgccagcagcgcccggagcagcgcccggaggcgcgtggcaggggctgcactcgcaccggatccttgctcccacttgctcctttacacagagctaatagtaataacagcaataacgttttggggctgtgtcctgatttagaaggatttcctgtctgtcgcgctctcctggagccctatttgtctctgcctcagtcgctggcccacctccatctctttgtcgggttccctctcggctgtccctgggctgggtacgcgcatgcgcatccacacgcgtgtgcacgggcacatgacttgccatctccacttggtctttcgcagtgggtaggggccgctcccatggggtggactgtgaagcttcctccttcttcccctgattccactgatccagctctggagggcttggtggggaccaagttgtccctaggatgagtggggttcatagcagagagacccctgggcagcagagtggggaccacgtgaccctcgctgagctctgcacatgggtcctgaggttgtgcccttcctgagccatgatttagagcaaccacaggactggggtctgaggaggccctggggtgggctgcctgctccgtagacctcttggctgtcactcccggactggctggggctcaaatcagacccagaaacccag

SEQ ID NO: 90973 - DNA, 1031 bp, Homo sapiens
ggccttccaccttcagcgtctcggcaaagcgtcaggagtccccagcggccggtgagcagggaggaaggagaagaaggggagtcccagggttttcctccctccccaccaaccacccctctctgtttagggccaagttctctgcagcctgtggtccccctgtgacccccgagtgtgaacactgtgggcaacgacaccaggtagggctaggccaggggaggcaaaggagcaagagggtcttgaaggtcatagtccctgctcacctgtccccggtgcgcccccagcttggtggccccatgtgggcagagcccatccatgacctggattttgtgggccgtgtcctggaggctgtgagcgctaaccccggccgcttccacacctcggagcggatccgaggggtcctgagcgtcatcactgaggtgagagccgggctgtgacggggaagggggctccacctgtgcccgtccatctccactcatgcccatcctgtcccccatcgcaggagctcccggacgtgcctctgtactacaccctggaccagctgagcagcaccatccactgcaacacaccaagcctcctgcagttgcggtaagagcccctggggtcgggaggagcctgtcccagaccacagggtggcctggggcaagtccagggattctcatgcatagaacttgcgagggggtggggagaacccggtgcactgtctcattcctgtaatcccagtaccttgggaggctgaggcaggaagatcacttgaggccaacctgggcaacgtagtaagaccctatctctaacaaataaataaataaatatatatgtacacacacatacatatacacacacatacatacgtatgtatacacacacacacacacacacacacccattagcctggcatggtgatacatgcctatagtcctaactactcaggaggctgaggtgggaggatcatttgggccaggagtttgatgctaaagtgagctatgatcatgccactccagcctgggtgacaaaatgagaccctgtctctttaa

SEQ ID NO: 90974 - DNA, 1018 bp, Homo sapiens
acacttgtaatctcagcactttgggaggccgaggtggatggatcacttgaggtcaggagtttgagaccagcctggccaacatgttgaaaccccatctctactaaaaatacaaaaattagctgggcgtggtggcacatgtctgtagtcccagctactctactcgggaggctgaggcgcgagaattgcttgaactggggaagcggaggttgcagggagccgagatcacaacactgcactccagctggctgacagagcaagactccgactcaaaaataaaataaataaataaataaatgactgagccaggacttgaacttgggaatctggccccggagttcagacccaaaccactgtgctgtacgagttaatatgtgtaggggacagagaaggtacctggcgtgggaggctgaggacctggccctctttgcacccaggatgctgatgtaccagcaccagagggtgtcggagaggtttgacgtcatcgatctggacccctatggcagcccagccaccttcctggatgcagctgtgcaggctgtgagtgaaggaggtgaggtggggatggcactggggtgggagcagggcttggggtgttggagggttctcactgcccagcccctctctgcagggttgctgtgtgtgacctgcacagacatggcggtgttggcggggaacagcggggagacgtgctacagcaagtacggggccatggccctcaagagccgggcctgccacgagatggtgaggggccctctgccagccagccagggagaccgggggacaggtggttgtctgagtcccttcccaatacactttccccctcctcagacctgctcagcttcctccaggctgatggccagatgcatcccaggctgttaacgacaggcgtgtcttcaacccacatagttcctaagagcatggctgataatcatggtcatttggggacagtggctttggccaggacaggagtgcatggccacattattttagttttctgtattaaaacaacttttcaaaa

SEQ ID NO: 90975 - DNA, 1638 bp, Homo sapiens
gtccctacctcatagatatgtaggacatccccgggcccggaatgcggctctctgaccctctctgtgccctcccccgccccccgaaccaggcttggcgggcggaggcgccagcggatgtctcatgcaaggatcgtctctgtggctaagcctcactttccgctccgcccgggtgctctctagagcccggtttttcgagtggcagtctccagggctgccgaatacagcagcgatggagaacggcaccgggccctacggagaagaacgtccacgtgaagtccaggagacgacagtcaccgagggggctgccaaaatcgcctttcccagtgccaacgaggtcttttataacccggtgcaggaattcaatcgggacctgacgtgagcaggggtcagacgttagcctggcatcggctagtgggtcagtgtggatggcgggggcggggtatgagctagtcctctgtctcccaccagatgtgctgtgatcaccgagtttgctcgcattcagcttggggccaaaggaatccagagtgagtggaggtccaggcttctggtgggcgggggtcacacaagtttatctccctgcctgggctcttctgccgcccaaatccagaggggcttcagccacatagcaggccctgggttctgctccttcagcctttccgcagggatttcagggacgatattttggagattaaggggaggtttctcagaggggaccttgttattctctgacttgtgcctctgggtggctgcagtcaaggttccaggagagaaggacacgcaaaaagtggtcgtggacttgtcagagcaagaggaggaaaaggttgaactgaaagagagtgaaaacctggcctcaggagaccaacctcgcacagcggccgtgggggagatctgtgaggtggggcctgagcataggagctggcagccctggaatttagcgggagacagagggctcctggagggggagagctataggaggtgggtggtgggggctccttggggcccagaagaggatggaggtggagatgtgagggaggttttctgcttactccaacaggaaggcctgcatgtgctggaaggcctggcagcttcaggcctacgttccattcgatttgccctagaggtgcctgggctcagatctgtggttgcaaacgatgcctccacccgggctgtggatctcatacgccggaatgtccagctcaatgacgtggcccacctggtacagccgagccaagcagatgcccggtaggttctgggcatcacagcctagctctgggacaagcctgcctggggtcaaattctggctctgtcacattctcactctgtgaccttgagtgagtgacttagcctctttgagccccagtttccttgtctgtcaactgagaaaattagttttacaggggttgctgtgatgagtaatagataattatggtatgatccatactctgtgccagaaataagtagcatcctggtctctgttttaacttcttacactccttttattcattcaaatgagccatagtatatccagtgtctgctatgtgtcaggcaccgttttcaagaactggaaatgcatcaggaaacaaaacatgcaaaattggtgaccttcgcaagagttggcaaactatagcctgtggggct

SEQ ID NO: 90976 - DNA, 1004 bp, Homo sapiens
cagagccttttgggctaggctaggggggatgtgggggcaggtcaggaaaagctggtgtgaccagaaggtatatactaagatgcgccccccaccgcccccaactcaagtgttaaggggttccgtctttctcacacctcatccctgaagcctctagagtcctgaccctaccccttgggcaagcctctgccaactgttcaaaggcactggccagtgggtgtttgtgtgggcagctggagacagtctggaacacctagcttaggcatcttgtttatcacaaggtggcccttgcccacccccaccttatatatctacagggaggcagcccagcagacgttacctgggtattttaggatcctgcattctttctctaccttttgtggccagaagctggtggttcaagcctagtggatgggacctcacagcaaccatcgtatatattagtaccatggcctcccaggcaccaactccttgagcctgagttctgtgtgccatctccctgggggtgaagaattagagggaatgagcatgtaaaactctgttgatggtggtttggaggctcccgacggggtgaaggcagggcacagagaagagttaaggggatcaaatcaggcactcacaccctggcccagggatctacctctgggacactcgtcctgggccaggccctgtgccgagctcgctggtcggatgagctcattgatggctcaccaccaccagttcaacttaggccttctctggggtccagacgaggaagctgaggctcggggtggtgtggcttgtctcagatcacatgagcagacagtggctgaactgggattgtctgaccctcagcccaaacccatagtcactcaagtggccttccaggagggtgactgaaggagctcctcgttctggattccctggcgggcgttctcctccgtccaggccttcccttctgctcaccccgggggatgggtcaatcccctttgggacagactgagtttccatggtgtccccggggaatg

SEQ ID NO: 90977 - DNA, 1558 bp, Homo sapiens
ggtggggaatctccactgtctggttatcatgaggtttgcgggagaggttggcgtctggggtgtgagtggacagtgctgtgaaggctctggggaaaaccccagcgatcactgcctgttaatcccatgaaatgtgcgaggtctgggagatggtgagaggcataagatgtcttctactcccagggagtttgcggcccagcacggggccaggggatacgactaacagcagctggcattcatgagcaccgactacggggcgagcgccgatcggcctgtgttctttggttgtttaatccttgaaatagccttgtgaggtggctgctgctgtcagcccattttctagatgggagactgatatggggggtgagcagtattgagggtaattctgagtgacaagctctataagggatttgagcctagtacaatagtaggattcaaaatcttaggtcctgcgtggttccctagcacagcccagcaggcccctctcccaggatgatccccatccctccaccctcctttgtgttagcggcaccagggtcacctcagggcctttgcacttactgttgttccctccacccttggttgccgccactgctgccctgtcttttgggtatgatctgattacacgcagggagtgggatgtaactccgaagggtgggcttatggttggagttggtggggagggagcgggcaggctgcgagctccatgaggacggaggcagagcttctgccaggctctccaaggagctggagctgctgcctgcaaagggaggccagattgccgagggctgcgaggaggagcgagtgggaggagggagaggcagcacgcggagactgctcattcccggagatggtggttgcagggagaaggggctagagaatagctgcagttgggaggattgggaaaggaagaatgaaaagaatgaagaaggccttccttggggattagagagagggcaccccagaccctgaggtggaggtcctcagacaggcagaagaccctgtttctggagaggacacatccagtagctcaggtaaagagccccagctctgggctcggccggtccggggttcccgtctggtctctgccttgcttctctgaacaccagttttcccacctgtgaaatgggtctagtcacagctgcctcacatttttgcctgattcgggagccagacggcctgggtataaacctgtgcctgccattcaccagctacatgttccccacctctggcttcacctctctgggcctcattcccatccatgaaatggcaggcaggctcatttcttcctcagaaactgtaaagaagagtaagttaaatgagcctgtctgagccctggccaggtatgggcccagtcagtgaggcttgagtaggggacactgttactaatcctattccaccatggatttaacaatagtcattcagggaaagagataacgaattaaatctgtgggtgtataagaaaaaaaatacaggccaggtgcagtggctcacgcctgtaatcccagctctttgggaggctgaggtgggcggatcacttgaggccaggagttttgagacc

SEQ ID NO: 90978 - DNA, 1815 bp, Homo sapiens
ttccatgccagtaccctgaagagataccatatatgtacctggtgcttgcaatagctggcactcagaggtagcacactgtgtcctagccactcttccgagcacttaagcatattcagttactcttcaagtacatatgaataagtatgcctttgccccctcctctttgcaagggatagcgtgtggccaccctggtctgcagctagcttagcagatttgaccacatattgtaaaagtgagtctgtaccaggacagatagggtagagggctctgtgtggtttagcaccatggtagattccatcgtgcggatgtccctccagcaggggaggtctttggggccagggctaggccagcacccacatttgccgcctgaccccgtccctccgtctctgtctctccattcctccctgcccctcgtgcagccgctgccatggcccagacactgcagatggagatcccgaacttcggcaacagcatcctggagtgcctcaatgaacagcggctgcagggcctgtactgtgacgtgtcagtggtggtcaagggccatgccttcaaggcccaccgggccgtgcttgctgccagcagctcctacttccgggacctgttcaacaacagccgcagcgccgtggtggagctgccggcggctgtgcagccccagtctttccagcagatcctcagcttctgctacacgggccggctgagcatgaacgtgggcgaccagttcctgctcatgtacacggctggcttcctgcagatccaggagatcatggagaagggcaccgagttcttcctcaaggtgagctccccgagctgcgactcccagggcctgcatgcggaggaggccccatcgtcggagccccagagccccgtggcgcagacatcgggctggccagcctgtagcaccccgctgcccctcgtgtcgcgggtgaagacggagcagcaggagtcggactccgtgcagtgcatgcccgtggccaagcggctgtgggacagtggccagaaggaggctgggggcggcggcaatggcagccgcaagatggccaagttctccacgccggacctggctgccaaccggcctcaccagcccccgccaccccaacaggctccggtggtggcagcagcccagcccgccgtggctgcgggagcagggcagccagccggtggggtggcagcagcagggggtgtggtgagtgggcccagcacgtcggagcggaccagcccaggcacctcaagcgcctacaccagcgacagccctggctcctaccacaatgaggaggacgaggaggaggatggtggcgaggagggcatggatgagcagtaccggcagatctgcaacatgtacaccatgtacagcatgatgaacgtcggccagacaggtgaggtgccgtcctgtcccccatcccaccagccacccctgctcctcctgccactcgcgtgccactctctccctgcagccgagaaggtggaggccctcccggagcaggtagcccccgagtcccgaaatcgcatccgggttcggcaagacctggcgtctctcccggctgaacttatcaaccagattgggaaccgctgccaccccaagctctacgacgagggcgacccctctgagaagctggagctggtgacaggtgggccggtctcgccccagatctctcccctccgcagctttggagccggctggcctgggctgggctgggcagctggttaggagcccccagcacctcagtttccctatctgtgctgtagtgttggtaacagccaccctaagggtgggggcgttggtgagatggaggagctgatacagcaaggcctggcctc

SEQ ID NO: 90979 - DNA, 1353 bp, Homo sapiens
tgggggctggggtaggcgaggccgtggggactacccattttatagctggggaaacaggctccgagaaattgcacaaccgacctcaggtggccggcagtggcgtgcctggtgccctttctcctcttccgcctctgttgctccctttggtcctctggggcctcagagaggcaggtcctaaaggagggggggtctcctgggggcagaccgagggtctcggaggatagaatgagaggtttccagggctggcagagtgtgtgcgtgtgtgtgtgcagaagttttgctttcaaacaaatgaagatacaagaggcagtaggacctgggttggaacccaggggagcagactggggggctgttgcccctccctccatctccccacacccaccccaccccacagcagggctcctggcccccacccccctgtacataatttttaaaacctttttttagcgaatgaaatattgaagtataagattccttttatttttcaaaccaatggggctgtgtctattgtccccctcggtccccaggggtggggggccttggaaggcagggcggtgttggggggctggggggcaggctgaatgtgtgtgtgtgggtgtgtatgtgtggagtgtgtgtgtgtgtttccatggtaggactccagtcccagctgctgcctaggctcctgtgggtcctgtgggtccccctcccctgttcaccttccccaacagggctatagtttaagggtgtcccaggccttggctggttggctgggcccagctcctgggggctgggcagggcagggcagggccgggtccacttccattgttagcagttgtttgcagaattttctcttttaccattcctctctttttgttctcgcccagagtgggtggttttttgttgttgttttagattttcatgtgaaggcagttttttttcttttttaactccccatccccctatgcagggtgtcatttcaccatccacatccacatccttgtttgtgtttctggccctcgtcctccctgcctctcatctgcctccccaacccccacctacccactgctcccaggggtctctccaggggcagggggattttaggagatggggtgggggccagcccctactggacccttgtaatctgatttggagaccatccccccgatgggaccagcagccccgccggcccactgggggtccctcttaacatctgcttgttgcgggggtcagtcatgagtgccagggtctggctggggtcttggcactgtcttcctggccggggcctgaaaccttagcccccagccggcctgagtgggggatattgacacccccagctaaagcacaagcaccttagtcacccctcctctcccc

SEQ ID NO: 90980 - DNA, 1069 bp, Homo sapiens
agggaccccaggaggtgccccctggctcccaggactgtgtgtgggtccggggggtgggggggtggggagaagggtcgggcagggggtgcaggggaggaaactcctcaccaggagagccaaagacagggttgtgccttaccccaggagccacccctgtaccccccttgccctgccattcaccctccacccctacccctgggcggcctgctgctttttccttctcttcctcccctgccctgagctgcatggttcccccaccctgggcagccaggaaggaatctgaatggagaatcaccaaccaccagagaaaaaagactgtggggccctcccctgccaactccccttccctggccgcccactcaacccacacctctttcacgcaggacaggctgcccaccctgtccacgtgaagtgccaacgccctccccaccctgggccgagcccccacccctccctgggcccccaagtgagattgcacatttaactactgtaaggagaggagcggcgttggcaaatgtgaaccatgagaatatcagtgatactgatgagaataaactaaacgcctttgtaacagccttgccgcatgctcgttacttgggggcccagggaggaacacacacctgcattgtgcccagcagacccaggttgctgactgcaaactgacagcctccgattctaacacgcatgcaagttaccccaacagatacagataacgcaacatatgagctggtcctacacacacacacacacacacaatttttttttctttttttttttttgagatggaatttcactctgtcgcccaggctagagtggcgcgatctcggctcactgcaacctctgcttcctgggttcaagccattctgccttagcccccccaaatagtggggattgcaggcacccaccaccatgcccggctaatttttgtatttttagtagagacagggtttcaccatgttggtcaggctgggctcgaactcctgacctcaggtgatccacccgccttggcctccccaagtgctgggattacaggtgtgagccaccgcgcccagcattttcttttcttttt

SEQ ID NO: 90981 - DNA, 1060 bp, Homo sapiens
taaaaaaggctgacattttatttccaggttggcacgtgtataaggcacaggggcaaatggctttggggtcctggaactggaaatggagacaggtgtgtctcaggtgtccctgcctccaccaccccctaagtgcacttgagacaggaccagtggtggtggttccagcccagggtcctgaagggtcccactggctctaggggagagccatggggacagctccccaggcgggaccctctactctccagctacccaggagggaccctctcctcctagggggcgaggccagctccaaagtgcttggtggctccccaggcttaagggaccagcctgccagggagggctggggtcagagagagaatagtaagatgagaacgaggagaagcacccccactagcacggcgatggcacaccactgtcggcggtctgggaacgagaaggtcaggggtcacggggagagggtaccacctacaacctgcccccaccaggactgacccctcccctgaggggactcaccactcgtcatgtgggatactttggccaacttcctgaggaccccgtccatgcgggactgggtgtggtccatctcttgggcgaaggcatccagcatgctgccaagaacaggatggcatcagccccagatggcccagacacaccagggtggccgagagcccctggcccacccccagggtcctggcctcacatgccctgctcgtccagctcttctccaacgcggccggacatgtgcttcagaacctggatgctcccagacaccatctccagctgttgatcctgttcatccatgatcagctgcagagcgaaggggtgggagatgctgttgaaaacgaccccagaaggccaggcgctatggcttatgactgtaatcccagcactctgggaggccgagacaggcggatcacttgaggccaggagttcgagaccagcctggccaacatggtgaaaccccatctctactaaaaatataaaaattggccaggcattgtggtgggcgcctgtaatcccagctactagggaggctgaggcaggagaatcactggaacct

SEQ ID NO: 90982 - DNA, 1105 bp, Homo sapiens
gtggccacaggggatgttcaggctggaaccagggtcttcccctgtgtgaagggaaacttgctgcccacgacccactggggcctccagacgggagcatgtgggtaggccgtgagctccacccccggcccccctcccttgggccaaggcgctgatgcatcggcggggctcagagaaaggagcccacccagaaagctcagcgtggagtcgggggacgctcctcctcgccagggttcccgtcccctttccctgctgggtaaatcgcattctgtctctttaaggagtgtttggccgcgacgagttggaaagcccggatgcgtccttcggttgggcggggtgtctcagtgacgtcactgggggtataaaagggcctgggtggcgggcgcctgggcagagcgtcctagcagtgtcactgcgtgggttggtttgtgtagagaggcgtgagcgagcccgttgtccggagtgcacctgctgcctgttctgtccctcccgggagcccccgccgctgtcgccgtcgagtcgccatggaagtgcagaaagaggcacagcgcatcatgaccctgtcggtgtggaagatgtatcactcccgcatgcagcgcggtggcctgcggctgcaccggagtctgcagctgtcgctggtcatgcgcagcgcccgggagctctacctctcggccaaggtggaggccctcgagcccgaggtgtcgttgccggccgccctcccctctgaccctcgcctgcacccgccccgagaagccgagtccacggccgagacagcgacccccgacggtgagcacccgtttccggagccaatggacacgcaggaggcgccgacagccgaggagacctccgcctgctgtgccccgcgccccgccaaagtcagccgcaaacgacgcagcagcagcctgagcgacggcggggacgctggactggtcccgagcaagaaagcccgtctggaagaaaaggaagaagaggagggagcgtcatccgaagtcgccgatcgcctgcagccccctccggcgcaagcggagggcgcctttcccaacctggcccgcgtcctgcagaggcgcttctccggcctcctgaactgcagccccgcggcccctccgac

SEQ ID NO: 90983 - DNA, 1887 bp, Homo sapiens
agcgcccgcgaaaaccgtggagagaagccgccgcccgggctgctgagaggcccggagagggactctgtccccggggagccatcgccttcagtgtgcagggacggcaccgaggagtctgagccgggggcgcgggcgccttccgcagagacctgcgcccacaggtgctgtcttagtggactgggacgtgaacctttcgctctccttctggactgggagaagggaggcttgggtgttgtgttttttgttttgtttgtttgtttgtttttaaagatctcctcagggtcggacttcattttgtactgtgggctgtgctggccctttcaaggtttttcaagagttggttttgcgtttccaacctcggagaattccaggcactccccttccccctccgctgacatacttgtataagcggtcatcgttgcgtcatggggcaggcgtggggagcttcctgtcgccttgcgtgggtgtggggcctgggaggaggtcctggggcgtgcacccgccctgggcagtggggaggagagtggcctgagttacttcacccccgcgtgctgctggttaatgtcccgcgtctctgcaccttcgggtgggagcggggactgatctactttcacattctcaagtttttctcatctgcattagaggtgcccagtaggttcccaggttccagcgtgcccctccctcagacacacggacacaatcagccgagaagttcctggtctgaatcacgagaatgtggaggggtggggggtgtcagtggaaaggcataaggctgagctgagaccagttgctggtgaaactgggccaatctggggaggggaacatccttgccagggagtttctgagggtctgctttgtttacctttcgtgcggtggattctttttaactccgtctacctggcgttttgttagaaatgtcagataggaaaataaaaaccatttgagtaaaaaagccggtgctgtctggttttctgctgtggtgggggaggggcggggttaaagcgtcaggggctggcagccgctcgctggggccccaagaaccggtctgaccggttaccacgtgggcgagagagggttgggcccccttttccttgcccgggcattccctaactggtggagccccgcctcccccagatttgggggttcccttgaaattgtcctacaactccgggacagggagatcggggctttctgagttgagacaatagtgctaaacacactgccccaagcggagctggggatcgattgcacgcactttgaagccttgaaaggtggtagatctcgcccccaccccctagaccaaactgaatcagctgtggccggggccctacagtatcaggtggagctgagcgggtgagctttgaagggctctttagtccccagttcccgtatcttcctcgaggaatcgttgtgtgtctcaggcagggacgtgcagcctcagtttcctcatctgtgaaatgggcctctaagcagcttctccacccggcattaggtttttaaaaatgcccattagagccctagttattttcttgggtcactccccagctctagaataaccaccccgaaacgagaaagccctttcaatataccccacgtaggtttaagagtggggttgtgggcgttgccccagggcgaagggagggggcctgtcgggaagacaaaggagtcgcaggtgcggggagtggtggcggcggcaggcgccgggaaagcgctcgccccgccccgccgacggctggctctgccgccgcaggcttcccatgaccccaggggaactgaccccgtggccacagggtagaaggaggggcaagccggcctcagaacgtctgctggtggaatctgggagctttggctcccctcccgcccaacccacaccccctttcctctcct

SEQ ID NO: 90984 - DNA, 1062 bp, Homo sapiens
cccctgaaccgaggcaggtcagtgggttggggggagggggtagtacccaggttcctgcagctgctgcctggccccctctgtcccctctccatggaggcctctccctttcttcttccttagtgtctcctccgccctgccttctcctcccctctcctctcctctgttctgcttgtccctgagcaccacagggctgcccacctgtgtccacatcggtgtagcggcccagggagcgctcagaggcgcggtggctgcggtcgcggcgccgctggtggtgccgctggttctcctcgggcgggacccgctccagcgagtaatcgtccaggcgtcgggccttggggcccagcacggaggctgaacgcttcatggggctggtgtctgagatggtctgggggaggggacaggccggtgggctggggtcagcagctagcaccaagtggtcccggtccttcctgccccattgtggcagcctggtggtggccttcggtgactgcggtgtgaccatcctggggcaggggccaggggatgccatggggccttggctccccctgatcaatcagggctctgggtgtggccaggcctctgagggtggagcctgaggattcctctgtccctcagagacaggactgctccttttgagcccatcctgggttctgaccagaaagatctgatcctcactctccagtcctgggggcccagccacagttgggcaggctcaggctggccagagggaagccctctccacatccagggtgcaaacctgggagccctggactgccgcactcatccctgccccagcttgctctcctgggagggtgagaagcctccgactgtggctggctgacctatgggctcaggaccaggtgcccggcatggcagctttgggtcctcccggctaacggggctgtgctcgctgcccccacaagtctgagtccttctggtgaggcccaagctagggagctctgggtgggggtgggggatacccaggcactggaggctctgggggcccactcttttccctggtgcttcatccctgggtcaagccctgacacacaggtttctctg

SEQ ID NO: 90985 - DNA, 1043 bp, Homo sapiens
tgaagtaatctttttttactgaccttttcttccattttttttcctcctcttttccattgatttgaaatatctattttatcattctctgcatctttctctctctattttttcggctcgtgtggatttcttttttctttcttctgtttctccccacctctcttcctttggttctctgttcccattcccgttttgtttttttgtttttgtttttgtttttttcattttcggtgctgccaggggccgcatgccttacctggacatgtatcagatgctgagacacatgtctccgcccctgggtctggggaagaagtgtccggccagagtggcttacaaggtagactacccttgccgaccaccgacgtccaggcactgggtttttttttcttcttcttcttctttttttttagtgctgaccagaaacacccggccgactctctttttccaacgtttctcttcttttttgtttttgattcttttttttcttttctcgagtcaactgatcatgaccatcccttgattctaagcagcacactgtgtccgtcctttctgatgagtgtcttcgtgttttgagactccattatggccgacatgccggggggagggggaggggagcgcccaggtccccttgcacctggtctcccaggtaccaaattggaaacaaacacgcttcttcagggagtcaaaacccatgcttcccacttctgcccacccagagcggcccccatgcccaggctggggcaggcgccttgcagagaggggctttagcccccgaaagcaggcgaggtcccgggtccccgcccctgccacgcacacctgaagctgatctctgacctagggccttggggattcgagaccttccaaggagcaccaagaacctctcttcccctcccttccttcccctggagtttcgtccccagcccccgtccctaatccccccaagacaccccaacatgcctctccattgttccagagtgggcaggcggccgcagctggacccctggacggtggcacactgatgcaggccatgcacgctgccttggcgg

SEQ ID NO: 90986 - DNA, 1045 bp, Homo sapiens
cctcccaaagtgctgggattacaggcgtgatccaccgtgcccggccagtctttgtctctttgtatctctctctctccatctctctctgtttctctcttcctcttccccatctctccacttgatctctctctcactggacctccttgtgtgagtgagcatcacctctccattccccagtctctttctgtctctgtctcatttcctttccccatcttctctctatccctctctccatctgggcctctgtgtacatgtctttgggtctgtctgtccgtctgtctgtctgtatccttctcactcactcattcattccctcggtctctgcccccattctctcttggtccccggggtccccacagatgctgaatctctttgtcgccgtcatcatggacaactttgagtacctcacccgagactcctccatcctgggcccccaccacctggatgagtacgtgcgtgtctgggccgagtatgaccccgcagcttggtaagaagtcaccccgaatcctccagccacaatactcacctctccctggaactggaacacgggctaggtcaggccccagactctggagcactgaactcctggggtcctagcaggggtctcacaggttcagtcaggagagaagatataagaatcatcacccttgcataccccagattaaacacgtagggtgccaaccctgcccaaaccctggactttctgggaaatgagggagggcgtcaaccatgagatgtcctgaagagccctctcctcctacgagtctctcctgtctctcactgtgaagtctccagatggtgaggatgcattagccaggctccagggagaaaaccaacagcatcccagcctcagttctcttgagagtgtggggaggagggctggcctacccttggcagacaggattggcagcaacatcagagtagcagaactcagctcccactgggacccgtgaacctgggagtgagaggacatacaggccaggggaggacgcagagcctcaggggcccatgcatctttgtggccacaaagggagtgggcgctccc

SEQ ID NO: 90987 - DNA, 1024 bp, Homo sapiens
gtaacagagcaagaccctgtcaaaaaaaaaaaagagagagagagagaaaagaaaggaaaagaaagagagagagaaggaaaagaaaagaaaaaaacatatcagtgtcctcaaatcccaccctagaccaactgaatccaagtctgctggggtggggcacgggcattggtattttttcaaagctctctgtggacttcagtgcacagccaagaatgtgaattcccttctctcagctcccagtaaaaggaggtggtccacctggggcttgcctggccagctccagagcccaagtgctcaacgtgtgtgctccacctcctggggaggcgttggtacccagtcagggctgggtgtccgagtctctgatttctccctgtcctcaggagtgccaccggggaagcttggcacaacatcatgctttcctgcctcagcgggaaaccgtgtgataagaactctggcatcctgactcgagagtgtggcaatgaatttgcttatttttactttgtttccttcatcttcctctgctcgtttctggtgagtctgtggacactgtgagggccgtctgggctccctaagcctggcttcctttcaggggagtgggtttctgtggaatgtggctgtgtcgaaggcttgttccctccaaggcttctctgaaccagcctgggatcaggtgaccctgagcgtctcaaactcagcactgttgacatttgggggtggctgattctttggggtggggccatcatgtgcactgcagtgtatggcagcatccctgtcctccccccaccagatgctggcagcacacgccacccgttcctcctgttgtgacaaccaaaaatgtctccggacattgccaggtgcccccagggggtgggggtggggttgggagtgggggccagaattcccccatttgagactcaatgaaatatttcagctgggcgtagtggccgatgcctgtaatcccaacacttcgggaggctgaggtgggagggtcacttgagcccaggaatacaagaccagcctggacagcatg

SEQ ID NO: 90988 - DNA, 1401 bp, Homo sapiens
ttcgtctcagtgcatttggttgttgggagaaacaaaaaccatctcgatttttttcctgattggatgattcggatatattttctttttcttgttcttttgttatttcttccccatccccgttcctttttcctcctttctttttcttttcttttccccattgtgggtggggctggcagggagggcttatgcttttgagttgatgccttttcctccctcccaccctctctctcccaacattattcctttttcgagtttttcctctgcatcattgcattaatagtgctttctctctccctccttatttggggtctggcttgcttttttcctgttggttggcttcatgtaggggcctctgtgagtggtgacagctctgagccttttggggtgggtggatggtcacccctcttcctccatctccccagaataacttcatcaacctgagctttctccgcctcttccgagctgcccggctcatcaaacttctccgtcagggttacaccatccgcattcttctctggacctttgtgcagtccttcaaggtgagtcctcgtccctgctgctggcccagggctgagaagacaggtgaccctcatgctctggctgaatgtagaagtcagattggaagtgcctctgtgatgtagtcgtgcagagaatctgttatctccaaggctgttgtcaaacttcctgtccctggtgtgtcttcagagctgtaagggcctcatcctagagcccccagagatgcccaccagccctggaaggactctggcacgtggcatatggccacccaacccagtggggcagagcactgggacaagggaggaagacagtgcggctgagggacccccagcactcttcttcattgccttttttcccaccaggccctgccttatgtctgtctgctgatcgccatgctcttcttcatctatgccatcattgggatgcaggtgagtgtcgtgtccctaaggttcccagagcctcccaaggagggcagccacccttagaaaggggtgggtcagaggagcctggttcacagaagcagccatggaggttgagctgggtttcccagaagccactggaggaatggcagcccctggtcgtcaccctccaattccacaggtgtttggtaacattggcatcgacgtggaggacgaggacagtgatgaagatgagttccaaatcactgagcacaataacttccggaccttcttccaggccctcatgcttctcttccggtgagaaggggacctgctctgataattctgtttccgtggggtggggtgcctgccttcatccttctgttcccatagaggatgtaccctcctcttccaatgcaagacgtgccctcctccttctcttctggcaggggcgcgccctcacccttcttttccggtagggggcgtg

SEQ ID NO: 90989 - DNA, 1084 bp, Homo sapiens
ctcttaccacatacagtcaggtgggggaggcaggcatcggtcaaataaccccttgactccacttaaaattatacctgcactgcgagctgaaggatgagcagcattaacaaggcagagagagatgcacagagcattccaggcccaggacagcacatgcaaaggccctgtggtgggacggaacctgtgaggggtcaggatctgcaagcgagggaatgtggctgatgcaaagacagccgagaaaggctggcctggagacagccgaagaaggcagaaggggacaggacccggggctggggagggcggggctatattgtggaatatgggctttctcctaagcaccaggaagggcctgggaggataggaagcaggggaggcgcgactggtcatgtgactagacaagctcgctctggttgcagggcagggaacagcttgacaggaggctgggctggaggtgggcaccaggaatcgcagcaagagatgacagtggaggagagagaacagtgggagggttgtcctctgcaggacccagggaaagatcaggtctgaactgagatgaggtgcctgggagcagtcgggtctggcttaaaactgggagataggctgagcacggtgactcaagcctctaatcccagcactttgggaggctgaggcaggaagatcacctgaggtcaggagttcgagaccagcctgaccaacatggtgaaaccccatctctcctaaaaaatacaaaaattagccaggcgtggtggcaggtgcctgtaatcccagatcctcaggaggccgagacaggagaatcacttaaacctgggaggtggaggttgcagtgagccgaggtcgtgccattgcactccagcctgggcaacagagtgagactctcttaaaaaaaaaatactgggtgatagaggtgagcgagtgcaaggaaaggaccaggttgggggaagagaataggtgtgggcatagcaagtttgaggtgcctttaggacatcccgaaataagtcagataggcaggtgttgtgggggctgcagcttggagctgaggtctacaagtagtaggacttttctggagcccttaggtgggtggtct

SEQ ID NO: 90990 - DNA, 1006 bp, Homo sapiens
gattctcaggaggcgagaggttgtagtaagccaagattgtgccactgccctccagcctgggcgacagagtgaaactctgtctcaaaaagaaaaggaagaaaaagaaagaaagaaacgtgaagtgcttggcacagaacctgccaggaaaccaggagtttgaaaatggtggttgttaactattactgctgttgttattgttattgtgaatgggtgtgtagttttgttagccagccctgagttacagtcaatttgagggaaagatagggggtgggtgtttgggtccttctgggacaattaactcccaacctggagtagggagaggcatgtcctggcaggcaaggaggtctcagttgcccctttctgcctcccaggtaagcccactagttctgaggccagggcttggccaggctgagacaggaaatgccagatgcttgggcgggcaggtccctggggtttagggggcagagggcatgcggcagtactaaccagtgctgtctcagctgctgcccccaagtggctggggtgatgtgggtttgccctgtgtgcaatggataatgactgtgtttcttgtcttgtctcttttcatgcctgctcttaaaactgtatattggcgcaacgccgtctgaaaaactcatccaatcaaaatgcactatgaaattcatttgttcatccatgacatggtctgtgtgttcatacaccaatgacttatctcccaacccaccgccaccaccacccccactccccgcccgggaaccgaaacccattggttttttggcactggttacaaatcaacctaaaaaatgctgaacacgcctccccaactgcccccgcccgcccgctccccctcatcttcaacatctgcatctagaatccggttggtcttacttctttctgaagtctaaatgccttacattaactgtgaacgcatctcctcgcgtcggcattgcatgccacaccctgcctctccaacgtgggatgcctgacgctctcctcaaccctccgctct

SEQ ID NO: 90991 - DNA, 1038 bp, Homo sapiens
tcataatttcaataactaactttttggagcccctatcatgagccaggcataaattaagtcttgggtctcatgattttgtgaagtaagcactagtattacggctattttacagatgagggcaccaaggcacagaggggacaagtaacttgcccaaggtcacacagctaatttttaaaaagaaagaaagaaatctacttaacccatagattcacaatattgtttggccctgggacatttaatatcgaaaagcctttttatctcctacagaattaaggaccgtatttcttcaacctagcttggggatcaagatacttcaagagggtcgtttgggagtgataggaactttgctaaacagggcatgtgaatgtcttctctcaccgaggtcccctctgccttcttggggttccaggacccagagagggcccccacctggaggagtttaatagtttgttgtgtaggaggccttgggggttggagatctcagtagtggtaggtaacatgagattatggaagaaaagggtttgtgagcctgtggtctgagtggacctctgcacgcccatctgtctccaacagccttcgccgcctgtgccattacatcctgaacctgcgctactttgagatgtgcatcctcatggtcattgccatgagcagcatcgccctggccgccgaggaccctgtgcagcccaacgcacctcggaacaacgtgagtcccacagagcacaccccttcctagcctggctgctctgcctcaggccactttctcctgcatccaaaatgctcataggtagggtgggatgttggggtcacccctaggcatagcccttatggctgctggttgagaggggaagctctgattccttggggatgctcttgggagcaagacattccttgaggcagtttctctgtgagcctggtggggtggaggtggcccagagtgactggggctgaaaattgctggattctctaatggaggcgtgagactagcaggatatggatgttgcacattctctacatggaataggggggttactggggcag

SEQ ID NO: 90992 - DNA, 1045 bp, Homo sapiens
agcagtaatagtaagcactcaggaagtgtcagctaatactgttagtaatactctcatcaataaacataaaaagcaataaggacccagcttgcccaaatcccacagatggttcctgctccctctcttcttcagaggaagaaactatctccccactttcacccccatagcctcagctggccagacccccattctgaaccaggggagtactgctaattccattattaatagacacatcaaacaatctggccgggagagacattattcatttggctgataaagaggttctaaggctctttggaaataaaagttcatgaagattcatgcactttaagagaaaaaaattcaagatcagtcattcatctgctttaaaaaaagtggcaaagataaaactttatttgagaatataaaataataaaaagacattttcgttctctgttgtgacaaagccagtggccttcggaggtctgccttgtacatttttcctcttcttcagtcattccttgaggctttttgcaaacgtaccctgtgtttttcattctccagcatattgataattttttttttttgagacatggtctcgctttgtcatccaggccccggagtacagtggtacaatcatggctcactgcagccttgacttcctgagctcaggtgattctcccacctcagcctcccgagcagctgggactacaggtgtgcatgaccatgcctagctaatcttttgtattttttgtagacacagggttttgccacattgccaaggctggtctccaactcctgggttcaagcgatcctcccacctcagcctcccaaagtgctgggattacaggagcgagctaccttgccaggccgatcatatttttttcctttttattcactttgtcttctcctcattcctaccttcatctgtctttcagtggctcactccagtgaaaagtggactgacgcacattctatttcatataattcaatggctgctggccccagatcccccataccaggtggccgagcccagtggccctgcagggtggacaaaatgagggtg

SEQ ID NO: 90993 - DNA, 1005 bp, Homo sapiens
gaggctctgctttatcctgccctgtggtgtgactcccagaggcatcagatgtggctgggagtgggagacatggaaaattggctcctgcaacagagaactatcagccttcccatcaattggttacttctaattctgttatttttcaggggcactgtcttctcataagctccatctatgcaaaactaagcccatgggtcatgatggttccctcaggccagaggcttgctggagagactaatggatcccctggctaaaatctgtgcttgggctgcacattggttaatttcttctgaaggaacagcctgagcctgacattctccatcttttccctggcaggttctcccttcgcccgagccagcattaaaagtgccaagctggagaactcgaccttttttcacaaaaaggagaggaggatgcgtttctacatccgccgcatggtcaaaactcaggccttctactggactgtactcagtttggtagctctcaacacgctgtgtgttgctattgttcactacaaccagcccgagtggctctccgacttcctttgtgagtatcacccagccccacccctgccaactccctgatccctccctcacaccctttttccacttctctttctctggtagtatgtgtatcttctttggtcctcattgaatctgccctttcctttagccatttctataactgtcactggggccaatgttactgttgctatgacaatggaacccatctcccttagacctgagagctggaagctggaattcagaccaacaaatgctcctgtgattcctttctaagagagagggacagaggggtgctggtgaaggggatgttggaagagagacagagaaagacggagctcataagatagacagatagaaacagaaacatacatgtattaataatttttatgtacatctctggaaatgttcataacttatggttaagagaggatgccttagaaataaggagtggcttatatgttgccctcattttctctactta

SEQ ID NO: 90994 - DNA, 1053 bp, Homo sapiens
aggcaggagaatcccttgaacctgggagtcggagattgtagtgaggtgagatcatgccattgcactccagcctgggtgacagaatgagactccgtctcaaaaaaaaaaaaaaaaaaaaattctagtggcaaggcaaagtgtttggaggggatacagaggaatagatgaaacaaaatttgccagaagtaaataggtaagtgtctaaattggtgataggtacatggtgaatcattatattgttttatacttctctctcgctctctctctccccccgttctctccctgtcttcctctcccctctgtcttcatatatatatatatatatatacacacacacacacacagacacctaataagtttttttaaaaaacaaatacatctaaattacccataggtcaaagaagaaataataatggaaattagaaaatattttacttgaacaataatgataatgcatgacaaaatgttgagatgcaggtaaagccacacttaaaggcaatttatagccttaaaggcagttaatccatccatctcaaaagtttaggaaaagaatagaaaaaaaaaaaaaactcatggaaaacataaagagaaaagtagtaaagctcagagaagaaattaatcaatagaaaaccaataatagacccccaaagccaaacattgatctctttgaagactgatcacgtttgtcccaaaagttattcgttccaacagcattatagagtcactggtccctatttctcagagctggttttccctgctccttcccctgacttttctccccttcccttttgtagatgacattcagggtgagtctccggctccatgtgggacagaagagcccgcccgcacctgccccaatgggaccaaatgtcagccctactgggaagggcccaacaacgggatcactcagttcgacaacatcctgtttgcagtgctgactgttttccagtgcataaccatggaagggtggactgatctcctctacaatgtaagtgatgctgggacagtgtgtgtggacaatcagagtctcagggaggtggcctcctgggacca

SEQ ID NO: 90995 - DNA, 1083 bp, Homo sapiens
ccccaagtggatccgcagaggcagcccctgagccctccctccccactcctccccacggggagggaaaacccactggggaaggtttatttgcaatggttggaggtttgggtttttttgtgggttttggtttgttggttttttttttcctctttttctcttgctcctcctgtctctttctctcctgggcttgtgaagtttgctcaatatggaatgtcctaattatttctttccccgatgaagaaggtgttaattgaggcagagctatttctgctcctggcctcgtcacccaggcggaaatgcgagagagagagagagagagagagagaatgaatatggggcagggcctcttggaaaaatcagccgtgagcagagaaaccaggactcctggatcctaggtttctgtgaagttttattttatgtttttctaccctagactagctaaaggagaagaggccatggggttggcttgggtccgagtggggttttgaggggacagatgtgggtggtgccaccagaggggaggaagcctcgatttaggagaaagactgaaaagctagctcacgattaaaaatataagacgtgtgagtaagagacagatatatacagacacccaggcagtgggttaattttaaaatgtatttataaccgaattcctcagacactctggacgcttgtttttctagaagcaacgctcagagtgtttcgtgtcggtggttggggggttgagggggattgcaaagctgctaaagatagacccgttttcagtagcattcctcagtgtcgggagcccagttcctgtgtgcccagcaccgtgccaatcgcttagaaggaagcaaagataaagtggaaggcttcctgctttctaagagcttccaaaatagttagaggaaacaagacccctcatttgcagccatttttaacagtgaaggctaatgtgtgattatacccacgcccccctaaatatgaaaattcagtagctattgtatgcctgaaaggggccaggtgcagtggctcacacctgtaatcccagcactttgagaggctgaggtgggagtatcccttgaggccgttagtttgagacca

SEQ ID NO: 90996 - DNA, 1068 bp, Homo sapiens
cggatccacttgggggtcactgggtggagagggtgggtggaaatccactcccagacagaatcttcttctgtggctgcctttcccaaataaggggcctgaaacctctttctctgcccacctgggttcccctttgggcttcttgattccttctatccactccttcaattcacagctcccttgacccaaatcatcagaaccagaactgctattcagtctgtctgcacccagatggccagtggtccaaatactgaaatactgaaggcatcccttcctacttgattccatttcattctggagctttagagagcaagcagctagagtttggatggcaaagatttaactgaaaacgtatccaagggctatttggttcctgagtgtggatcgtggtggacacactgcttccacactgctggttcagagctgagccctgggagagtgtctctgcgctgcctggcttttccggggctcaccctacccccagacccagccactgaagggttaatgtgggcatagtcagggaggggcagaatgctgctgagtgctaggttctgattggttggtgccaggactcccaattggggtatctctggtacatcctgggggttgggggagaccaggaggactcatccagtactctcacccagcactcagggcagagaacaaaataaatccatgggttcctataataaatgagaactatcgtttagcatggcacctgtgcctggaatcttctctgtctctcaccttccacaaggtaccactcacaatgcattgaggcaataacccttttctggcccaactctccccacttcttgcttgctttagaagtcaggactggtcgaggtctgaaagcacccagaatacctgttccactcagccagatgtgccaggcattaattcccactctaggagcagtcctcaccaatgtcaaaaagaagccagtgtataaataccccagctcccttgccccttggctgggacggctctgaggtgtgtgttctttttttatttatatttttatttatttatttatttgagatggagtctcactctttcgccaggctggag

SEQ ID NO: 90997 - DNA, 1104 bp, Homo sapiens
gctggaatgtcatggactttgtggtggtgctaacggggtaagtggcgcgtgctatacgctttggatttaactagctgaaggattacgaggcttttggttggtgtggtccgggccaggctcaggaaggctgagcccttgtgttctccctccccttgttatgcgcctgcctcctttctgccaacaccccacctccatgtctcagctgtatattacagcagatgctttctgttacaattaaaataatagctcattattgttggctgcttccagagtgctttatgcccattctctaatttaatccttgcaacaacccactgaattaggaaatattaatattcccatctgaccactgaggaatcagaaactcagagtgtaacttgcttaaggccacccagcaagtaagtgatggaactgggagatgaacagaagattatgcattccagaactcaaggttttaagtgttgtacgtgcatgggtctcttgatttgcttgaggatatcttgcttttatttcaacttggtgaatgttttttgagaatgtctgggtgcaagggattgtgattatgacaaaggagaaaagcaagctaaataaggtacagttactgtcttcaaggagttttcagatccatatatgatgaactgtggttgaaatgtgtatatgctttcctctaagcaccctgtatgaggtagcacttgctggtataacaaaagatccaaagctaggaaatgacttaaacacggcagaagtttatttgtcactcatagaaaattcaaaattgagctgggtgtggtggtgcatgcctgtaatctcagcactttgggaggctgaggtgggaggatcacttgagctcaggagttcaagaccagcttgggcaacacagtgagaccacccccccatctgtaaaacataaaataaaataaaaattaaccaggcatggtggtacatgcctgggagaattgcttgagctcaggagttggagggcacagtgagctatgatcatccaaccgtgctccagcctgggcaacagagcaagaccccatctcgaaaaaaaaaagtccaaaataattgttcctagttgacaggctcatctcctccaatgactga

SEQ ID NO: 90998 - DNA, 1025 bp, Homo sapiens
gtagctgagattacaggcgtctgccactatgcccagctaatttttgtatttttagtagagacggggtttcaccatgttggccaggctggtctcgaactcctgacctctggtgatccacccgcctcggcctcccaaagtgctgggattacaggtgtgagccaccgcaccaggcccttccactggtgttttttgagcatctactatatagagaatgctctcctgggcacagaggatgaagcagtgaacaaagtagacaaaaaatccccacgtgcatagagtgtgcagtctcgtgggagagacagggaacaagataaagaaggaaaaaaatagcagatgcttgactggggacggggactaaagaaagaaaaaaataagcaggctaagggggttgatggatgtgacctttgagtaaaggcctaaaggaagtgagggagggagtcatgtggatgtctggggaaagactattccaggagaatgaacagcaggtacaaaggcccctgggtacaaatgtgcctggggagtttggggaataaaagggaggccggcgttgctgtagctgagtgactaagggagagaatagaggagatgaggggagggaggtaatgggagcaggtcatgcaccttgctggtgctggaaggactttgtttttgcttttgagtgagatgggatccatgggaaggctttgaatacttccacatgcattaggctgaaattttcttttctgcttttgtcgcattccaacattgcttttatttcatcaaaatcttcggtttcttctcaggctctttacccaagtgggagcagaaggctggtacccagggctgttcagttctccccctggggtcagaacgtggaggagaaagcttggaggagaaacaggaacccccacctctttctggatgactcaaaaccgcaattacctgagctcctcctcctatccctgaaatagaggcacttagcacttcctaaacttcccggtgcacacaaatcccctggcgatctttttaaatgcaggttctgactc

SEQ ID NO: 90999 - DNA, 1062 bp, Homo sapiens
ggtccctgttttgtctttgatctcatctctttcattgtctaccttcctttcattgtctattctgtctcagccctgctgaccattttactcacacccatgtcatttgcattacatgacattccttctgttcagcataagctatttcctctgcctgcatcactgtttctccaggtctccccatggctaactccttctcttcatttaggtctcagcccaaaagttacctcctccaagaggcctatccttttcatttactgaacatctcatgtacaaaaaagaatataaaatatatgtatactctctcatccacaaaaaaatctctgaagacattttaatgtatttcatcccatacctttttatgcatgtaaacttttaggaacacatttccatgccactaggtatccttgaaaaaataagggccaccatgtatagttgcacaggttgtgcactgcacaaagatagcatgtcacatatcttaagtatcatggagcttgtatgtctactatttcagtaccccagctgataaaagcttaagtatcttgttctagcaagatgaagctattatgacaatttttgacagagaaaggggtgttttgtttaagttcacaatcagagaaatgggtgtcttgtttaatttcacaaccagagaaaggggtgtcttgtttaaattcatacagtggtgctgtatgggttggtggcaaccccagaaaagactgttgttaatatctgataatgttccactttatacgtgtattatattcatgtaacaatctctggctgtttgttttgccattataaataacagtgcagtaaacatctttgtgtgtgaatctctgtccaaggttctgatagttttctgaatgaaattcctgtctatatatggcactccaagcccataattgaaactctgctgttaccactttctttgaatctgtagaaggaattttgagaacaggtgactggtatattcaggatgttgatgacaaggaacagagaaagaacagttaaatggtttggaatttttcctgggctgcatgtaaagcagtgcttttgaactgggag

SEQ ID NO: 91000 - DNA, 1102 bp, Homo sapiens
gatataagggtgtatggtagggtagctgtctatgtgtgggtctccctgatatttggtgttctgtttgacttgggaatgaccaagtctctccgcttaccaccttatttgtaccttttccagtatcaagtgaattttgcacacttttgtaaaaatcaataagattgtatgtttaggactttgggaggccgaggcaggcagatcacaaggtcaggagatagagaccatcctggctaacagggtgaagccccatctctactaaaaatacaaaaaattagccaggcgtggtggcgggcacctgtagtcccagctacctgggaggctgaggcaggagaatggcatgaacccgggaggtggagcttgcagtgagccaagatcatgccactgcactccagcttgggcgacagaacgagactccatctcaaaataaataaataaataaatattatatgcttaggttttacctatgtaattagaaagctccttgagggtaggggacagtgatttgccttcctcacatccccccaaagttcctgcactatatcatgcataagtatttaattgagtaatggtgaggaaagtaaacagtgttattgaacaaagattattaaaattctggaaacacctggttttgtttcagcactgggactgaaagtggaattccttggattttgctccattggtggataggatagcatgtggtggtggactggtagactctttctcttccaagcagattgggtaaatgccccagattcttacccactagtcagagattacagattactgattgatatggtttttctctgtgtccccacccaaatctcatctcaaattgtaatacccacatgtcatgggagggacctggtgaaggtgactggatcatgggggtgatttcccccatgctgttcttgtgatagtgagttctcatgagatctgatggttttaaacttgtgtgggcctctttcctctctctcctctcctgctgccatgtaagacgtgccttgctttccctttgccttctgccatgatttgtaagtttcctgaggcgtccccagccatgcagaactgtgagtcaattgaacctcttttctttataaattac

SEQ ID NO: 91001 - DNA, 1033 bp, Homo sapiens
tggacttatgtgggtggccatatttgggcttctctgatccactgctgagaatagtgtgtggcacacagtaggtgctgcataagtgttaatattctgctctttcttgccaagtctctcaactcccttgatctctgttatttttggcgtctgtgttgttaacccattcttctgaatgatcagctgaatcactgttgctccaatatataagccaaggagaacacaatcacaaggtctcattgattgtccatactagaattccatgattcctaggcccaagtaggattttccccacgtctcagcaatccttcttccatgtttctaatctttttctctcatttgttatgccccattgccagactctccaatctccccacagcttccccttcctctaactatactgtctctagtcttaccttctccctaagggcaccgtctttgaagacatcaaatacttcagagcaccaaatataggttagcttctctgagggccttacaaggacatggagtgtttgggtcttacacaaattggaatggtcagaaatgtttagagacttgagttgtctttgaaagagttgtcagaatgcaaatttttgacttgtggcctgtttctgatcacaacgcagtcttttaagttatggatcatagctggatgtttgtggtttagaggggatggaggcatcctctgcagttagtgttggatgtctgggtggatggatggatggatggatggatggatggatggatggatggatggttgaacagatgcatggatgagtggatggatggatggatgggatgaaggaaggaaggaaggatgggtgattggagggtaggtgggtggataagtagattggtagatgactcgatgggtgggtggacaaatggatgggtgaatggatgactggatggatgactggatggattggtgtatgagtgaatatatggctggatgaataaataggcagatgactagactggattgaggggtaaaaatatggatgactggatgggtggatgagtggatgatagatgg

SEQ ID NO: 91002 - DNA, 2006 bp, Homo sapiens
ggagaatcagcacccatgtggacatcttaggtaggtaaatgccttttaaatttttttttttttaatcaaagatccagaggaaaaaggtgaagcccacattttcttctgtggagatgctatcaaaatgcagatcttctgtgtttctttaaatccctgcctgcttgaaataaaccttgaggagggcttaacatctatcgagatgtaggcaggcaagggtgggtaattagtcgggctttctagcagttatctaagcatgacccagattccaggaggggggacacaccctgctgcccaggctggctggccactgtgccatgcccagatgtgccgcttctccgcacagttccaaccagctgccctctgtgtaaaaatgaacgggctggatgggtccctggggctcagcgatgagtcccctatcccttttgtatgtggttttgcagttatagactaaacggggctgggccctgtgtggtctccgggggttgctgtttgaggagcatggcgggtggtagagggactcacttcaggggggttcaaaatcgagcctggcgcttggatcctgggtgctgggattgcaacagagggcactgaggttttggagtgtgtgagtggtctactttgagggtggggaaaattaagaagttcagcagaggtgcttttgaggggagcatacctctaactacgatgccatctccgttggtgcccaaagcaggtgccaggtctttgcttcctaagtttcagactcttaaagaggctggttcttaaggttagcaattcctcaccatcccaggcccattgaagtgctcaggggtggcttgattactctgcctatcaacagagtgaggagtgggagtgccttgcaggaggacagggtattcatgggtgcacacccagttagctccaggagtgagagggctttgctcggctgacaggtttcctcattgaaaatggctttagatcgccttctggagcctggatttggagacttctaagaggaaaggaaggaggtggggagcccttctgctgtgtccttagcttacctctgtccagcctgaatcctgcagattggagggctgttgggggagagggggattgcagtggcccctcggaagggggaatcgtgggagagggaggcaggtgaattgcgagtgttgcttgccacttcatctattctctggccagctcgcccggggctttcttgctcttatgatgagtttgtgcattatgctctctgcagactgtttttgttctctttgacccgaggtaacaaacacattatacagccctactctggaagggaaaactccccacctcacaatctgtcatcgagctgggtcatccaggactgagctttctctgtcctggatggagcggagggcggtggcggggtgggtgggagggttggagatgagaggggatggacagagacctggggagggaggtagtgaataaaagaattcaggccagtgtaaagagaaagacacgtggaatgtcagagtcacgataccagggcagaacattctactttttaatctaaatatttctgccattaaaaaaaaatgtttcagcatatcctgagagtgaaaaaaaaagtgtgtaggtacttaaataaagtctaatatatgtacaggcaagtacatatattcagatgcatagatttttacaaaatgaacacacccacgtatccagcacccaggtcccgatcagtgccctggaagtccccctccccataccgcctcctagttgctcccccaacaagggtaccgctcacctgacttctaaggttcattttgcctcttttaaacatgtaaatggagtcacacagtacgttcttttgccactggcttcttttgctcacatctgtgtatgtgactctactacaatctatccattctactgttgatgggcatttgtgtcatttctgtttgtgccactgggaacattcttgtgtcttctattatttttttcccacagttctcttagataggagtggaatcgcccctgct

SEQ ID NO: 91003 - DNA, 1049 bp, Homo sapiens
ctacccgcaaccctccacaccagtcttattttagcaaaacctagagaaggaggaggtggagggatttggagggtggagaggcattgccgcatccaggggcagctattgagtggctaagcggagggcgcatacctctctctctctctcttttccccctgttgggaattttcaggatttcactgctgcaatttaaccccaagatgaggcaccattgagcgaaacgctgtgcgcacatacacactcacacttcctccgggagcagaagaggcagccgttggtgattcaggaagaaaaaaaatttttttttttttttttaaacctggaccctgcggtgtgaagactccttaggaaccctctggagcgtcttactccccttccctcctctttcccttccctttcatcttctttgtttttattttattttatttttggagctacagatctttcagcatttttaaggtctaggaactccagcaaaacagaagggcacttaattttttttttttttttttttgccctccccacccagacctgggtttcgtctttctttatttttaaatatatatatatttttttattttttattttttatttttttttaatgggccgagcgcactccttttgcaagatgccagcctgacccggacctcggaggaatttgaagcttccactgcgtcccggggggggcgtcctttgcaaaccgttcgcgtcttaaagggggtgtgcgttgggtggattttttttttttaactgtctctttttttttttttccggagtgggtggactggggattgcctggattccttcctcggttattttttgcctcgcttctctctcccctcccccctcctccccgggcccccgcgccccgcccccgcaccctcctcccgcccctccttctccggggtcagccaggaagatgtcccgagctgctatccccggctcggcccgggcagccgccttctgagcccccgacccgaggcgccgagccgccgccgcccgatgggctgggccgtggagcgtctccgcagtcgtagctccagccgccg

SEQ ID NO: 91004 - DNA, 1048 bp, Homo sapiens
ctcaccctcagtgtttgcatctgttccacggggctgctgtgaagactcagtgggagatttaccctggcaggagctccatcagtgagatgtcactctttcctgaaaaactctggggtcttcacagatctatgcaggtaatgctcctgctctaaaactgaataatcttctcagagaggtccatcagaacaaatgataagttcaactcagctcctctcatatgactggttcttcccatctgaacacatgggctcgcttcttgtttcatattagttgctgttcaccttttatatctgaaacaatgtcaagtacaaaaatcactgatatttggtgagcgccttaaaagcccctccttctccctgaatcccacacaattctatctccttgcaattccaatcactcttggtttaatcatttcatccatatcgtgacaagttagaaaatcttgaaagtgctatggggcaatgtataatagttggtgcattggcacagaacggggactttatataaagacatatcatctttccagagtgttccaaaagaactcgaatattgatatgtgtgtgtggggtggcgaggggggaagggaattaactaggatttaactagctaaggcttgaaagaatatttgcctttttcatccttttcccattcctctccatttggcctttctgcgtatacaagctccatgaaaattcaatggtttcttggtacattgaatttgcaagacagtttgatgacatcttataagcttgaagatatgaataccttgtggacccagacattccacacctaaggctattcctagagacatgcattcttatctgcaccaaaggtacctgaggcagtaatgtttaatagccccaactggaaaaaaaacagatacccatcaacaagatgatggataaacaaattgtggcatattctcttgatgaaatactatacagcagtgaaagtgaatgaatcacagccatgtgtgacaacaaacaggtgaatttttctaaaattcgaaacagattaggatgtatgaatcttgttttttttgtttgtt

SEQ ID NO: 91005 - DNA, 1022 bp, Homo sapiens
gcctgggtgacagagtgagaccctgtcttggaaaaaaaaaaaaaaaaagaaagaaaagcaggttgttttgtttagacatcacaattaaactgcaacctaacctttaaaaaagaacctacttagaaatcagagctctctttctcttcttcttctttttatttacttatttttttgagcaggagtcttgctctgttgtccaggctggagtgcagtggcatgatctcagctcactgcaacctccgcctcccaggttcaagtgattctcacctcagcctcccaagtagctaggattacagggacccactgtgattagctgccatgcctggctaatttttgtatttttagtagagatgaggctttagcatgttggccaggcttgtctcaaactcatgacctcaaatcatccacctgcctcggcctcccgaagtgctgggattataggcgtgagccactgcgcccggcctctttctttcttttcttaagggaggcaggctggccaattctagcctagttgatatttaaaaaaaataggtctggtcccagggagcttctttttcagtgcagctggctgacttttggtgcagagagacccttcttttgttctttgaattagcagctttggcagccatggaaggtctgggtagggccccccagagatggggctcccctatctcttttggtctatcagattctccatgctggtccttgaaacccaagcagcttatgaacaaatatcccccaccacccccactgccaaattatcctctctgttcaatgtgacttttccatctagaatttatctgtaccttgggtttccaatcctgggaacaactatgccttatttatttatttatttatttatttatttatttatttatttttgatacagagtctcactctgtcacccaggctggagtacggtggcgcgatctcagctcactgcaacctccgcttcccaggttcaagcgattctcctgcctcagcctcccgagtagctgggattacaggtgcacaccaccacg

SEQ ID NO: 91006 - DNA, 1058 bp, Homo sapiens
gcccgacccgttcattaatttttgttgtcgtataataaaaagaaggataattcttgataggtgaaagttgtatgccgttcaaaatttggtgtccataaagttttattggaacacagccttttctatttgtgctgatgttgtctgtggctccttttgtgttacaacggcagagctgtctctgggacagagactgtctagccctcagagccggaagcatttcatctgaggtcctttatcgaagaggtttttggacccctgagctggaacagcgcctgacacacactgtgctcaaaaagcagcctgcgcgggtctcccctgcgttcacccactgtcgcccgccgctgctaagactggccaccaggtggcgccatggctccccagcctggcaggcgccgggcagcagagcgctcagctcgctctccggagtacccacctccctgccgcttcctttctgcctgttccgagaaatggaagtcagccccaaatcaataattgaattcccatcatgtgataactaatcattacatatatggctattgctttttcatgcacaaagggcttggtaaagaccaactggggcggcaggggcggactcggggctttgcagggctccctgaggtctgatgggttacaagcaggtcctgaggtcaagtgtggggcttacctggcttcaatctggggtgtggttgagtgccccggccagggttcaaatcccaactctgccacttgctgactgattctggggaggagggttcctttccctttcggtgcctcagtttccctctctgtcaaatggggaaaacaatagcacccatctctggggctcttacaaagattaagttcactgcattattacatagaaagcatttagaacagtgcagccacatagtaagtacttggtaatagttttctgtttctgtagcgggtatgccattaagcattttgaggcctcagtttacacagttaaaaaaaaaaaaaagaggctgggcacggtggctcacgcctgtaatcccagcactttgggaggctgaggtgggaggatcgattgagccccggaa

SEQ ID NO: 91007 - DNA, 1067 bp, Homo sapiens
gagccaccagtttggggttcacactgctggttttgccccacgcttgtgccttacttgccagctcccttgcccactcttcagatcctcagcttgccgtctgcaaagcagagatgacctggggcagaggaggctgcccttctagaggctgggaccagaggctgtgggcacgccggatcccatgcagtttagggacctgggcaaccagtgcctcctggctgcagcagactgtttccccatccataaaatgggcatgagcagaggtttagaagccaaggtgcagaagtgaggatttttgtgtgtgtggaggccccggagagtgcaggacttaaaccccagccaccagacccacagtcaggtgcggttcgaggggatagttgctgatctagccccctgcgagctctagccaggaagagggtgactggtcaggccctctctcagccccaggtcacaatctgactgccccgtgcttctccctcagaacctagaagtcggaatccggaagaagatcgaacatgacgtggtgatgaaagccagcagcagcctgcccaagaagctggcactgctgaaggccccagccaagaagaaaggggcagctgccgccacctcctccaagacaccttcctgaggacgctggccccagtgcaggccaacatcccaccccctacctccatatgggaccttgcaagtcatcccacaggctgcactgtcaggaagaggaccctgtcccccagcactgggcttcacctagaacttcagtgggggccaagggtgctgagaacccagcaatgaccaggaagatacagtcactaacttcatctgtccccgtgccccttcccaggtcctgcctccacaggtttaacccagaacaataaacctggctttgtcatccctcttgcagtcctgtgttcgggtgagcaggccaggtgagcccacaagtctccatgagtgacgtggcctggcgtgctccaccccaccccaccgcctttagcaaccatgtgcccaggggacagctgggcttctacacctctggccctgagcctgagagccgggaaagagtcttttctcca

SEQ ID NO: 91008 - DNA, 2001 bp, Homo sapiens
gctgagtcacgctccagcgacgccttgccccagggtgctggagctggcgccaccctgggtgtggtcactgagctgtggccctgggcagagcagggctgggtggtctaggatgtggggcctcggtgcctggggaactgacttcgaagatgccaagccccctggcctcccgcctggcctaggttctggggtcaccctccaggactgtggtggcccacaccctgagaatgccttggagagcctagaggccctgagccttgggcctgggaatcggtgcgttgagggaggtggatagggcgcagacaccagtgactgcattcaaggccaggggacccccacagccaggccctcactgcaaaatgtacctatgtggggagaaggcaggggtggacctgatgacggggtgtaccactctactaagggttcccaacatgaaggtgagggggcccctgggaattctgtgattggtctgggaaagattaaagtctaagtgggggttagagtgtggactggcgggacgcaatgggggctgggatgtcactttcatggttcccctatttataacaagtgattcagccctcacttactcaccccttcctgagcctccccccaccccagccctgggtgggcagcggggcccacccacttgtcagtgccctgactttccctacccagtgccaccctctgagggctgcccatcggggcggttgttattgtcgctgcactgggattggggcagaggggcggggggctcctggtcaggcggcgcttggccgggcagcccaggttggcggctggctcgaggcccagcccacggagcttctgctgagagtctgggcccattaggcaaagcgttagtgacaggctgggagggcgggtggcgcggcgggcagggcggggcctgcagcccttggtattttccgatcccagctgctctgtgagggtggaaagtatttggggaccaggcttgggggcggaggtggtggtggcgcccccggcggaagctgcccctgattcattcttggagcatggggttgggggggtagcggtacacatacatacccttgtgtgtctggtccacgcacacgctgtctggagggggtattcaggcatacccacatgcattggctggccggggtgtcctgatgcagcctggggcctgctttgctccccagcccaggggcccgccctctccctcatgcctccagctgctaggagcttggtttccccctggacaccatctcccaagagcctgagaagtgcaccatgattggtaaaggggaccctgtctcctgggcacctgcatggcagcaccccttccactcaagacccagaccttttgtgcctgcggggatggggagtggccttggccccggccctgggctctgtgcaggggaaaccccacaggaaacgagcctggccaaatggccgcccttcccgttctcgtccctgggacacgaatgtgctgtctcacttccggaggcggcccagggaggctggccgccctgcggggcctcgcctgctcccagttggcgcctccagaccctaaggggacagggctgggctggggcctgatgggaaagagtggctggtatgtgtgtatgtgtgtatagggaggggacaaaacaggacatcactcgccgcctgtctcgaagtggtgagcgccaccacatcgggcggacactggggtcctggtgtgagacacccacgtttccgttatcctttgccttggcaaagacagcagcagctctgtcgtgatcatgtttatcactcatggggtcctcaccatgacttatgaagtccatacttattatccctgttttgcagatggggaagctgaggcccagagaggttgagtgacttgcccagagtcacccagctcagaagctgcagagctggggctttcaaatctgggcagacttgggctccaaaactggagtctgctagccaggtgttgggctcttatcaaaagaagctccactcactaaagacttagggctggct

SEQ ID NO: 91009 - DNA, 1031 bp, Homo sapiens
cttcactgccacacccagtgtgtggacagagaactgcctacctccctgggcgtgactgtgatgccctcagcccaggctcaggtgtgccaacggctagggaggtcgctctttccctggggggcagggctgaagcaaggctgccatctgcccagacaggagaatgaacgccaacggctggcaccggctctggagccagaggaggccacatccgggcagccggtggggcgggcagatccctgaaggaggcaaagcccttacacgttctggcagaaaaacaaaatgacttatgtatgtttggaaaagaatcatatcaggacccccagaggaccctaaggagatgggcaaaggctcttttgcagcttgggagtgaagccccctccccaggcccaggtataaagccatccccaggcccagcttctctccatctgtgtctacccgcctcaatacatcccctgggaccccacggccagggtcaggcactgaagcagaagctgccaggggctggcactcctggggactccagttcaatgtggggggcccggctgagaaagcagctgtgtgtcaccatccctagatatgtcgacaaccaccaaaaggcaggtctacactttctggaaaaccaccgactccacacccagtagagctgcaactcggactcctatagtcgttggctgtgtaaatggtaagccctgagccccagctccccctctgccactgcaccgagtgaggagggggcttgtggaggttgggtgcctgccctgggcaggtatgtctgtcactcagggcagctctcacctgctcaggtggggcttcgaagtcagaggcgtccagggcatcctgtatctggctgtccagcaggaagtcgagttccacagctaaagagtctgcccaggtgccctggtctgcagaatgaggcaggtggtctcgctgccctgccagctctgaggtggtgtctggaatgccctgctgagccccgggctcctggagagggtcgtctgctatttctctgtgttccagcacaacagaggctt

SEQ ID NO: 91010 - DNA, 1050 bp, Homo sapiens
ggagccccccaggagggaggggcccaaaggacagcaggggctggcctgcctggagggccccaggaggagggagacggtgtcccctgtaccccagcatcagctcctacctcaggccctgctccaggactgggccctgcctcttggtgcctggaacccgggtctgtggcccagggctcccctgacccccagcagacccccagcaggatgggtagggaaggggaagggactcatagcagcctgggatgctcctccctcgggatggttgtcatcgcagacctgagcacagaccccactgagctggaagagagggctctggaggtggctgggcccgatgggcaggccagtgccatatcacctgcctctcccaggaggaaggccgctgatggaggccacaggagggccttgccaggctgcacctcgctcactggggaaaccacaggagaaagtggggaggcagggcaggatggcaagccccccggcgatgtcctagtgggccctacagcctccctggctctggcacctgggagcggagagtccatgatgggtgctggagattccggtcatgcatccccggacacaggtccatgtgtcaatcagaagcaggagccaggtcctgctcaagaggaagccgagttaggtggccagaacctcgaacgagacctcgaggggttccgtgtgtccccgcaagcctctgttgtgctggaacacagagaaatagcagacgaccctctccaggagcccggggctcagcagggcattccagacaccacctcagagctggcagggcagcgagaccacctgcctcattctgcagaccagggcacctgggcagactctttagctgtggaactcgacttcctgctggacagccagatacaggatgccctggacgcctctgacttcgaagccccacctgagcaggtgagagctgccctgagtgacagacatacctgcccagggcaggcacccaacctccacaagccccctcctcactcggtgcagtggcagagggggagctggggctcagggcttaccatttacacagccaac

SEQ ID NO: 91011 - DNA, 1095 bp, Homo sapiens
ttcttaccagcatgaattaaatcctttttgtctttttcttttttttgagacagagtcttgctctgttgcccaggctagagtgcagtggcaccatcttggctcactgcaacatcggactcccaggttcaaacgattctcctgcctcagtctcccgagtaggtgggactacaggcatgtgccacaacacctggctaatttttgtatttttagtagagacggggtttcaccatgttggtcaggctggtcttgaactcctgaccttgtgatctgcccgcctcggcctcccaaagtgctgagattacaggtgtgagccaccgcacccggccaatccttgcttccttttaaggaggttaaggcagtcgtgttagccagatctgcaataaacaagcccacattcttcccacaagcagaagcagaaatcaacaagtgtccatttgaatgaacgtacctgaggtccgcagcttcttcctcttagtcattttatcttccccttgagaaatctgaaaacaagcaaaatctctcatcattataagcagtctctgtctctgtttatatccagtggctttggctgagagcagaggttacccctacctccacctcagcccatttggctgccccaggggtcagatggctcccactgggacacaggatgggacacagagtcacagccactttgggccatggccaggtaggaattcaaacctcctccaaactgaagatcttatgcccaggacctgaaagacaaatgggccctggggggtccttatagatagccccggggacccagactctggtccctaggatgaaacagcctgtgtgaagcccctccctccagactggggtatctgggggcccttccaaggacacttgaggactctccaggggcctctggagaccagcctggccaatatggtgaaaccccctctctattaaaaacacaaaaattagcctgggcatcgtgacgcacacctgtaatcccagctacttgggaggctgagacagtagaattccttgaacccatgaggcagaggttgcagtgagccgagatcgctctactgcactccagcctgggcgacagagcgagactccgtctca

SEQ ID NO: 91012 - DNA, 1050 bp, Homo sapiens
gacagggtttcaccatgttggccaggctggtcttgaacgcctgacttcaagtgatccttctgcctcggcctcccaaagtgctgggattataggcgtgagtcactgtgcccggtctgcagagctgggttttgaattcaggtagccaggccccagacctgaggctgaataaggaagagatgaaatggggaagtcagcgagaagtgggatcacctagcgtgtccaggatgggaaatgggggctcttggtgtacgaccctggtccacctggggcatccccctaccgccaggtcccttgccgatggaggccattgagaagatggccagcctgtgcatgagagacccggatgaggatgaggaggaggggacggatgaggacgacttggaggctgatgatgacctgctggtgagcactgagggcggggtgggggctctgatccggttgcccccatccagcaggcccttatatcctgccctggctgtgtgtccctgcaggcggagctaaatgaggtccttggagaggagcagaaggcttcagagaccccacctcctgtggcccaggtacagtttggatgactccactcccttgaaccacaacccaacggacagcccggggttcaagacctagccttttttatgagatggagtcttgctgtgtcacccaggctggagtgcagtggtgccatctcagctcactacaacctctgcctcccaggttcaagggatcctcccacctcagcctccccagtagctgggattacaggtgtgtgccaccacgcctggctaatttttgtattttttggtagagatggtgtttctctgtgttggccaggctggtcctgacctcaagtgatccacctgccttggcctcccaaagtgttgggattacaggcgtgagccaccgcgcctggcccacccttatccttcacagccatgtgacccatatcaggtgggtgacatgatgcttctgaaaccccattccctccactgggaaatggggaccatgatttctgcctcactggggcaggggaggctggtccagggatgacatggg

SEQ ID NO: 91013 - DNA, 1089 bp, Homo sapiens
ttttgttttgttttgttttgagacggagtctcgccctgtcatccaggctggaatgcagtggcacgacctcagctcactgcaacctctacctcccaggctcaagcgattctcctgccttagcctcccgagtagctggaactacaggcacacgccaccatgcccggctaatttttatatttttagtagagatggggtttcactatgttggccaggctgggcttgaactcctgacctcaggcaatccacctgcctcgacctcccaaagtgctgggattacaggcatgagccactgtgcccggcctgccccttctctttcacccaccccctcgctcactcttccccttgctgtctggtagcctcaaacaccaggcactctgcaacctcagggcctttgcacatgcagttcccactgcctgaatgcttttcccacagacacctgtgtggttcactttctcccatcattaggtctctgctcagacatcacatctccaggaggcctaccctgagctgtctaaaatccctccctgtcacccagatccctctgctcctcctcccagctctgcctctccctgtggcatgtatcaccttctactctctcatatgatttacttatttcttctgattattgcccatctcccccaagagaatgtcagccccacgagggcagggattttgttctctcttcttcatccttgtgtccccagccccaaagcagagcctagcgcacagtaggggctccatacatgatttctcaaactcttgagctcaagcaatccacccgccttagcctcccaaagttctgggattatagacatgagccactgcacccggcaccatacatgatttctggggtgactgaaggatgcccttgttaaatgggacaatggaaggatcaagaagaaagaacagaggccgggcatggtctttcatgcctgtaatcctagcaattaaggaggccaaggccagcggatcacttgaggtcaggagttcgagaccagtctggccaacatggtgaaaccctgtctctactaaaaatacaaaaattagccaggtgtggtggcaggcgcctgtaattccagctactcagga

SEQ ID NO: 91014 - DNA, 1050 bp, Homo sapiens
atatgtatatatacacacacacacacacacacacatatatattaagtgaaaagaaggtcccccagcagctggggtactggctggcacatagtaggtgctcaagaaacattgggaaatgaaggaaagatctcccagcagctagggcactggctgatgcttagtaggactcaacaactgttaagtgaagggaatatcacccagcagctagggtacctagcacacagtagataccaaataaatatacacagactgaagaaaagactcgaaagtgatccattgccaacctgaacagagaactctagtctgtctgattctaaaatgagcccaggagctgagacacccccgaaggccagggtggggtttgttccctgcccccactgggggaagagaaggcaggcgggcagtgggactgaggtgcctctgtttccctgcccacctgcctgcccacctgcccacccggaaggatcttccctgacctcagcagcaacgacatgctcctcttcatcgtgaagggcatcaacttgcccacacccccaggtgagggggctgtaggcaagggtcagggtcatggggaccccctctctgcccagctctgaccgttgtttgcccacaggactgtcccctggcgatctggatgtctttgttcggtttgacttcccctatcccaacgtggtacgtggggagctgaggaggggagggctgcagcctcagtgggccaaagccaggtcccaggccccctagatttcctgcctcctctctggtcataggaagaagctcagaaagacaagaccagtgtgatcaagaacacagactcccctggtgagcctcggctggaagcaccctacccctactcccttgcagcagaagggacataagacaatggcctgaccccacccaacttcctctccctccttcctcctgcagagttcaaggagcagttcaaactctgcatcaaccgcagccaccgtggcttccgaagggccatccagaccaagggcatcaagttcgaagtggttcacaaggggtgagctagagagagccatggccgct

SEQ ID NO: 91015 - DNA, 1096 bp, Homo sapiens
gcagggattacaggcgtgagccactgtgcccagcccagtgtgtcttttgaattaacagggttgggctgggggaatctctgcagtcccttatccttcctccaccccttagatcagcccggcccctgcatagcctcagtgtgctggcgtttgaccaagagcgtctggagcggaaggtgggtatccatcctgccgggctacatggggcaggactggggagtctgcaggcccaggcaggatcctcacaggaccctctgtatcctctagatcctggccctcaggcaggcgcggcggccggtgcccccagaagtggcccagcagtaccaggacatcatgcaacgcagccagtggcagagggcacagctggagcaggggggtgtgggcatccgacggggtaggggtttggagatgggcatctggtgggggaggagctccaggataggcatggggggggaggtgctcagggatgcatatctggtgggggaggggctcggggatgggcatctggagagggaggggctcggggatgggcacctggagggggaggggctcggggatgggcacctggagggggaggggctcggggatgggcatctggagagggaggggctcggggatgggcacctggagggggaggggctcggggatgggcacctggagggggaggggctcggggatgggcacctggagggggaggggctcggggatgggcacctggcgggggacgggcttggggatgggcacagtccaggagggttgtgggcagtgaggccccaccctaagcctccattcccccgccatccattctcagaatacgcagcccagctggagcggcagctgcagttctacacggaggctgcccggcgcctgggcaacgatggcagcagggtgagctggtcgcgggccgggtgggcactgggcagcgggcagggtggggcctgcagggactacctgctgaatgcccatcccccacaggatgctgcaaaggaggcgctctataggcggaatctggtagagagtgaggtaagcagcttaggagatggggtggttgggggatcactgtggtcgtagcccacctccatgaccccagtggcctcct

SEQ ID NO: 91016 - DNA, 1003 bp, Homo sapiens
agtgggtcaggactgaattttgaggtcttgaggcacacactggggtcaccaaacagcaccctgtgcgacctagccacgtgtgattgcagggacgcccaaggccacccactgaaaaaacactgggtgacagatatagggaccctcacatgtatccccccccacagcaagcatgggaatgaaatgcatccttcaagctgggtgtgtggtggtgcccttctgtaatccgttaggaggctgaggcaggaggatcatgtgagcccaggagtcggaggctgcaatgagctgattgtgccactgcgctgcagcctgggtgacagagggaaacccggtctctaaaaaaaaaaaaaaaaagcacctttcacaagcacactgtccctccccaaaactgcttccctaacaggcgcctccccatccacttccaggggaaccggggggtgggtgggaagacctagcctggccaccgagggtctgagcaagaaacagacaggacagagctgggctgagtgtggccctggctattttattccatgtgctggccctggggacccagctgggccaggtcgacgcccctggggagacagtgtggctcggccagcctcagtggcttctttggggtgcaggagggctttggggttaaggctggggaggaacaggaagtaaagtgcttgcaggggccctcggggcttggccccagccaccctccctgctccggggcgggccagaggccggacacccctgggctgtgcaaacaggactctccagggcccagccaggcctgggtgaggggcacatactggctggcaggcatggttcccaacacccgcagccacggaggctctggcggggctgggggcccggatgaggggtgagtccagaaccgattgtccgctgattgtctgcttgtctggttcgtggctgtgtcggctcttcccggtatcggggcctgctgcccgctttctgggggctgcccgccccatgggctcctcacctgcggagccgctgc

SEQ ID NO: 91017 - DNA, 1022 bp, Homo sapiens
cggcccaggtgcaggatagccagggtccggggcaggccggcgggcactgtggtcagctggttgtgggagagatccaggtattcaaggctatgcagcttgctggaaggagagagggtcggtgttaggtggggcacttggagtggggtgcctgacagattttggcggggaggctggggagtggtcctgagacagatttaagctggagattttgacttgggagtgatgcgtggagagagctgggtgggaggtaaacttggggtgcccagggcagattccagcctgagagttagctatgggggtgaccagggtagagccgagatggaaaggcatgtgagacttacgatgtcagtgcagggctgtggggaacagggacacctacccagtgctctgccgagcccagtgagcagcaggcactcagtaaatgaggccgtggcttaggagccagtcagggaagggggactgaaggttgggacccccgactgtaaattctcagcccctgctgccccccaaccagcctgtacctgaaggtggtggcatccaggccactgtctgtcagctggttgtgctggaggtagagctcacggagttgagtctggcggctcagggctcctcggggcaccttggagatgagattgttctggagaaggaagaagagaatgagacttgagtctgggatgagggcagcgggaagccacagacggctcttgagtaagggagtgacgaggagcttgccttgagctcaaagcgatttccaataaagtgattcaaagaaggataactctgaccactggcattctgaggggcaattgagaagaatggaaagctaggaactggaggggtccccctggaaagaggtgaagagagtctggcccggggtgggacctacagcagggctacctgcaggtggagccgctcgagtgagggcggcaggctgggcggcaggtagctgagctggttgttggagaggctgagggtggcgatggcctcggagccgcggaaggcgtcggggggcaggccagcgt

SEQ ID NO: 91018 - DNA, 1071 bp, Homo sapiens
aggcggctgtggccatttgcggggggaggagggggcgggtgtctggagcaagaccagccagcagaggggaggtgggtgccgggcagcagacctggtcaggagctcccaggctggcatctgggctgccaggctaagctcaggcctccctaatccctcgctgctgcccgcccctgcttctcggaactctcctgtgccccgaagctccccccatccctccatccccacccctactcctgcggtcgtcccaaataccagacaggacgaatctcagcttttccccaaacattccttgttcttgtggcccggcccaggctggctgaggttacgaaagcagagatggggtggttgttgggggggaccaaggggacgggctggcctgtcctcaccaccccatccggccgcctgcccgtcctccccagggcggggaagggggtgggccagctcccccaaagccccgggagaacaggctgttgtggggggtggcatgggtctggagatggggggcggtggtggccacagcagaggctccaggaggtgaccgcctggtttccattaggaagtcctggtcagcagcttgggcgagatggcagagtcagggctggccatggtaaggtggggcacgggagggtctgagggtggggcctgcctgcccccccacccctgctctgccaactggccactgcctccccaccaagaccctccccgaggaggggatgctccagtcaccatggcgaccctgcgcccagcctggagacacgctgaccctccctcccccgcagtggccgagcctgctgctgctcctgctgttgccggggcccccgcccgtcgccggcttggaagacgctgccttcccccacctgggggagagcttgcagcccctgccccgggcctgtcccctgcgctgctcctgcccccgagtcgacactgtggactgtgatggcttggaccttcgagtgttcccggacaacatcaccagagccgctcagcacctctccctgcaggtggggcccacggaggggagtgggggcatgcagggctgagacccagtggtgaggggagctggaggggtgc

SEQ ID NO: 91019 - DNA, 1035 bp, Homo sapiens
ttttccttttttgtaaatctctttcctcggcctggctctgccgcccaagtatgctcgtcaggcctttgcccacctggaccgggcgcgggcagcccggggctgaggattctcgagccttggtggaccacaggctcccgtcgccccgcccaagggcctggaccgcctgtggtctccatggaaacccgccagccacagggggcgtgacgccgttgagacagacagagatattcacctatcagatcaaagttatctgggcagggcgaacaaacgggacctccgagtggtacgtccttaaggcggggcgggaatacggcaacgggccgcgggggctgttactgtcgctaccaatcaagagtcgagatggctttgatggacaggcatagcgcgagtgcgggctttcgcccaaccggcgggccgctgtcccgaaaaaggaccaatgaggaggcggcaggggtggggcgaaggggccggttgctccggaagtggagggagggggtgaaaatggcgcccagctcgaaatcggagcggaacagcggggctgggagcggcggcggcggccccgggggagccggagggaagcgggcagcagggcggcggcgggagcacgtcctcaagcagctggagcgggtcaaggtgaggcctggagccggagtggggagcgcgccggagggtggggagtagggacgagggaggcggagggaggagggcgttcgcggggtgaggggttgggggcggggccccaggggagggggctcggatgcagggcctgggcggggcccgggggagatggcttggatggagggggctcagttgggggcctggatgcaggtggttgtgtcgggtgaccggcaaaggggctgggatggagggggttgggggcggggccccagggagggggctcggagggaggcgaccccagaggccgcagggagaatcaggaggaagggggcgatccaggcttttcaaagctctgctcccatggttgctccataatggaaccttcccgccccctttgcagagcccctgccgctggct

SEQ ID NO: 91020 - DNA, 1400 bp, Homo sapiens
tgtctcctccatcagactggaaactcccagagctgggggatgatgtctctctcccccatcagtttgggagctctggagggcagaaatgtggatctcttgcaggtgggcagtaactggggcaaggctgtgtctctgtggacagggactgcgccttctccgtgaggctggtagctttgtaagggcagtgctgtgtctcccccttttgactgggagctccctgggctgggacagtctccgcccttagcctgggagctccctgggcttggctgtggttccgcccttagcttggaagctccttgggcagggactgtgtctcccctgtcggcctgggcctggctggccaggctgtttcctccgtcagactgagacctccatgtggacagggctgtctcccatcagacagggagcttcccagacaggactcttcccatcagattggaatgtcttgaaggcagagttgggtagcaagactgaggctgttcggatatccctgtgcctggcttctgcctgtcagtccccgcagatccttccgcggtgaagttttggggatgagggattcccttggattccgttggaaggcggtagttaattgggaagggggcgttgggtcattggttaggctcacccttctatctgcctcgactggcccccagcagaggccagagctgccccggggaggaggagcccccttgtttgaaggctggtgggttgggaacagatgggtgcaggtcaggactctgtcccagcctccttagtaggataaatacccacagcttagggacagccttcagggagggaagcaggtggcccagcgtgggacagggtgattggggaactttcttgggggcggtgacgctgggctcagtcaagagggacctgaggctgaagaggtatggaactgggaaggtggcctgggtccctggtggagatgaaggctcaagcgcggtccatctggctttactgtccccatctgcctcagttgttcccaccttccagagcttggccttcttttgaccattatggtgggctgggccggtctggacccggtgagagccgctctgcctctctgccgtgggtgagggggctgggggctgcagatggtgcctgaagtgccctggccaccccttccccagatcagcggacagctctcccctcgcctcttccggaagctgcctccccgggtgtgcgtgtccctcaagaacattgtggatgaggacttcctctatgcagggtgaggctgggcccaggcaaagggggcaggtgggcgggagtggtgggctcgccctgacctggccgctgtgccccctccacccccacagacatatcttcctgggcttttccaaatgcggccgctacgtcctctcctacaccagcagcagtggggatgacgacttctcctt

SEQ ID NO: 91021 - DNA, 1002 bp, Homo sapiens
aggctggactgagacagaggcttgattttagctggtcaggggacaatggccacagtttggactgggaagggggcaggggtctctgtgtggccagcctaggtagagtagggacccagttgtggcagtggagtgtgtaggccaggcaaacgcatggttagggctggggagaggtcaggggtcaggatgggggggtccccacttgaccaggcaggggcacagcttccttaggggccagggtcatgataggctggtcaaagggcagggttggataggtggtgtcgggagactgtgcctgagcccacagtgcctctgtgacttgtagatgaatgaatgaatgtgtgaggctcgaaagacaggtgcccagccagacactagttgagtggatggcaggactggggcattggtcctggtgcccacggctgcccagccctcaaactagcaaaggctactgatttcacttttgctacacccccacttgcagcagctgctggaaaggccagccaggacatctcggctgccccgaagaaccccaggggttccttgccagctgggtcgccccctgtaaaaggcctggggtgacttggtcagggccagccactcgctggaccccatggcctcatccagctcgcctgccagactgtcttcatcagcatctgcatccgggaaggtatctcctgcaaaagatgaacagagttagtgatcagggctcagctgctgctgcacccacagtcatggctcctggccagtctagctctgatcttgtgacaacagtcatagacatagttcagagtttttattccacccagtcctgggttcaaattctggctctgccagagtaggtgggattacaggtgtctgccagcaggcctggctgatttttgtattgttatagagatggggttcaccatgttgttcaggctggtcgcaaactcctgacctcaagtgatgtgcccacctcagccacccaaagtgctgggattacaggcgtgagccaccgcaccc

SEQ ID NO: 91022 - DNA, 1055 bp, Homo sapiens
tgaaaccccgtctctactaaaaatacaaaaattagccgggcgtgatggcaggcgcctgtaatcccagctactcaggaggctgaggcaggaacatcgcttgaacccgggaggtgaaggttgcagtgagccgagatcacgccacttcactccagtctgggtaacagaatgaagactccgtctcaaaaaacaaacaaacaaacaaacaaaaaatgcttcactgaccggtggtttatcaggtgacctcagggagacacatatatgtgcgtgattaatgggagacattaacccctttttcccttcatctctcaggccccagggccctgtgtgcaggtgagctacaaagtctggttctgggttggaggtcgtgagctgagtccagaaggaattacctgctgctgctccctaattcccagtggggcggagtgggccagggtgtccgctgtcaacgccacaagctgggagcctctcaccaacctctctttggtctgcttgggtaagagactgtgaccttcctcagctcggtgccctggaggggtgggaagtgacttcctgagtgggcagctgagacttctctccaccctccagattcagcctctgccccccgtagcgtggcagtcagcagcatcgctgggagcacggagctactggtgacctggcaaccggggcctggggaaccactggagcatgtagtggactgggctcgagatggggaccccctggagaaactcaactgggtccggcttccccctgggaacctcagtgctctgttaccaggtgaggccctgggacacctgggtctccatccccgctgttagagcagacggatgggtggacttgtaagagggagtgctatgattaaagtagcgtgatggccgggcttggtggctcatgcctgtaatctcagcactttgggaggccgaaaggggcggatcacctgaggtcaggagttggacaccagcctggccaacatagtgaaaccccgtctctactaaaaatacaaaaattagtggggcgtggtggcacatgcctgtagtcccagctactcgggaggctga

SEQ ID NO: 91023 - DNA, 1047 bp, Homo sapiens
aggtgctcttgtcagaaaaagctcccagaagccgggcgcggtggctcatacctgtaatcctggcactttgggaggctgaggcgggcagatcatgaggtcaggagttcgagaccagcctggccaacatggtgaaaccccgtctctactaaaactacaaaaaaattagctgggcgtggtggcacacgcctataatcccagctactccagaggctgaagcaggagaatcgcttgaactcaggaggcggaggttgcagtgagccaagatcacaccactgcactccagcctgggcaacagagtgagacttcgtctcaaaaaagaaaaagagccctttcatcaatcttcccgcgtccgccgattcctcctccttggtcgccgcgtccttggctggcgtcagaaaaatggctacaaacttcctagcacatgagaagatctggtttgacaagttcaaatatgacgacgcagaaaggagattctatcagcagatgaacaggcctgtggcaggtgcctcccgccaggagaacggcgccagcgtgatcctccatgacattgtgagagccagagagaacatccagaaatccctggctggaagctcaggccccggggcctccagtggccccagcggagaccacagcgagctcgttgtccggatcgccagtctggaagtggagaaccagagcctgcgtggcgtggtacaggagctgcagcaggccatctccaagctggaggcccagctgaacgtgctggagaagagctcgcctggccaccgggccacggccccgcagacccagcacgtgtctcctatgcgccaagtggagtccccggccaagaagccagcctcaccagcagaggatgacgaggatgatgacatcgacctgtttggcagcgacaatgaggaggaggacaaggaggcggcacagctgcgggaggagcggctacggcagtacgcggagaaggccaagaagcctgcattagtggccaagtcctccatcctgctggatgtcaagccttgggacgatgagacggacatggcccagctggaggcctgt

SEQ ID NO: 91024 - DNA, 1001 bp, Homo sapiens
tatacctgtgccgggttgaggggttggagacacgtttagagacccctccactctaggaatccacctcgagagataaaggtcccggccctagccacacccccaggacacggccagaggccacctccctaggcgggtccctccccaccgccaggttcctggagcgcgtgcggcgcgtgtgcaggggtagggggccgcaggcgcgcggactggagaggcgcgcccctcccgcgtgttgaaattcaaaagaggcgaacggcccccggcgcggcggcgcggctccggtggagaggtcaaggcaggggccagtcggaggctcccggggcggggtcgaacccgcggccaacctgagcagcagcggaagcttaaagagctcaggttcccgccccccggccctaccatggctacagagcagtggttcgaggggtcgctccccctggaccctggagaaacaccgcctccagacgccttggaacctgggacgccgccctgcggagacccctccaggtcgacgccccctggcaggcctgggaacccatctgagccggatcctgaagatgccgaggggcggctggctgaggcccgggcctccacgtcttcccccaaacctctggtcccccggcctgggccagcacctccccgcctatccctggacactttgttcagccccatcacccaacagctgcgctacctactgaagaaggcagatgatttccagagctacttgctctacaggtgatgctggacagggtcccaggtccccatgggtaaggagacttggaggggaggcgacaggatgggtgacacacaccagggtcgcaaaattacaagcgctaggagccagagggagacagtggaagaagctagcatattagaatccagtttaagagaatgaggaagactgtagaattgcgggtaggggatggctgctattactgtcgtggcagtgtgggcctggggttgtcaagtctctaggactttttctcccagtttttaagtgctgt

SEQ ID NO: 91025 - DNA, 1032 bp, Homo sapiens
ggctgagcgcccagcctcacccctgccccagcccattccggcccccatctcacccaagatcccccagagtccaggagctggacggggacaccctcagccctcataacagattccaaggagagggcaccctcttgtccttatctttgccccttgtgtctgtctcacacacatctgctcctcagcacgtcggtgtggggaggggattgctccttaaaccccaggtggctgaccctccccacccagtccaggacattttaggaaaaaaaaaatgaaatgtggggggcttctcatctccccaagatcctcttccgttcagccagatgtttcctgtataaatgtttggatctgcctgtttattttggtgggtggtctttcctccctcccctaccacccatgccccccttctcagtctgcccctggcctccagcccctaggggactagctgggttggggttcctcgggccttttctctcctccctcttttctttctgttgattgtcgctccagctggctgtattgctttttaatattgcaccgaaggttttttaaataaaattttaaaaaaagaaaaagggaaaaaaaagccacggagtccattttatgaatggggtggggagagggcactaaagagcctcctaagagagcctcaggttaggacagaattgtttggggagggagaaaaacagaaacaatgaattatagctgcctcacagccatgtataacaataattgctccaggaaggtgggaatatttgcttttttttcttctgtaatctcaccgtgtccgtgtccagaacagagctaggcacacagcaggtgctcaatttttgtttttcgtttagacaggtttcattctttcacccaggctggagtgcagtggtgctatcatagctcattgtagcctcaaactcctgggctgaagtgatcctcccacctcagcctcctgagtagctgggactacaggtgcactctgccatgccgggctaacttttaaaaatttttgtccgggcacagtggctcatgcctgtaatc

SEQ ID NO: 91026 - DNA, 1241 bp, Homo sapiens
gggacaggcccggacgggcgccgccggccgccagcgcccgcccgtctcgcagcaaggtgagcgcgccggggagcgggggcgccgcgcggtgggcaggtgcgggcgaagttggtggcgggggcgcgagtcccgggaggaactgggtggcgggtggctggggctttgcgcgcgtttcctgcgggctcggtgcgtggtgaccttggcaagtgattgaatctcccggagcctcagtttcctccgctgtaaacgcggtttaataacagtagcgaccccttggggttgttgagcgagtttagtaagatttggttgtcgagggctttagttaacacagagcctggcacggagtgaatgcgtaaaagttagtccgtattgttcttaaaggtggaatcggttcctcctccccaccgcccggacgccacagtcagggtctgggattagaacagctactaattttgcatgcttctctcctcggctccagagaggtggagaagagcgagtacttgagaaagaagaggaagaagatgatgatgaagatgaagatgaagaagatgatgtgtcagagggctctgaagtgcccgagagtgaccgtcctgcaggtgcccagcaccaccagcttaacggcgagcggggacctcagagtgccaaggagagggtcaaggagtggaccccctgcggaccgcaccagggccaggatgaagggcgggggccagccccgggcagcggcacccgccaggtgttctccatggcagccatgaacaaggaagggggaacaggtaaggatccctctgggtggggaagagtgctaggtggagaggaactcagcccgaagacaaagccaaagacaggtgtttttttccttcccagcttctgttgccaccgggccagactccccgtcccccgtgcctttgcccccaggcaaaccagccctacctggggccgacgggaccccctttggctgtccgtaagttggggtattggagacatgggggtgctgctcaggtgtgtggtacagccagagagacatccgtgttcactggtgtctgtttgttttgatgcagtcccgggcgcaaagagaagccatctgatcccgtcgagtggaccgtgatggatgtcgtcgaatattttactgaggctggattcccggagcaggcgacagctttccaagagcaggtgagtttccagcccaggactacacactgacagacacagagggcctccctgggatgtgccctgatcccggc

SEQ ID NO: 91027 - DNA, 1006 bp, Homo sapiens
gtcagtgcctgtcaaggctccagtcctgctgagccaaaggctttgtcattcctttctcttcctgtacatctgagcagacccactccagctttctggtgtcacaggcgggaatgttagttagtaggtagacttagatcccatttctgtcctgctcccaggaagattcttaggtcctcttcaatccagcagcccctcccagaggtgtgatcagcaggatgctgaggaaccatgttgcctttcctgtcaatcacagccaccttcctgttatctcctaaatggatctggcttttcctggaggctgccatggttggaagatggtatcagagggcctgcctgggcagtctgtctccgggccagggtcagggaccctctgcctctggcagccttaacctgtcctctgctaggaccagggtgatttcaagccagggaagcaactgggaccctgaaaactgtccctccccagcccgctccccctctctgtgccctggtccccttgctgccatgtggatgctgttgtgattgctgtttgtatattatcaaaatgtttttatattaaaaatgtttggtctgaaaattaaaagcacttcatttagaatgattgtttgtgcttttgtctctggtggactgaagcaactttgtccactctcccccagaagtggcctcttgccctgtccagtgggttggctgtcccacgtcttctttccagcttcctactccagtcttaattggttctacagttgtattccagactgaggttccaggaggggtttttctttgtcaaaacttaaaccagctgtcctgcagatagattataatgagtgatttttcagactttgcccttgacccacaggaaattaacatcgtgatcccaacacacaaacagcaatgcttttattaaattttactaaaccttaccatgtatctatccatccagaggcggagtggtcagccatttccccatagttcacagaaaggctctgactctccctccctggaactgtggttg

SEQ ID NO: 91028 - DNA, 1763 bp, Homo sapiens
cattgccgtttccccagaggtggcccctccacctctgctctgacctctccccatctctctgcccctccttttctcacaagtgccatgagttttcaaacatcttcgggtctcagcctgctgctgccatgaactttgttgggttaagggggaggggctctaggaaggaactggggggaaggggacaggtaggtggctggagggaccctttttgctgctagaaagcccctcccttctcccggggagctggggctggcttgtccccatcaattaggggagaaggggtcagaccaaagatggtggtttgtcccgtgtaagggaacaggtgtggggaagaggtggggttgggttccaactctggctttttctggtagaaaggcctaacccattacaccagaagaccatgggtgaagtctagatggggaggagaagtgaggccagggacagtcttgccagacgactctgaggagggcaagggacagttccatggcccttcccggactgcactaggctgggagctctgttgtgtggaggggtggtcagaggtctgtgaagagcgggcaggaggcatgagcaggcgaggagctggcctgtcccgggaagcagcccagcctgtggctgcccccgacaccaggaggagggccaggagagttccagggggctgaggcacacagagaggccaacttcctccctgcccagccttccttgtatctctccagactcggacaatcaaagggagagagggtgtatcgggtcctgttccagccggcatcgccgggtggcttccaggcctcagagctgtgtggcagggccccctgctggggctggacatcactgcagtccagtgcaaagccgcccccagagcccaggtgtccccccaacctaaccagacctggtgccttgacgcccccaccccagctgggacggtacagagaagggtcttggtttcctctcctactcccttccttaggctcctgaactcgtttgctcctaaatcttgttaattctttttctctggattttggtttcttttggctttcccttgccttcccctttctctgtctccaacactctttccccatgtctttctggctgtctctatgttcctcttctcttatcctcaactttctgtccattcgggcctcctccccacctcccacgccccagcccctccctccttggtctccttttcgatatgccaaaccaattttgggtcgagtgcatttaacgagaacaaaacaaaaggctcataacaacaagaacgtttcagaaaaaaacaaaaagttttaaaaaaattgttgagtcaaaaagtcaaacaataaagaaattaagatttcttggaatgacaagagtggtgtgacttcttgagtgggggagtaagaaatgggtgaatagctgggcgcggtggctcaggcctgtaatcccagcattttgggaggccgaggtgggtggatcacttgaggccaggagtttgagactagcctagtcaacatggtgaaaccccatctctactaaaaagacaaaattagctgggcgtggtggcaagcacctgtggtcccagctacttgggaggctaaggcaggagaattgcttgaacccggctgggaggcagaggttgcagtaagccaagatcgtaccactgcactccagcctgggctatagagtgaaattctgtctcaaaaaagaaagaaagaaatggttgagcagatctgcacaggggcgtccccatgggctctggtctgcactcgagcattcagaacccctgg

SEQ ID NO: 91029 - DNA, 2665 bp, Homo sapiens
ctaacagcatccaacagcttgcatatttatattttcatctatgttctgtctctgtctactgaaatataagctctcagaggtagggatttgtgtctgttgtgttccataccttccctgaggcctaaattgtgcctggcacatagcggatgctcaataatgctctgttgattttatgaatgaatgaaaaactgtcagaggaggtggagaagaggatgggcctgagtaagaagagagtgaaacctgatcggctggctgttgggggacaggggacatcaaggcttccgtggcctgcaagtcgctgaacaggggaacacagtcattggaagctcggtctccggcctcccaaggctgcctgtcttgtgaccagccctgtgggagactggatcacagaggaggccagtgtcccagccagctgactgtcctccacctcccaggtgcacaaggagtacagcaagtgcctgcgtcactcctactgctgcatccgctccccacccgggggcactcacggatccctcaagacctcagccatgcgaagcaacacccgctactacacagggacccaggtatcgggccagacaggactccctggggctgagtgttggaacctggagcctgagaggtggggagtggcttggcctaggtttctgatcgtgatgatcaggtgagcagtctcagaaagacgccagagggtgggtggcccaaggatcccctcacatttgggttgtgttcccagagccgaattcggaggatgtggaatgacactgtgaggaaacagacggagtcctccttcatggcgggtgacatcaacagcacccccaccctgaaccgaggtgagaaggcatccttctgcctctggcttcagtctctggaggctcccggctgccttgtgacctctgatcctttggccaggtaccatggggaaccacctgctgaccaaccccgtgctgcagccccgtgggggcaccagtccctacaacaccctcatcgccgagtcagtgggcttcaatccctcctcgccccctgtcttcaactccccaggtgagagcacgggggaaacatcccaggttgggaaatggagggtttgtgtcccaagggacctctgcatgggatgttctgtgccccagaactggagcctggacttgcatttcgagctcatccttgccttttctcttctctcttctggctgccacctgcagggagctaccgggaacccagtaagtgtgactcttccctggggatgtttctgaggctgggagagggacagacagtggccttctcagacggcctcacttaaggaggagaactcgggatgcctccccatgcccacatttccccaccccccgacacacagcctctggcagccgaatggaggataatggatggtgttcattgagtttgggctgttaagtgctgagggtctgagcacaggaaagcgatcctgttgcccaggcctcctcacactgctgagattctgaacctccagctggggatgagatcctgggggaactggtccttgtcccccacctttcatcaatacgctgctgggctggtgtgtctagtgccagtgagggagaaagggaatgtgagatcagagatccagggggcagggggaagcctacggaaaaccagcaggaatcaagcccacttctccacatggaccgcaccccctcactgtcccctagtgcatccagggcccctcttcaacctgaccagcccctttctgccctgcagagcaccccttgggaggccgggaagcctgtggcatggacaccctgcccctgaacggcaacttcaataacagttactccttgcgaagtggggatttccctcccggggatgggggccctgagccgccccgaggccggaacctagccgatgcggcggcctttgagaagatgatcatctcagagctggtgcacaacaacctgcgggggagcagcagcgcggccaagggccctccaccgcctgagccccctgtgccacctgtgccagggggcgggggcgaggaagaggcgggcgggcccgggggtgctgaccgggccgagattgaacttctctataaggccctggaggagcctctgctgctgccccgggcccagtcggtgctgtaccagagcgatctggacgagtcggagagctgcacggccgaggacggcgccaccagccggcccctctcctcccctcctggccgggactccctctatgccagcggggccaacctgcgggactcaccctcctacccggacagcagccctgaggggcccagtgaggccctgcccccaccccctcccgcaccccccggcccccccgaaatctactacacctcgcgcccgccagccctggtggcccggaatcccctgcagggctactaccaggtgcggcgtcctagccacgagggctacctggcagccccaggccttgaggggccagggcccgatggggacgggcagatgcagctggtcaccagtctctgagggcacctcatggaccaggggctggtggcccaggccagggagggaaccctgggcagggctctggtgggagagggagacagatggaggcagtggctggtgggccactctctccaggtgcccctcagccatgggccctacagtcccctcaggggactctaacctgggggcctgaggtgccagggttcacagac

SEQ ID NO: 91030 - DNA, 4183 bp, Homo sapiens
gcaggaattgcctccttccagtgtctaccagccttggggctctggaacccccggggccctgacctcagcaactgcacctccccctgggtcaaccaggtggcccagaaggtaccagccaccacccctcgcaggcaggcacatgtgctcgggcccagggcccagggcccagcgggggtcgtggagcagctggggagacatgggctggcaggtctggaaggcaggactgtggggtcacctccctggcctacaaagggagcagggacagatggggtgggaaggggcagatggcgatggggaagtggagagagagataggagaggctgcacaggccagggaagccggggagggcaggatggtccctgacagtcctgggattcccccttcccgcccccacctcatgcagatcaagagtggggagaacgcggccaacatcgccagcgagctggcccgacacacccggggctccatctacgcgggggacgtctcctcctctgtgaagctgatggagcagctgctggacatcctggatgcccagctgcaggccctgcggcccatcgagcgcgagtcagccggcaagaactacaacaaggtggggcctggcggtggcgctgacctggtatggggagggcgcctgcccccaggggcttgggaagtacctgacctggtacctcccagccaggctgccacctccactcctttcctcagagaggaaggacccccccctctccgccaaggactgccgggtctcactcctgtgctgccccggatggtcctgggggttggggatccctgaggaatgtcttgctgatagcccagccctgggtcagtggtaaccgcagacgagagagctatccagatgtgacagtattagggtgagggaaccggcacccagaggcctggcctgacatcacctccatctctttctagatgcacaagcgagagagaacttgtaaggattatatcaaggtgagacccagggggtcccagtgtaaggaccgtgggctccagctgatggggggattaggggtggaggttgagaagagggcatgcagagcccacccccaggaattagagggtgttggggggctcacagcaccatgccctctgcctgtgcaggccgtggtggagacagtggacaatctgctccggccagaagctctggagtcctggaaggacatgaatgccacggagcaggtgcacacggccaccatgctcctcgacgtcctggaggagggcgccttcctgctggccgacaatgtcagggagcctgcccgcttcctggctgccaaggagaacgtgggtgagtgccacagtcacccagggcaaactcagatacgaaccttaaaccacggggttctggcctggaggccacaggggggctatccgacccttgggcatcttgccagagtctcgttctgcagcctgagcccctggactgggaacagaccccaactgtgtatgccttgccttcccctgtccccacagtcctggaggtcacagtcctgaacacagagggccaggtgcaggagctggtgttcccccaggaggagtacccgagaaagaactccatccagctgtctgccaaaaccatcaagcagaacagccgcaatggtcagtgtccccggcggggcctcgggtggggaagcagccccacccccaccccccagctctgtgccagcgtctctgtgccatttgtagagggcagcggtgctgaccttttctcatgctagtgtaaaatttgaggggattcatgggccctgaagtgctgcagagccctaagggtgagccttacagttgcaaagctggctcctgggcctcacagctcagagaggatggggccattgagatgaaggctcagagaggtcaggggcttgcccaaggtcacacagtgagaatgggtgggtcggaggcccagcttgtgtgtcctggcacactgccctgctgtttagaactgccttcagctgagcagtggtcttgtggacagggctccctgacccccacctgcctgggctatggactggcttcagaggtcccagtggccagcgtggccaagggctgaggagctggctgagctgggaagccaggggcctggatggaggtgcgccagctgaggatgctgacacatccaaacgtgcctgttctcaccaggggtggtcaaagttgtcttcatcctctacaacaacctgggcctcttcctgtccacggagaatgccacagtgaagctggccggcgaagcaggcccgggtggccctgggggcgcctctctagtggtgaactcacaggtcatcgcagcatccatcaacaaggagtccagccgcgtcttcctcatggaccctgtcatcttcaccgtggcccacctggaggtgagctgagccgtccccctccctccatgggggtccctgtaccctctgtgttcccaggctgtgtacctgcccctccatgtgctcacctccagaacaagttatgggttcttccactttagagcttgggccatttgtccccagagctctcagaatgtcaactggagccccagaccccaggcacttctttgatacttggtaccatccctgttgccaggtgtggggggtcggaatgggactccccggttctgactctagttatgacaccctggtgccaccacacaacaggacaagaaccacttcaatgctaactgctccttctggaactactcggagcgttccatgctgggctactggtcgacccaaggctgccgcctggtggagtccaacaagacccataccacgtgtgcctgcagccacctcaccaacttcgctgtgctcatggctcaccgtgagatcgtaagctggctggtgctctgctcctccaggcaggcccgattgctggcctggctttgcatggcatcctagagagatcacgggcagtaccaggggaggctagccccatgggtgtggggggcccctggtcttgcctggggcatgaggccatgcgtctggtcctctatggccatgatcccaccgtctcccaaggcactctggagaagcaagttggtgttacgttggtcatctctccacaagccttccagagcatgaggaagtgagcgcattgctgcgtgcagaggggtgagggctgccaggttggcggcaccagaggtcctcacggcccatggccttgcccagggccctgtctgtggctggcacctggctgagcccagcgtgcaaaaccaaaggccctgagcgtgccccctgttcctgtccccagtaccagggccgcatcaacgagctgctgctgtcggtcatcacctgggtgggcattgtgatctccctggtctgcttggccatctgcatctccaccttctgcttcctgcgggggctgcagaccgaccgcaacaccatccacaagaacctgtgcatcaacctcttcctggctgagctgctcttcctggtcgggatcgacaagactcagtatgaggtgggctgggactctagggcaggtgacggccagcgcctgggggccgggagaagaagggggacacctgtccaggcagcagcccctcaccctcagtgctccccgcagattgcctgccccatcttcgccggcctgctgcactatttcttcctggctgccttctcctggctgtgcctggagggcgtgcacctctacctgctactagtggaggtgtttgagagcgagtattcccgcaccaagtactactacctgggtggctactgcttcccggccctggtggtgggcatcgcggctgccattgactaccgcagctacggcaccgagaaggcgtgagtttccacctcccagccctgcaccctcccacctggttccctgctgggcggcaccccttggaccaggaccctcagggcggtagtcccttcctcctcctgatcccagaggctgcagcctgcagagtcctaggccttcatgagtcgctgggaatggctcctcggcttctctctataccccggccctgtttcctttacagctgctggctccgagtggacaattacttcatctggagtttcatcgggccagtctccttcgttatcgtggtgagttgggaggtgacacccctagcaccacatcttccttcatccaggctggccttgaccccagcccctgcccccgccccccaccccccccacacacacacacactctctctctctccacacatcggaactgagccaccg

SEQ ID NO: 91031 - DNA, 8804 bp, Homo sapiens
cacttttaaacaaccagatctcaacagcacggaggggatggtgataaaccattcattagaaactgcccccatgatccaatcacctcccaccaggccccacctccaacactggagatcacaattcaacatgagatttgggtatggacacagatccaaactatatcacttggtttccagctccactgccccttcccaatttgggggtgtctatgacaccatgaccctggagcatgcacccccacccccgccaccccgtctatgtgtttctttcccaatgccctgtttctcctctgaaggtgtaacaaccgcacccagtgcgtggtggtcgccggctcggatgcctttcctgacccctgtcctgggacctacaagtacctggaggtgcagtacgactgtgtcccctacagtgagtcatcttgttccttgtgcggatgcgggcccttctcgcatgagtgagtgaggaggagacaccttgacccatcacacatgtgcacacatgcatggggcctgggcacagtggggacagccgggcctgctctctccaacacacattctctaatcccagacaccagtgtccacactcagtgcctgctcccccgcctcacagactctgtcccctcctgtggggacaccttctccagctctccttaccccagcccactcaccctgcttcttcatgcaccctatactcatttccacactgccaggccatggtcccgtgctctgcctggcacacttacgtctctctcttctcccttggcctctatgcttttctcccccatctgcctccctcgccttctcacatcccttccttttctgactcttctgaccttttctgacccttctcatctaccttctcttccctctcacttaccccactgcccctctcaacaccgttctctcagcaccctcactccccacacacttcttcccaatcatggaagctggactctacacccatagagtgggataccatcctctgaggcctggtggcagattcagggtgaagggctggggggcattttcaacagattcatagctcctcactggtctccccattaccatgtggcacttcctgtctgcaaaggaaatgccgccatgttggactgagggtggcctccaggcagcctgaagaaagtgatttggggagccaggagcctggccatcttgcacctggccaaagggatcagacaaagacaaggtctctcctcctcagcaccccacccttgacatcacctttttcctgccctctctcctccctccctccttcccattatcccttcccttctcctcccacaatgggttccatgtagtcaacctggtggtagggcctccgggaagagtggggagaaggcagggccatcagggtgtctgagtgtggcgggccgggtttggggactaagaggccctgtaactctccctcctctcccctcccaccccaaccttccctgccagcctttgatttctcctcacaggtgactcgatgctggggaaacaggatcccttctgtgcttccgtaattttcttcttttactcttcgtcctttcctttcagcgcttgaggccttcagccaccaccgagggggatgcccatctgctccttgaagcctccccacagcactggggacacggctgactcccgcggctgggacagcggggaaggggggtgggaggcagcgagctcagcacaggggggcagtcagatgggtgtaggttcaaggctcgactgggctcttgagttttctggctctgaaaccttgagcaaatgatttaatttctctgggccactacggaaggaggtgtgagtccatgagatgacatgtgagaagcgcttggcccagggccggccacaaagtcgctcctggtggcagggttttgagtgccgagtgtaaacttcccaagggcagaggcttcgtcttcacccgccgccccagcgcccagacccatgcctggttcaggatgtgctcagtaatattaccaatgccctttaagccagctgagcctgtttattcatctgtgatggggtggagaggggtcaaaagccttccctgggaagccacaaggagtagcgacaacgcatgtcaagcttgtgtgcacccgagctgtagatgcaaaggaaatggtgcctgctttcgccagccatgtggcctcacttcagtgtgcctcagttttcccatctgtagacagggttctcaaaagacggccagtgaggtgcgtagcatagttgctggcccctcgtgagtgctggacacttggtagtcgttgcttttgttgcagctccttgtaatgcctcttgtcaattacgattattgctgtggtaatcaaaattaaaataacaacggataatgacccaacttctcccgaggcaggtgagataaagggcaggaaaaattcctcggtccaggtggaagccaaagcaagtagacgagaggctcaggtcaagccgcaggaaagaagctaggggaggagaggagctgagaaacctcctggagccgaggccctgagcgtggtccaggggctacaaccgacagagaccaggcaggctccagggacagagggcaggacagttcagaggatgagtggctgcctgtctgatggaagagagatagcctgagcccttggggagacaggagacacacgcacacacacacacgcgcagacatgtgtgcacacatacggggtggatgttgggggcagagctaactcctgatgctccagaggaaggaggctggagttaaagcggggacaggaggtagctagaggacagggaggccaggcactcacttgtccccaaaatgttcactgagcatctcctgagtgccaggccctgggtgaggcgctgggaagggaggcagaggctgcccctgcggagctccctgctggaaccttcagagaggggccaggagagccagtccctccagtcagaagttcctgaggggccagggatgcagagggggagcggcctgggcagccacctggcccagggcttcagaggctgggggtgaccccagtgctggtgagggtgggtcaggggtgggtggcagggggcacgtgatgtgtgggaaccctcccacacagtggacaagcccgactaatgctggatttgctttgcagctgagcacagtctaaccgcgccccttcctcccctaggtgccgcccgtccgcagggcagcgggcagggcggagctcccagctcctgggcccccgggccctgggtgggttgagcagagaagccgagcctcagacttgcccctggggagcctgggagcgtgtctgtgcccccacttgctgtcccacccagtctgtgtcccccacccccgccacctctctgcctccgtctccccaaccctggctctctctggggcccgggtgcaactgcccgtctgcctgtcgttctgtgtctggctctgccaccttctctctgtgtttgcttcttctgggttgtgagggcttgggggaagtcagctggacctgggtgaggccagcataaaggggaaggagttcagcctgtttcttggctgagggtgggcccaggccctgggagacactgaaatccttcccctggggcccctggttctagcaggagggcagcaggcagggtgggaagggagccgagtggcttatccaccccaccactccctggtgccccctctgaccggagcccacctcccagctggggctccctactccctgcccccgccttgcaccaagggtgccccctcccacctgagggctctgtctgcctgcctgtacccccctaccacccctgtgtctttctgtgtcttctccctcctgtgtgtgtccccctcgtccctctgactgtctccccagcaccctctcaccccacctgaccacccccagaggaagggacctgggggcgggggcccgagctgatgctacggaaggggttggggaagcaggagcgaggaaggaaaggaaaagggggcgtgttgccagaaaagaaacgaaagcaatttaatctctttttttttctctttttttcttgcacattttttttttcaatttgttttctctctctcttccgatgcttaaagtagaagtggagcagaaaggtaaacgcactgttaccaatgctaacccctaactcacactttgttctacctgtaccatacttatgtgacctgccctcccccggccccttcttctctccccaacccacacttggtccggtcggtatcccccaccctgggttgtcctcccagtgggaccagccctggtgcggccacgggcatctccaccctccagatacccacggaagctcctctctgagcttgggcaggattttctctctctcgctgtttctgtctctctctgtccctccttcctggtccctggccctttcgggggacctggccttttctcatacttcttttgcctccttcaggagaagtgtataagcatccagggcgggtggggagggagggactcccttccccggctcccccactggggcaccgggtgagctgtctctctctctctctctctttctctctctctctctctctgtctctcccctctctcttcctccttcccctgtaccttttataacatgtttctggttcatgggaggcgggctggaggggacaccattgttttccttttggggagcagattctcctatgtctcgggctcctggtggcttaagttccttctggtttgatgtttccaaggcccagagctgttttggagcatggagcaccagtcctccccacccccaacctgatccccatctctgaccagctgggggcccagccctggggaggggtgtcagctgtccccagccctgggagggggcagcctgccaaaaaatgaaaaaatgagggcgagggggcgggggcgggcctcgtggttgggggagcgaagggtgggggagcgtgttctctgtttctttcacacttgcaaagctgcagtcagggtttcttctgggctgttgtggttagaggaccagggagatgggcggcgggcggcgggggcacagtctggggacttccacagactccgtaatttctagcagagaactccctagtggatggggctggccattactggctgttattggggggagcggaggtgctgctgctgaggggcttctagggtgagatgttagggatgaccatttcctctccagaaagttttgggaaatttacccatctgaggccggcagcagcaggcagggctggaggacatggcctttagggatcccttttgccttgaaattacagtggtctgtggagcatcccttccgaaggaggtggggcagggtccctctgagctgctcccctccccgtcttcccctctcccccatctcagagaggcctgggctgctggccccaggtccgccccctcaccacacccctccagtctcctctctttctcctggagtctctctccctcccagcaccagccactcttcttgcaggcccactggtttggatgcggcaccactggagattttctcttcgagggccagggcagggcgggtggggtgacggggcaagggagggaagaggagggattgggagtttggtgctggtgaagggtccttgctgtccaaggccccagacagacccttcctcatcttctcccccttcccctgggttgacctctaaccacatttttcccccctgacaccctctgagcaggttaggctctgaggcctcccaccgtccccttcacacaaacacgtcccctcagatgccacacacctggtgggggtggggaccggcttgggcagaggccagtgtgctggacagagtgggcaggccgacccctcagggcatcagggacagggggatggccagtccccagggcccaagccagggtcgttttggctcctgcccagctctatgtcccaggctcctctccctctacaaaaactacatcctggctgctttgtgccagggggcccctgagccacattgttcccatgctgtgaagggagtgctgcctgtccccctccctcccaagcctgctggaggtggggaatgaggactagcccaagcccctcttgccactggggctgccccccaagccggtgccaggtcccagccccccgatcccctcggggccagctgctttggtgacatgccaagcaagagcagagaattcactgcaaaccctccaccctcgccctgtgccctcgccctggcctatgtgtgggttctgccagccaggaggtgagggaggcccggccatcctggatggaggggcgcactctgggaggaggtggggtgtctggccacactgacccccggatcagtcaaggggaggttaggagtaggtggtgctgggacgtgactgggcaagggtgggccggccagcagtggccaacgagatgcagttgaggttttcctccttttcagggattgggggggtggggcggggccccccacctttctgacatcagcgctgccttggtccctcttcccgagccggggatggtcgcaggtaaatcggggtccgggccaggggaggtggggggcctggctggggcgggctgggtctttatcctagcgcctggttccctcccctgccccctccgagctggacctgggactgcccccctgagggaccctcagtcgggcctgggccttggagtgaattctctgctcacccctctctcctccgccagcactaaccctttcttcccaggtggtttgcagcgcagcctcccacggagccaggacctcgccaagccccatacgcccttgtctctcttccctctgcacagctctcctctccctccccaactctcccgggagccctgtccctctccatgtccccacccccacccctgtgcacagtgccactgtctgctgctgagccagaccccatgagagaccctgccggctgggggcagggctgggcgccctccaggaggggccagactctttcattccccgtcctagcctgggagctgcctctgggaatcccttcctcggctactgacttcgtgggtactgggtggggggtggggagcaggctgcatcaggaacctggggagagagttgaaacccctatcctggaatagggagacactcctgacacccacagtgggtatggaaacaccactctaccttgcaatttttgcaggaggaagaaagaggagttaaaaaaaaaaacactgtccgggtgtggttggtgaaggatgggatcctggaccctagctcttccctaagtggcagagaagagggagaaggggccgggtgctgagtccctggaccgtcaaagtcaggagtgactgtagcggggagattctgcccccacttaaatcacacaggaccacctctgggagggctcttgccaaactcctccccagcctgtggggtctctagcagccagggaagggaagaggggcaccacttcccctcactaaccccgctcttaatggccttcagggttcacatttccagggagaggggcagctgggcagggcgtggggagggggtcgggtcccagcccggaaacccccttcccatcaccagccataccaagcaaccgtgactgcagcagcaggaggggacaacctggctccccaccagcagcgtgaccaacttgcctctctcccccctctctctctctctctctctctctctctctctcctccctctcgcctctgccccttctctcctacctcctcccctcccgcccactctgcccagtcttcgtgtgcccagggaccctgcagaaggtgctggagcccacctcgacacacgagtcagagcaccagtctggcgcatggtgcaaggacccgctgcaggcgggtgaccgcatctacgtgatgccctggatcccctaccgcacggacacactgactgagtatgcctcgtgggaggactacgtggccgcccgccacaccaccacctaccgcctgcccaaccgcgtggatggcacaggctttgtggtctacgatggtgccgtcttctacaacaaggagcgcacgcgcaacatcgtcaagtatgacctacggacgcgcatcaagagcggggagacggtcatcaataccgccaactaccatgacacctcgccctaccgctggggcggaaagaccgacattgacctggcggtggacgagaacgggctgtgggtcatctacgccactgagggcaacaacgggcggctggtggtgagccagctgaacccctacacactgcgctttgagggcacgtgggagacgggttacgacaagcgctcggcatccaacgccttcatggtgtgtggggtcctgtacgtcctgcgttccgtgtacgtggatgatgacagcgaggcggctggcaaccgcgtggactatgccttcaacaccaatgccaaccgcgaggagcctgtcagcctcaccttccccaacccctaccagttcatctcctccgttgactacaaccctcgcgacaaccagctgtacgtctggaacaactatttcgtggtgcgctacagcctggagttcgggccgcccgaccccagtgctggtgaggacgactcacttccaggcatggagcctgcttgcctttgtcccctccacccccacccacccctgggtcccagagtggggagccccatcctgtgagctcttggggatcgggaggtaaaggaaattcacagcatgtgacagacgctgttctaagcacttcacagtcattaactcgtctcctcacggtctatgacacagggatccttactgccctgttttacagatgacactgaggctctgtgtgggtaggggattaagttatttgaggatttgaacccagcctcccaaccactgaactgcagtgcctctcccaggggcct

SEQ ID NO: 91032 - DNA, 1077 bp, Homo sapiens
acaagtgtgtgcctctgtgcctggccaaaattgcccgtttttataaggaccacagtcatattggattggggcctaccctaatagcctcatttgaatttatctctataaagaccttatctccaaataatgtcacattttcaggtcctgggggttaggacttcagcatatgaattttcaggggaacacagttcaatccataacagcatatctggtgtagcccgaggaccccaggaaaacagtcactcttatcaagcagagcattccaaaggctcagacgtcacttcctaggagctgagagtccaggcactctctgggccaggttaatgtcctcactacacaagtgggcacactgagaggcccattctacagctgaatcaactgaggctgcctcagctggcttccaggacacagccgagccagaggtggtgttttcttggcagtgggtagggtcttcccttcctggcccaggcccaggagtgacaccatccccaaccctccctgcaggcctgagccgggccgggctcccgttcgggctgatgcgccgggagctggcgtgtgaaggctaccccatcgagctgcggtgccccggcagcgacgtcatcatggtggagaatgccaactacgggcgcacggacgacaagatttgcgatgctgaccctttccagatggagaatgtgcagtgctacctgccggacgccttcaagatcatgtcacagaggtgagtgggctctcgtggcagttcctggatgaagtgcccgcctaaaagcactgcacacctgccagcacacccgttcaccttacatcttttttttatgcattcaacacatgtttactgagcacttaataggtgctgggccccatgcagacgagaataagacccagtacatctccccacagccagcctgtgcccccgacagaggcctatacccatacatacactgggaagtccctccccccaccagcctcttgcttccataacttccatcccaagattagccagggcagtttgtttgtttgtttttgagatggagtcttactctgttaccaggctggagcgtggtggcatctcagctcact

SEQ ID NO: 91033 - DNA, 1789 bp, Homo sapiens
ttgggaggacactcattacctccttgctcatggtgaggatgcgagtaggggagatgagtgggcagggtcaggacaggggcatggggaagaggcttccagagggtccaaggcctgcctgggatctccccgtgagctgtcccaggaggttccagtggggaagagttggcagtctctttgcccagaggtgcccagatagctgggtctggctgctgggtgtaagggtggggggtgtggtgtgagctgcagaccccggagggggccctacagatagggctggctcgagggacgtgctggacctcagcctctcagagctactcagccaccagcaggaggagaggggagcggcctggaggccctatccccacctcagtctccctgtcctcccccaggctggtggtccaggccgtggtgcctgccaggtgatgtggggcaaagccccccgcacaggccactgagagctccggacacgcacccggctgccaccatggcccgcctagccgcagtgctctggaatctgtgtgtcaccgccgtcctggtcacctcggccacccaaggtaggtgctgctggggccggggaggggccgcggctcccaaacccttctggggggggcagataaaatgttgaaaaccctcctgatcactcagtaaagaattacagccccctgccccgccccagacctcagctggagcaggccagtggaagactcaggggtaacacacaccccagtgccaccaagaggcccctggaccatcctcttacctccaacaagtcggctgggccaggttggtaggggccatcccgctgtggcccctgggaccaggacaggccttcttggtgagccgatgctcctctctctgtctctctctcgctctctctctctctctctctctctgtgattacatcttcgaggctctcactgggaagaaggcttaattaaagcatgcccgctgacgtttatttaaaaacaactaattacccggctcggccctatgccggccctaggatcctgcacacgccactattagtgccccaagcctgcccgcccaccctcaccgattactcgattactggccccgtgaccagcccaggccgggggcaagggcgggataaggtgagaggccaagagaagaggccagtaggcccggcccctcactctgggatgtgccccctgcccaccccgacatccctgtatgaagggcattggcgggtgactctgctccctctggccctgccctctggaaagctccaaaggttgaagggacacggttcagctgggccccagggccttggcactgccccgctggccagcaacctcactcctctgctgctacgttctctgcccatccaggtcctgccccatagccccagctgggccgggagggctgcctccacccccagacccatctgagccagccttccacccccggccctccctcccaagcccgggaaggctaaaattagatgaggaggcagatggtgctggaggaacacatgtgaaatgttccccccgctgggactcaactcaccccaaaaaaccccaagggcctccctgccatacccctggggtacccacccagatctctggaaaggctcagctctgtcaccgtcccgcacgagtgccctcccgaaacctcgtacagcaggtggtcacttccttcacctacaagcgacggtccccacattggggcatctgggtccctggctgaatccctgctgccctccagcaccccgcagggcctggctggaaccagcgtcacagaaggtgctgccccggccagcatggaccct

SEQ ID NO: 91034 - DNA, 1706 bp, Homo sapiens
tttgcagggggtcagggtaggtcactctgctggggtgaccttgcggctgagccctgaacaatgagcagccgcagccgacatgcagggatcctgcttggggactggaactggaatgttgaatgtttcaggaacaggagggaggacagaatggggcttggagagcttggtggcaccagttcacccacagcctctgggctctagtgaggaactgagaccccagcagagaccagggggtcagttaatgttcggatcaacatcatcatgtggtcccttagctctgagtgaagggcggattgggaggcgggcaaggaggccaggacaacatacaggtgacataggatggtgcatgggcctgggtgctgtgcttagagccagaagtgggcaggtcgcgaggtacttcagaggcagagcccacaggagttgctgatggcttccgtgagggggatgacagggaaggtgaggaatcaaggcagagtctcagctttgggatctgagattcattcaacaaataattaattcattgccacgtgccaggcctattctaaaagttgaggatatgaagacaacagtggtgatggcctcacgcagtaatcccagcactttgggatgttgaggcaggaggatctcttgaggccagaagttcatgttcagcctgggcaacatagcaagacctcatctttgcaaaataaaataaattagctggatgtgatggtgcatacctgtggtctcagctactagggaggccgaggcgggaggatcacttgagcctgggaggtggaggctgcagtgagccatgatttcaccactgcactccagcctgagtgacagagcaagaccctatctctaaaaaaataaaagtaaataaaagttggggatacggccaccatgagcaaaacagttcaatgatccctgccccatgaagaggacattctatacaccaggtgaatagttctatctgagcagaggcctgaaggagccagccatgtggacagtgggttggcagaagctacaggtggaggaagcaacaggtgcaaaggccctggggcaaggcctgctgtggtccaggaatagcaggagtggctggagcagaaatggggtcagggagctaactgggccaattacaagggttttggttttcagcagggaaatggtagtgggggctctgatgagagattccaggctggacataagagatttgaaagtgctggctcaatgatggtactgagagcccaggacagcctgagatgggacaggctgggatgacagctggatatgacagagcaggggttcccacgcttcagggcctgcctcagagaatgtgtgtttctggccagcacagtggctcacgcctgtaatcccagcactttgggagactgaggtgggaggatcatttgaggccaggagttcaagaccagcttgggcaacatagcaagatcctgtctctataagacattttaaaattagctgggcgtggtggcgagagcctgtggtcccagctactcgaaaggctgaagtaggagcatcacttgaacccaggatctggaggttgcagtgagccgtcattgtgccactgtactccagcctgggcaacagagcaagaccctgtctcttaaaaaaagaaagagagagagagaatgtgtgtttctaccaagttcctggcaaggctgatgccagtgtgctgggaccacacctggagaaccagggtg

SEQ ID NO: 91035 - DNA, 2803 bp, Homo sapiens
ctgtcaggaggagggggtgcagccgggcagcaccttctctccgtggtgccgggttaaagcacgggaggccggcaggtttgatccactcggattattcgtgctttgaggacagctccccacccccaccccaggtgcgcattggattgagctgcgagggtttggttgtcatcctcccatctgacggtcctgggacccgagtccaggcctgaagtggtggggtggggggatgctgtgtttgctccagccgtgtccagaaaatgccctcccaggtatctctccagtgcacccctggcccccatctgaagacagccgctggctacacacacccctgtctctacacttccagtccgggtcctcacactgccccatccctggccaacacctcactgtacctgcctggaccctttcttcctgttccaacccccatccacccccagccatgccagctgcgtgggtgtttctgtatcccagttccaggcagggcccccccttccgcctggcttccaccggactcagagctggggtctgtcttcccacatcccacttcccaacatgtgtgcctgggggcaggagggggaggggttcaaaatggctgccaagatggctggctcgcgcgctctctctctctctgtctgtctctctctctctctctctctctctctcactctctctgtctttctctatctctctctgtctttctctcttcccctctctgcttgcccggctcccttatcctggtagggagtcactgcttagaggaggtcggatccagtggggcacacctgagggtgaatgtctattccgggccgttgacctccatgctgtttggggacagaccattggtttctgcttctctctccaacaccccaagggctggcatgagtctaacctgaccccagaccccactccttcaccctggctcacagcctgaaagctccgtgccctccacctgctctccagggcctggccccctgaattgatcaaccccacggagggtccacacccctcattctcttctcctgtctgcccccggcaggggactctgcgtgggtccctgtcaggccccagctttggggggcaggtgacttctccttcctccctgctcccctcccactaatgccaaatttattacttaaaagtaggatgaaaacagggagaataagagaaggattacaaccttcattatcatatcgagaaaattatccgtgattttcctaactagcaatttgtctgccatgccgttcagaactgacttgcccattaattacagagatgaaaaatcatctggaattcggaaaagggaactaattccatggctggcagcgatcgcacccgtgcacggagccacatacgtgtgcgacatacgtgtgcgctcacatgtgggtcccggccctcctgctggtcttgccaccatcttcctacccagcttggtgacctccctcatggccccgctcggtccaccccatgtgtgtgtggcatctgctctgggacacccctgcaggccctctttctctccaaggggcgcccatctcaatccccacttctgggcgcttgcgtaccccgtgatcacccacgctgattcctgctcttgggggtgtagctggcgcccaggcttggggaggatggggagctggggaccagcacacctgggctgtggagcctgcagggagggggtggaagggggggactcgaagcccagcttctattcccagcctgcccaggggagccctttctcctggggggccttggaggaccctgtgggcacgttggggaggagcctacaggcgcctcagctgcacgggagtgtgtttgcatccagcagtttgggctcctggcgggtggcctctccacctgcatgtgaggctgtgtgacgcttgcatctcggggcgtctgcgtcctccctaccctgccaggctggtggcagagcatgtgttgcttcagccccagcgcaggcatctcggtggggagggtggcagtgggtgcccctcaagaggaacgggaggagtgggagcactgccatccccgccagagcatcgtctttgccctccaccccctcctttctccctggcgagacatgtggccaaggacacacaaggctctcgtttctgtgtgggttcctctcacggatctgatttccagatgccagacacttcccctcctccagcccctctgtggggaggcagggggaggggctcctgaggcgggggttccctgggtctgaaaccctgaccccagtgaccctgaaggtgccgtggcaagacagacagctcctcccaggctgggtttggggcaaagtggttgctattgggcaccctgatggaaggggagagacgggtcctggagtgaggtgggaggccaagtagaaacatggagggggtcccggtgtccccagaatccagatgtctgtctgtctgtctgcacctgtgcataggtgtcctctgcctgtgtggcctggatggtgatctagccaagggtgcatgtggccacgtgaccatcagactcatccggtgttcataaaggtccctcctgtgctggtgtttgtgttttgcagagggggtggtcatgctgggggaggcagggctgcaagaaggagtagctgtctgtgtgcacacatggggctgtctgcatcttttgtgcacctgcagttgtgtgctcaggacttcttggagcaaggctgggtgcaccttgtcatgcaatctgcacacacttgcctccccacccagcaccatgcagggggcgccatggggggtggtggccatgtcctgtcctcatggagctcacactctagcaacacatatggggt

SEQ ID NO: 91036 - DNA, 1005 bp, Homo sapiens
aacagcagcttctctcccggcttctgtttgggcaacttccaaggccccagatggaggcagctgggccctgtagcctcacggtgggagtagagaacccagctcagcccatgcagaggggatggggcacaaaggaaccctgcccagggccctgaggacctcaatccctcaattcctccttccccaacctcttctgtttattggattcctcctgatccttttctgggctccaagcctcagtttctctatctgtagaatgggcatcaacacagcccctgcctcctagagtggttctgagctttaaaggagttacctggggctttgggagttagagatgaatctgcctagatcctgtcctgccaggggaggtcattttgtggtctgttctgcaaagaggaactgggttctggccgagggaggaactagccaagccttgtggccagagaggaggaagaggggaatcctgacagaagtggggagtacgggcttgggctggggggtttcggccttggtttaacccagctggaaggagtgtggaggtgggagtggggatctctgccttccacccacctaaggggtactaaatttgaacacagtggctgagtggtccggggacctccaatctgcaccccaaacacccgccctctgaagctgtgctcataacagaccccaaaattcccctggaagcccctccagggttgaattggggcaaatgagtggtgagtcattccttcccttaggcccaggaagtgactcatgcccagccgttgtcctggtccccatccctctgcccgacaccccccttcaggtctccctggattattggggtccccagtattcccagatcggcagggactggacgtcccctcccagcccgccccaggccccacctgccgctcatatcccaacgccctccgttcccctgcccttcccctctgtttccatccaccctcctttctcatggttttctttcttcctcactgtttatctctctgtctctctgttctc

SEQ ID NO: 91037 - DNA, 1030 bp, Homo sapiens
acagggtgacagactctttggctttgagcatctgagtgggacatgacatctgctcactctgaacgaccgtcaggatctgagcctgagaggggtcagcatcctcctcccacaaagtgcatcacccttacgcctcctttcccaccctgggatcccctctgaccccctttcctttctctgttgcagcattctgtgtctggctgactctgccgggagctgaaacccaggactccaggggtgagtctgctgggaagcagaaagcacagtccacagccagagcctggggagggtcctggacccccgcccagcccccttcagcccagggaaagagagggctcgcgcacgagaaactcagcgccctgccccatctcccccagtgccccctttttgtgtattcccttacccctcaccttctgaccgtgctccctgctcttgcaggctgtgcccggtggtgccctcagaactcctcgtgtgtcaatgccaccgcctgtcgctgcaatccagggttcagctctttttctgagatcatcaccaccccgacggagacttgtgacggtacagaggcttgagggcagcgcaggggacatccgcgattatgaggcattgcccagccagtgggggacagaggttgttgtgaggggccacagccttaccttccagactatcatcatggccagagaaaagaaaaagagggcaggcgtggtggctcacgcctgtaatcccagcactttgggaggctgaggcgggcagatcgtttgaggccaggagtactcagaagactgaggggagaggattatttgagcccaagagtttgaggctgcagtgagctatgattgcaccactgcactctagcctgggcaacagaatgagatcgtgtctcagggagagggagaggaaggggaagagggagagggggagaggaaggggaagagggagaggggtagggggagggagaaggggaggggaagggggaaagggagggggatggggagggagagggggaggggaagggggaaggggaggggaaggggag

SEQ ID NO: 91038 - DNA, 1037 bp, Homo sapiens
tacaggcatgcaccaccatgcccagataatttttgtatttttagtagagacggggttttgccatcttggccaggctggtctcgaactcctgacctcaggggatccacctgcctcagcctcccaaaatgctgggattacaggcgtgagccactgcacccggccgccatggggtttaaatttctacaaagagactggggatggggatgtggagcttcctgtccatccctcacctcagcactgttcactgtgtccaaatctaagatgccagccagagaactaagatcaagtgtggtcttcaggaatggcttgctccagctgcagcatagcctgtgcagtgcaacttaagattttttccaaaagatactaagcagcaggccccatgttggggagtcaggatgggggtctctgccctgacagaactcacatctttgggaggtgactccctgtcctgttgtgttccagacatcaacgagtgtgcaacaccgtcgaaagtgtcatgcggaaaattctcggactgctggaacacagaggggagctacgactgcgtgtgcagcccgggatatgagcctgtttctggggcaaaaacattcaagaatgagagcgagaacacctgtcaaggtaagaaccaccccacgtcctctgactttccatccatgaggtttggggtcaccagagccattctggcagcatccagagagcagggccttggttgtagggtcagtgcctggcgtctgagatgggacaggtgcacatgtacctaccccaccaccccagagaggcagagtgatgtgaggattaagggctgactctgggaccagctgcctgggccaaatcctgataaccaagtgtatgacgttggccaggatacttattcagaaaccgctgtccacatgtgagatgtgataacgttatcatgcttgtaattccagtgctttgggaggctgaggcgggaggatctcttgaggccaggagttcaagaccagcccatagcaacatagcaagaccccacccctataaaaggggaggcgaaggcaggt

SEQ ID NO: 91039 - DNA, 1027 bp, Homo sapiens
ggaggcggctccagcctggactagccggcaagagacagcatcactggggaccatcgtcccaggcccgatcctctcctgtagtcagtcctggtctggaccactcaaggacagagatggaagcttgaaccccattcagcagggcccacaggtctctgtccctggtggaatgacaagggatgagaggacagatacatctgccacccctcacccatcggcacctgtgccctctctagccacaggcccccgctcacggccagttctgcttagatatggattctcaccaaatcctgctatttccatatccatagatcctttcctggggatcagaaaaaagcatctttgtagactcggggctgcctggctggacatcagcccccactgttcaccccagcctggtgcccactgtccgggcagccctagcctgtcccacatcatcccgcactctccccacccctgctattgccctgcatcgcgggggcactggcttagggaggggtcttggtccatgcccatgaagctgggctctcagagctagtgtggatgggagagcagcatcctgctagggccaccaggatgctgagaatttggccagcgagcggccgttctgtgggagtcaggccgagggccaccgttgggaaccaagacgtgtcctgcccaggcgcacggcatgtcccctgcatttggttctcaggaaggccccaccctggcctttgcccggaatccttaggctgggacacagatggctgggacaccccagcttggagctgcccaggaaggcagaggagaaggggaggacttggctgcttccagccacatctggacaacagaaggactgagccaccaccctcaccataggatgcctctgtgtggattggaaaagggaggagacagtggtgccttccagatgcttccgtgccaggaaacatggcggaccctcagccctgaaagctgctcacagctacgggcatccttcaccctctccttcctcttgcagatgtggacgaatgtcagcagaacccaaggctct

SEQ ID NO: 91040 - DNA, 1023 bp, Homo sapiens
cttctgtagtcccagctactcagaaagctgaggtgggaggatcgcttgagtctgggaggtggaggttgcagtgagctgattatgccactgcactcaagcctgggcaacagactgagaccctgtctcaaaaaaagaaagaaaaaagaacaggaaatcaaaacagagcctggcaggcagcccgtgcccaaccagtgttaagcgctgtgattcatacgtgcatgcaggcaaatactcaatccgtcgcttgttttctggttactgcatcatctcagtgattcccttgtgcctgtgggtctccagtgtgtcccctggtagggggtgacatccaggtccttcaggcaacccctgtggtctgatgctccagcgattctgtcacccgccaccccctagaatgtcatcaaattggtggatgaactgatggaagctcctggagacgtagaggccctggcgccacctgtccggcacctcatagccacccagctgctctcaaaccttgaagatatcatgaggatcctggccaagagcctgcctaaaggccccttcacctacatttccccttcgaacacaggtgaggccttggcctggcctgccctgccccaaccctgggccccacctggtacctggggtccctaatcacaactgcccctctcccctcagagctgaccctgatgatccaggagcggggggacaagaacgtcactatgggtcagagcagcgcacgcatgaagctgaattgggctgtggcagctggagccgaggatccaggtagcagcggtggtctggagggggagcccgtgggagagagatggaggtgctgggatggggccagggtgaggttcagaatagaacaactgactgggcgcggtggctcacgcctgcaatcccagcattttgggaggcccaggtgggtagatcgcttgagctcagaagttcaagaccagcctgggcaacatggtgaaacccggtctctacaaaaaatacaaaaattagccaggtgtggtggcacgtgcctgtagtcccagt

SEQ ID NO: 91041 - DNA, 1035 bp, Homo sapiens
aaccccatctctactaaaaatacaaaaattagctgggagtggtggcaggtgcctataatcccagctacttgggaggctgagacagaagaattgcttgaacctggggagtggaggttgcagtgagctgagatcacgccactgcactccagcctgggcgaaagagcgaaactccgtctcaaaaaaaaaaaaacaaggaacaactagaaactgactcatcgggaggggctcctggcgtcatcgtggtggactggctgagcctgagctgggtcatcttgggagggaggatagagcatgggaggaggacaacgggagtaggcagcgagtgtgtctgttccccaggccccgccgtggcgggcatcctctccatccagaacatgacgacattgctggccaatgcctccttgaacctgcattccaagaagcaagccgaactggaggagatatatgaaagcagcatccgtggtgtccaactcagacgcctctctgccgtcaactccatctttctgagccacaacaacaccaaggaactcaactcccccatccttttcgccttctcccaccttgagtcctccgatggggaggcgggaagagaccctcctgccaaggtctctgctcactctgctcacttcctcaaagataacccagggccttcgcacatgctgggcctctctctgggatgctctttcccgacgtgactcagtcttttatgtttctggccttctgatttgggccttccccaacctcattacttatttatttccttactttatttatttaatttaattaattaatttatttattttaagacagagtctcactctgtcgtccaggctggagtgcagtggcacgttctcggctcactgcaatctctgcctcccaggttcaagtgattctcctgcctcagcctcccaagtagatgggattacaggcatgcgccaccacacctcgctgattttgtatttttagtagagacggggtttctccatgttggtcaggttggtctcaaactcccgacctcaggtgatctgcccgcct

SEQ ID NO: 91042 - DNA, 1106 bp, Homo sapiens
aacctgggcgacagagactccgtctcaaaaaaaaaaaaaaacgggcaagtggtgcccccttggaatgctctccatggggagcttttagttgacatctcacaactggtacgggatggacaggcagaggagcggagctagtggctgcacccagtgtatagttgctgggttgtagagaagaggccaaaggaagaggctgcgaagggtgtgacgtggggacacctgggctgtgcaaccatgcagatatatctgagcaaccagtagggctccatggagaactagctgcctgtctggttgcagctggacctcattacctgtgggcacttgaggatgcctccagctacttacctccacgtcataatgagccataaggatcgcaaagctgctcaggtggctgcattggcaggtggtgctgccgttcttgctgcccagcacctggcagccctcggtggcccagtgccctcccctgtcgctgtcactcttccagaaggcacagagcagctcctgccgtggcccaggcatcacgtcctgtgggcagatgggggtggtcagaaaggttggcctggagctcactcttaggtcctgggcttgggctgagtctaagagggctgctttttactagatgagtattgaccgagcgcctactgaatgtaacaggtttggagacacagcagtgaacagggcacacacaagtacctacccttgtgaggttgacataagagtgggagaggtggccaggcatagtggctcatgcctgtaatcccagcactttgggaggctgaggcaggcggatcacctgaggtcaggagtttgagaccagcctggccaacatggcgaaaccccgtctccactaaaaaatacaaaaattagctgggcctggtggcaagcacctgtaaatcccagctacttgggagtcctgggcaggagaatcgcttgaacctgggaggtggaggttgcactgagccgagaatgagccactgcactccagcctggatgacaagagtgaaactccatctcaaaaaaaaaaaaaaaaaaaaaaaaaaaaagtgggagaggcagattatgacataaacctaacgaataagtaatgtagatagtgcattagaagg

SEQ ID NO: 91043 - DNA, 1017 bp, Homo sapiens
ctccacctcccaggttcaagcgattctcctgcccaggactcccaagtagctgggatttacaggtgcttgccaccaggcccagctaatttttgtattttttagtggagacggggtttcgccatgttggccaggctggtctcaaactcctgacctcaggtgatccgcctgcctcagcctcccaaagtgctgggattacaggcatgagccactatgcctggccacctctcccactcttatgtcaacctcacaagggtaggtacttgtgtgtgccctgttcactgctgtgtctccaaacctgttacattcagtaggcgctcggtcaatactcatctagtaaaaagcagccctcttagactcagcccaagcccaggacctaagagtgagctccaggccaacctttctgaccacccccatctgcccacaggacgtgatgcctgggccacggcaggagctgctctgtgccttctggaagagtgacagcgacaggggagggcactgggccaccgagggctgccaggtgctgggcagcaagaacggcagcaccacctgccaatgcagccacctgagcagctttgcgatccttatggctcattatgacgtggaggtaagtagctggaggcatcctcaagtgcccacaggtaatgaggtccagctgcaaccagacaggcagctagttctccatggagccctactggttgctcagatatatctgcatggttgcacagcccaggtgtccccacgtcacacccttcgcagcctcttcctttggcctcttctctacaacccagcaactatacactgggtgcagccactagctccgctcctctgcctgtccatcccgtaccagttgtgagatgtcaactaaaagctccccatggagagcattccaagggggcaccacttgcccgtttttttttttttttgagacggagtctctgtcgcccaggttggagtatggtggcacaatctcagctagtgaggttcaagggattctcctgccttagcctcccgagtagc

SEQ ID NO: 91044 - DNA, 1048 bp, Homo sapiens
cttcgtgggctccaccatcttcctggccggcatcgagaacgaaggcggccaggtgaggtcccgccccgctccctcctgagctctggggtcagggaggcctgggaggggttagccccgcccactcccggggctcagtcgggtaggcgggccctggaggcatgaggccccgcccctgtccgggatctggccccgcccaccggggggtcgggttgtctctttaaagggcgctggctttggagctgcctggccacaccccgagtgcccgctcgcttctgagcgttgttgggggtgggccctggggggaaacctggcccccgctccagacccgcccaccctccggctgtggtcccgcccactctcgggacctggcaggcgactggctctggcgccgcatgcccctccccgcgctgacgtcgctccgcccctccgtccccgccccgcaggtggggctgcgctgccgcctggtggccgggctgctgcactactgtttcctggccgccttctgctggatgagcctcgaaggcctggagctctactttcttgtggtgcgcgtgttccaaggccagggcctgagtacgcgctggctctgcctgatcggctatggcgtgcccctgctcatcgtgggcgtctcggctgccatctacagcaagggctacggccgccccagatagtgagtgcagcgagatggggcaggaggaaggcggggtgctgggcctggggctcacaggcagtgccacacacaatgtccggccgccctccgttccgctcctggcttcctggggcactgatgggacccctcccttccctcctagctgctggttggactttgagcagggcttcctctggagcttcttgggacctgtgaccttcatcattttggtaagtacccactctccctccaccgaagcccgagcgccacaggcccaggcccggctggaccatcgctctcgccctctaacccacaatctgctccctgcccagtgcaatgctgtcattttcgtgactaccgtctggaagctcactcagaagttttctgaaatcaatccag

SEQ ID NO: 91045 - DNA, 1045 bp, Homo sapiens
ttcccggccatcgccatccaccggggcatggcccaggaggagcggtgagtgcgagccgcccgccaaggctgcagggagcaccaccaggagcccagtgtctgacggcctccacttgtttctcctgcaccccagcctgtcacgctatcagcagttcaaggatttccagcggcggatcctggtggccaccaatctgtttggccgggggatggacatcgagcgagtcaacatcgtctttaactacgacatgcctgaggactcggacacctacctgcaccgggtgagcagcctcacgggcatgttgctttcccctggcggtggggtggggccccagccctgcttttcctcaagtcctgaggtagtatctgtggcctgaccctgatcctgtctgcctgcaggtggcccgggcgggtcgctttggcaccaaaggcctagccatcacttttgtgtctgacgagaatgatgccaaaatcctcaatgacgtccaggaccggtttgaagttaatgtggcagaacttccagaggaaatcgacatctccacatacagtaagtgccttgggcagggccaggggtctggggcagagggttcctcccccggcccttcagttcactgcatctcatgtcttacagtcgagcagagccggtaaccaccacgtgccagagccgcccacccggagccgcccgcatgcagcttcacctcccctttccaggcgccactgttgagaagctagagattgtatgagaataaacttgttattatggaagcctggctcccaccccatctatttcttggtcatcttggcctttcacggacaccctgggcccggcctctgaatcaccaccagcaggcaaggccatcttctgtatgcatgtgtttaattttaagtgtcaacactgaaaaattttaacagataaaaacacattacacaacgtctacaaccttcacaacagtgagaacctcctgcccggccaggcagggcaggcctctgtaccgtgagcctcaggcagtggccccaaggggcctcgccatggggcctctgacatcagt

SEQ ID NO: 91046 - DNA, 1825 bp, Homo sapiens
cactgtccttgctgttaggccctggctgtcttctcccattgtcttgtgtgccactgtcctggggagacacttcagtgaattctggtgtcttgctcccgagtcaggccaggtgcacatctttgggcttcatattggcgcccgtgccctcgttatctcagagcacatcctgaaggatgaaggtgctgtggagggctgtggtgtggtccagtgtctgatggcacgggtgggaagaccggggccgcccgagtgccgagattcaggaaatccttagagagccaggtcccatgtcacccaggcaggccaggtctaaccattacattatgcgggccattttctgttccattttctgtttcttattgtgggtcctggtgttgggagacaggtttcaatagctgtgggagggtatagggagtgaggggtggggaagggccgtgagaagtgggaggcatttggaccgggccttcaaatggcctgtgatgttgggtgcagtgtcagggggactgggttgggtggactctggtggggaaggggtttaggacactgcctaaggtaaggccctcttcttatgccacttcccaggtgacggtcctggtcatgtgccacacgagggagctggccttccagatcagcaaggaatatgagcgcttttccaagtacatgcccagcgtcaaggtgagtccctcgggccagactggaccaggcgccacttggtttctgcagctttgttagcctcggctctggcccagccagcatttaccaagcttggcaggggcagctgcctttgaggtttgcggtggtttttgctccttaaaagcctgatgaattatgcatggctcccaggggcctgcgcaggtcccagcctggggctgcctttgagtggagccccgggaggctctcaggcctgccttggtcccctgaggcctcctgttcgcaggtgctgggccgtgcaggttggggccttgggccgtgtatcagcatggagcggtttcctcctcatccccataggtgtctgtgttcttcggtggtctctccatcaagaaggatgaagaagtgttgaagaagaactgtccccatgtcgtggtggggaccccgggccgcatcctggcgctcgtgcggaataggagcttcagcctaaagaatgtgaagcactttgtgctggacgagtgtgacaagatgctggagcagctgggtgagtcctctgcccttgcagccccagctgagagtcagtgactaggcgggccccatagcaggcggaaggctcttgagtgggttacatgggcggccggcaggcggggctcctgtggtgatcttggggaaagctctgctgctggcagagggatgtgctgtttctgagcccgagccgaatgggaccacggggcccaagcaagcccccgtccctcctggacgtaaaggcatgcacacatacctctgggagtatgaggcttctgccacctgttgggttggttccaggccccgcctgccctcagtgagccccgacagggccggtgggagatgggcttgtgtcctgggaggcagctgcagctctcaccccagcggctgtctctgcctcaggctcccctccctgaagcgtggctcgaggcgcacgggcacggctgctccgcgccagcgtgtaagtggattgcagctcctcccgcgcctgcgctcgctggccaccccccagcccctcaggcaccaggactggccactcccgcggctcactctgccctcgtcacggtgccactggctccctggcacaggttgggaggggtctgggtctggtctggggtgggggtcctgcatggcagacgctcatgcccacccatgt

SEQ ID NO: 91047 - DNA, 1631 bp, Homo sapiens
ttgaaccctggaggtggaggttgcagtgagccgaggttgcgccactgcactgcagcctgggtgacagcaagacttcatctcaataataataataataataataataataataataataataataataaaacaggtgatagcagcttggggccagcatggtagcataggtgagaactggccagagggccttggtgggattcactgcctcatggacagggaggttgagagagagaaaacagccattgagacaatggaattgctgtttctgagccgggaatgagtgacagcgaggccaaaagtggcctaggatcctcagcatccagcctcaggaagaattgtagcagctgtcaccctctgctccaccccccactggagtctggggtaggggaggaggacgaaagacaattgtcctcatgtttgggtcccttgcacccagcaggcacttggtatgcattagattaataaagcaaagaggtaggcagactttgtattaattccattttccatcttctcagctttatttttattggcccaggcccaataggaggcctttcatgagagcacttaattattcccctgtgcagaccacagagagtgggagaagctggggctggacagatactgcttgctctctcgcaaactcagttcccaccagcatcctggcagccccacccctgggatctttgggctcctgccccatgaaagcccagtgggttccttggggagtgatagggagggggcttctctgggctgagtagtctgaggaggttcactggagctgaggcttgcgtgtggagaaggaggcatttgtgcagagacctgggggcagagcattcctggcggtgacagccaggttcaaaggcttggggcaggggctccaggggtctgagcagctgaacaaggctgggggtggtgtgggatgaggtgagcaggggtcaaaccaaggggattgcctggcctgtggtgagagttgggattttaactctgtgagccatgggaagcccttggaggtggagggtgttctgtctgtgggtgtggccagaggggcatgggggagagatggggtagcttgggggtggggaggtggagacagggcgaagctgcgaggtgcagcccaggtagagctgatgggctcactcatggaaggaggcggcagagaatgccatttgaatgaagcttcatcatccttctgtgcccactcgcgggaccctgcctctctctcttctcagcatcatggcagaacaggatgtggaaaacgatcttttggattacgatgaagaggaagagccccaggctcctcaagagagcacaccagctccccctaagaaagacatcaagggatcctacgtttccatccacagctctggcttccgggactttctgctgaagccggagctcctgcgggccatcgtggactgtggctttgagcatccttctgagggtacgccttctgggtgttatcctcttgcccaggtcctcaccaagacaagaccagccctgcccgcccagagcggtgccgcctccagtttgccgtgggtgagggaggggcccgtctgtcccgcggatcagttgtgcccagcggggcctgtggctgccctcggcagtggggcgttctgctttgaccaggcgga

SEQ ID NO: 91048 - DNA, 1048 bp, Homo sapiens
agaaatccaaatactgcaaaatgttctgtccatttgagtcattccaagctccctattcttttcagagcctacactgtggaggacccccaggccgcagattgatagcaactgggacagttctggtttcagcgcccagcgcagacgccactcttcgaaaaggtggggcacacgccaaaacgcaatcatccggtcttcagttatcagtactaaacatggcggctcccaccgagcaccacacccagatcacgagaccgcgcgctgtcggagccagtctgtcggctcactggggcgcgcctacttttagattgaccaataaacgcgaggcgtaaggcacgccctctttcttcccgtctccgccaataatctcccggtcccttccacaggacccaatcaccgcttcggcctctcttgaatgaaaaggcagcggcccagtcagcagagcagcagcccgacgcaagaggcaggaagcgcagcaactcgtgtctgagcgcccggcggaaaaccgaagttggaagtgtctcttagcagcgcgcggagaagaacggggagccaggtgagcagcggatcccgggcgcggggccgcggtgtggggacgtctgaactgagagcgagaggacgaggggagacgttgggatctaaggggagggggagaaagggtcgcgagacggtgggggcggggcggttggtgtgtcagagcgctgtgtgttggccgttgggcaccggggcgcatgcgctaggggtgggccagccgttggcgcgcggtgctcggggctcggggcccgcttctcggaggggctgtcatggcctacggcgctccgagccccacttggagtctgtcagttcgtccgaatagaccccgcggcggcctggggccatttggagagggacgagggggtgacgccggggtctggggcctgggtgggagaagttggagctttcagttgtcaggggtttctttgggtccgagggacttgatccctttcccagtctaccttcttcttggtctactttttacgggattcgggattctgagatttagagcaaataa

SEQ ID NO: 91049 - DNA, 1741 bp, Homo sapiens
gcaccttggacattctctagggacagggagcaaggactgtccctgggtttcatctagaggaacaggaggtcccttagatgccctggagttggccccgcgcgaggggtgctgggagttgacaggaaagaggaagtggcagccgagaggccctggtggggctgaggttcaggaagagggcggggccctcagcccggacccaggatggcggaggccaataacccctcggagcaggagctggaggtggggtccagggtccctgtgggggcaggcagaagggggccccaagtggcacaggccagtagtccttccccgggtacttctcagtttgggaacaaggagaggagatggggcactggcctcagagttctctctctggaggatgagagtatccagtgcccttcggggctcccagattggggagagacagaaggaaggagaccgggctctgttctttagggtcccagttgttgaacataggagaagagcagatgagggtcttcaagaccccatagtttgggggtacagcagagagaagacttggcctgcccttgggataccctagttttgggggtgtagccaaggaaagatgaggcctgccctcgggatgccatagtttcagggtacaagtgagggaagatggggcctgtcctcaggaccctgtagttttaggggtacagcagagagaagacagggcctgcccttgggccctcttagtttcggggagcagcagagaaaagaaggaatcttcccttgggaccctctagtttgggggaggcagcagaagggagacagatcttattcttgagacccccttaatgtgggggacgctgtggtggtgggggtgacaaggccctgctcttgagacctcccagtttggggaggtcaggaagcagtggcaaggcctcgtcaccttccagttttgggagtcagaggaggtagagcaggccctgtcttgggagccccagtccagggcagaggctgggccaggctggctgcatgtggtctgcacctggagttctcctagctccactgaccctgttctgtcctccgcagagtgagcctcgcagctggtccctgctagagcagctgggcctggccggggcagacctggcggcccccggggtacagcagcagctggagctggagcgggagcggctgcggcgggaaatccgcaaggagctgaagctgaaggagggtgctgagaacctgcggcgggccaccactgacctgggccgcagcctgggccccgtagagctgctgctgcggggctcctcgcgccgcctcgacctgctgcaccagcagctgcaggagctgcacgcccacgtggtgcttcccgacccggcggccacccacggtgagctgggatgcctctggggatgcgggactccagggattccactgctcactggctcacccatggtctccagagccaggttaacccatctccacggacccccagggagatgcatgccatgacccccgtagccaccaacacccagagaggtgcatacagccacaccagcacccggtaacactcaagaccgtgcatgctgtcacatgaatacctctagacacagccacgccaacacccaggcaacattcaaggatgtgcatgcagtcacacaaacacctaaaaaaacagccacaccaacacccaggcaacacccaagggtgcacatactgtcacacgaatacctccagacacagccacgccaacaccccaggcaacactcaaggatgt

SEQ ID NO: 91050 - DNA, 1070 bp, Homo sapiens
cagtagcacgatcttggctcactacaacctctgcctcctgggttcaagtgattctccttcctcagcctcccgagtagctggcattacaggcgcgtgccaccacgcccagctaattttttgtatttttagtagagacggggtttcgctatgatggccaggctggtcttgaactcctggcctcaagtgatcgcctgcctcaacctcctaaagtgccgggattacaggcatgagcaaccttgtctggctactgccagcattttctgactgggccctctctcccatttcaggtgaagtcagcactgtgcttaagctggataacacagtggtggggcagacgtcttggaagccatgtggccccaatgcctgggaccagagcttcactctggagctggaaagggtgagctgcgttggaggacagcagggcctagaggaggaggggttccatgcctctggcaccctgagtgatggccctcttcctctccctccaggcacgggaactggagttggctgtgttctggcgggaccagcggggcctgtgtgccctcaaattcctgaagttggaggatttcttggacaatgagaggcatgaggtgcagctggacatggaaccccagggctgcctggtggctgaggtatagcccacacctgaccctgagaaaatgcttcttctccctcactgccccattcccagtttcctagaaggggaaaatatgttttaggtctggctcttccagaaggggaagataagttttaagtcaggcttttctagaagaggaaaatagattttagatccagctcttctagaaacggaagatatgttttaactctgccttttctagaaggagaagatacgttttaggtcaggctcttccagaaggggaagagacgttttaggtctgcttttttctagaagggaaagatatgttttagatcaggctcttctagaaagggaagataggcttttgatctgcctgttctaggctgggcgtggtggctcatgcctgtaatcccagcacttcggaaggctgaggcaggaggatcacctgaggtcagggagaccagcctgggca

SEQ ID NO: 91051 - DNA, 1040 bp, Homo sapiens
tgaatccgggaggcggaggttgcagtgagcgaagatcacaccattgtactccagcctgggcaacaagagtgaaactccatctcaaaaaaaaaaaaaatgagctggacgtggtggtgcatgcctttagtcccagctactcaggaggcggaggtagagttggaggctgcactgagctatgactgcgcccctgcactccatcctggaagacagagcaagaccctgtctctaaaaaaaaaaattcaggttgggcatggtggctcacgcctgtaatcctggcactttgggaggccgaggcgggtggatcacctgagatcaggagttccagaccagcctggccaacatggtgaaaccccgtctctactaaaaatacaaaaattagccagccatggtggtgcaggcgtgtggctggaggagagtgagtgaggggctgcgtgggaggagaggtgaggacagagaggtcgggggcagatcttgcagggcctcggaggctgctgtggttatgagggcatctctgactccccttactctggcctcctctctccgccacagagctcccccatccaggaatccactgctcccgagctgccttcggagacccaggagaccccaggccccgccctgtgcaggtgacaccactccctggccccctgtccaccacccctgcccgctgtccttgttctcaccagtggcctctctccacagccctctgaggaagtcacctctgaccctcgaagatttcaagttcctggcggtgctgggccggggtcattttgggaaggtgaggtggagggcagggaattgggagaccccccaggtccctggctggccgctaaaaccacccctgcccactgtggttccaggtgctcctctccgaattccggcccagtggggagctgttcgccatcaaggctctgaagaaaggggacattgtggcccgagacgaggtggagaggtggggacctgccgtggtcctctggggacctctttcttctcttttgggaaatgacagagcagttctctccttggagctacagggagag

SEQ ID NO: 91052 - DNA, 1057 bp, Homo sapiens
gccaagatcgcaccactgcactccagcctgactctgtctcaaaaaaaaaaaaaaaaaaaaaaaagaacccctcttgttgtggagaagcagaatgctattgccttccacacatggttgtcaggtgctctctacacagtgcctaacccctctaaacattcggtacaggcactgagattgtgcctggtcttcccagcatccttttgataatcaggaacccaactgagaaagactgaaacaagtaaagaaatttattggtctggatctgaaaagtccaggagtgtgctaccttcaggcatggctgtatccaggtgctgagatgacgtttctcagttctgcttccctctgtatgggctttggttgccatctgggagtctggagtaagtggcggccatggtctctgacttctatcccccacccctccccagcctgatgtgtgagaagcggatattggcggcagtgaccagtgcgggacaccccttcctggtgaacctcttcggctgtttccagacaccggagcacgtgtgcttcgtgatggagtactcggccggtggggacctgatgctgcacatccacagcgacgtgttctctgagccccgtgccatgtgagcctggaccccagcccgggcccctgcctcccctacagcatctgacacttagtccccccgagaggctggcagcctgcttctcacccctccaccctcaggccttgcttccctcagcctcccagagctttggggagactggggggcttttgaggatgtggaagccaggcttatgtgaccctccctccttgcagggtggccccacccctctcagcagcctctctctctctgcagcttttattccgcctgcgtggtgctgggcctacagtttcttcacgaacacaagatcgtctacaggtgtgtgcgtgtgtgcatgcatgtgcacactgcccgttgtggggacaggacccagacccccgctcatccctctttccacccctccaacccccaacagggacctgaagttggacaatttgctcctggacaccgagggctacgtcaagatcgcagacttt

SEQ ID NO: 91053 - DNA, 1008 bp, Homo sapiens
gaggttccatctttctatttccaagccaggtttcaatgccctggtgctccccacggtccgggggttgtcaccagctgcagacagcagccttgtgaagctccagggggtaggaggccttgtgggagagggggcaggatttgaaccctcagtagtccaggaagctctggccctgcctggaagcctggtggcctgcagccagaaggaacagtgggagggggcaggtggcttggtgccagctcctaattcaatttggagcctgcggaagatggatttcagctgctgaattctttctcagccccaatcttccccctctcccaccccgaagccacacaggtccaacagcagatagattctttatgttcaagacagcaaattcagatacaaaaacccaccgccatcgtccctccctccctcctgctctgggccagggatgggcctggaaggagagatgggaggtggggaggaggttgcggggttcacagcagactcgtgtcaaatgcggaggtaacaggctccacagggagggggctcctctcaggaggggtgagggcattattgcatttgctggggggaaggacaaccctctcccctgtattccctgcgtcaggaaactaggaaggtcatgacccccaaacagaacccaaggccccagggagacagagggaccagtttggcagctgatggtggaaagtggtggaggcgggggtggccgcccaatttggctgatccctcccctccctgtgcctgacccagctgaggtaggtggggaacagggcacaggggggccggggaccccggccagactgggaaccagggaggggatggtaccgattggagcggggcagggggcctggccccacctcccctcaccatcgtccttgggctgctgagctaggctcaggctggaggctcgggtcctgacgtcagtgtccctgctgggggcccccaccaggttgcgcccgggtcatcatcgcagggtccgggggcagtcctagtagcggccgacct

SEQ ID NO: 91054 - DNA, 1194 bp, Homo sapiens
gtgcacacctatagtcccagctacttgggaggttgagatggggggatcactggagctcaggagttccaggccagcctgggcaacataatgaggctcccatctctaaaaaaaattattttaactatgtgggtgtggtggcacgtgtctgtggtcccagctactcgggagactgagacaggaggatcacttgagcccaggagttggagaccagcctgtgcaacatagtgagaccccatatctccacaaaaaatacaaaaattagccaggcatggtggcgagcacctgtagttccagctacttgggaggctgaggtgggaggattgccggaatctgggaggttgtggctgcagtgactatgatggcaccactgcactccagcctgggtgacagagcaagaccctgtctcaaaaagagaaaggaaaactaaatcctagtcctagcagagctgacacgctaatgtgggccctgctgtggccctggctcaggctcagtgggtgatgagttactgggatggaatccccctagtcctctcccagctctctcccttcgccctccagtggtgattagaaaagggggagggagggggaagaggtttcagcgtctcccacccctgcaggtgatgttctgcaccctgaacacccacaaagtggacatggacaagctcctggggggccagatcgggctggaggacttcatcttcgcccacgtgaaggggcagcgcaaggaggtggaggtgttcaagtcggaggatgcactcgggctcaccatcacggacaacggggctggctacgccttcatcaaggtgcctggggagacggggcaccccggaggcctgggagtgagggtgggccatgggaccccggaaaccagggcagagccccaagggctgatgactccccgcccccgcagcgcatcaaggagggcagcgtgatcgaccacatccacctcatcagcgtgggcgacatgatcgaggccattaacgggcagagcctgctgggctgccggcactacgaggtggcccggctgctcaaggagctgccccgaggccgtaccttcacgctgaagctcacggagcctcgcaaggccttcggtgaggagccgccccctggacctccccagtggcgctgctcgcatgggcgcaggcggtggtgccgggagcggccagcaggtggcgcccaagcctggcctgccgaa

SEQ ID NO: 91055 - DNA, 1069 bp, Homo sapiens
cacccgaagcggaagacgcggattggctgcgagcaccgagaggcagccgctgattggccggccgcgggcgtcggccccgccccccaggcgccgctgcgggagaggcccggtctggagtttgcggagggccgagccgggtgcgcacggggaggcggaggcagcggcggcggcggcggcggcggcggcggcggcggagcaggtgagtggcctctgcgagaaggatgtgtctgctccgggggcctcgggggtcgcgggcctgcgaggatccggccgatcctgcagggtggggccggcgccgtggacgcgactggaggtctaggctgcgcgcggggatgccggaggccccttcccaggggaagcgggggtggggggtggtgggggcagctcccttcctgctggcgggcaggggacaaacgcctcccaacgctgggctggggtttctgggcttgcccctccccccgtcccccggctggactgtccccatcccagcgtggacaggcgcggggtcagtgtttctgaccctttcctgggcacttcccctgagctaaccgcgtctgaaccctccagggccttgggggggacgcagtgaggaccacggtctgaataataatcgtcatgaaaaactccacctcagctagcatttattggagagcttccgtgtcaggcatttaccatgaggataattgactctaaacacctcatgggaggtgctgtgccttcttgtaaaaaaggtgaggcagcctacccagagaggtggagtgacttgcccaaggtcacacagctagtaactggcacatctgggactggaactcatgccccagggtccagaactggagtcacacccactagactggataccaataactccacggctcagttgttgctgagtagctccggccccctacccctcccaccccctaccccgtactcatcatcagggccacacctgctggtcttttgctttaccagccactcaaacaggaagctgccctcctttcccttctccccagagctggagagggcaggtctaactacctgggtccagagaagagagtggcgtctgcagggg

SEQ ID NO: 91056 - DNA, 1627 bp, Homo sapiens
ttatctatggcagacggcctctgggcaagagctgagcctcttgagccagcttccatctaatgctgtccttttgcttttcaaggctctgtgtggctgcacagtgaacgtccccactctggacggcaggacgatacccgtcgtattcaaagatgttatcaggcctggcatgcggcgaaaagttcctggagaaggcctccccctccccaaaacacccgagaaacgtggggacctcattattgagtttgaagtgatcttccccgaaaggattccccagacatcaagaaccgtacttgagcaggttcttccaatatagctatctgagctccccaaggactgaccagggacctttccagagctcaaggatttctggacctttctaccagttgtggaccatgagagggtgggagggcccagggagggctttcgtactgctgaatgttttccagagcatatattacaatctttcaaagtcgcacactagacttcagtggtttttcgagctatagggcatcaggtggtgggaacagcaggaaaaggcattccagtctgccccactgggtctggcagccctcccgggatgggcccacatccacctccagtccctggccaggggtgagaggcagaccagcagatggacttgatccctctgtgtctttttgcttctggctggtagataatgtcaacctgcagtcttgattcccagaccctgtacactcctccttttctgttgtgtgatcagtttgtgctttattctgtatttgtctcccatgtcttgctcttctcctggagaattctgtcttctctttggccatctcaaattgagaacctaaactattcctgcagaactgcctggttggcgtccacaagcaatacctctcgttccagcaggaccaagggagccagcctccagtgagtgactccagcaagtgcagccacctctcccttgatggtctgggagcctggcctcagcaaggggccttcctgacctctggctccagtgaagctgaatgtcctcactttgtgggtcacactctttacatttctgtaaggcaatcttggcacacgtggggcttaccagtggcccaggtaattttttgtttcatggactatggactctttcaaagggatctgatccttttgaattttgcacagccctagatacaatcccttttgataaaagggtctttgcttctgattacaggagcactgtggaacgtctgtaaatatgtttttataattccatgtatagttggtgtacactcaaaacctgtccccggcagccagtgctctctgtatagggccataatggaattctgaagaaatcttggggagggaaggggagttggaacaaatgtctgttccctggaggccagtccagtgctcagacctttagactcattgtaagttgccactgccaacatgagaccaaagtgtgtgactagtcaatgaagtgcgacagcattaaagactgatgctaaacctcaggggagcggtcctgtgactctgtttgagggttctgctggttttgggggtggagtggggagctgggcatccttccaaattcaatcaaggtgagagggtgggatgggcaggaggcaagtgccctgcaagggaaacgtaagtctcc

SEQ ID NO: 91057 - DNA, 1047 bp, Homo sapiens
gacgaagtctcgctcttgtcccctaggctggggtgcaatggcgtgatctcggctcgctgcacctccgcctcccgggttcaggcgattctcctgccttagtctcccgagtagctgggattacaggtgcccaccaccacacttggctagtttttgtatttttagtagagatggggtttcaccatgttggccaggctggtctgaaactcttgacctcaggtgatccgcccaacttggcctcccaaagtgttgggattacaggcgtgagccactgcgccggcagtgtgagtgcttcttatctagtaacatatctaaatcgtgtactaaacataagacgtagatgctgttcttatctctacttgactgatggagaaactgaggcacagaaagtgaagcgacttgtccacagctagtggctagcagagctgggattcttctagaaccagagtgggctttgctgtgggtcgtgcactggggaaagaatcaagtgtgtggtggtggtgaaggacttggaggccacccactctgtccttgggacagtgacttaacctaagcttcagttttgtcaccctgtgaggccaggataacgacacctgggggcctgtgggggagtgtgaagtgctcagcatgcttcgcggcccacaggcagggtaaaaatccttaagcggagagggacccacgttaggcaggtaaggacagatcagcatccccagggctgcctgagatgcttttggcacctgacctctttggaaggcctcaaaactcttttttttctttttttttttttttgagatagagtcttcctctgtcaccaggctggagtgcagtggcgtaatcttggctcactgcaacctctgcctcctgggttcaagtgattgtcctgcctcagcctcccgagtagctgggattacaggcacgtgccaccatgcctggctaatttttgtatttttagtagagacggggtttcagcatcttggccaggctggtcttgaactcctgacctcgtgatccacccgcctcagcctcccaaagtgctgggattataggcat

SEQ ID NO: 91058 - DNA, 1002 bp, Homo sapiens
tctggccgagcaggtgtggcctgtgcagggttcctggcagctgagccctaggtcttctcagccatcctggcattagcaggttgacttgatatttctggaagtgggaaggaaagggagccgagagggctgagccgctgagccggagtccagatgaatgtgccggagtctctgcatttgtgatgggggcgaggtgatgggggcgaggtggccggcgtggctctgggcatgatcgggccaggcctccgacctctatgctgggcattggctggacagggagctcaggcgatgagtgcagcagcgcttgtgcccggcgcggggatggtgagtgcctggctggccagctgcaggacctgtcaggccctttgtgtctttacctggggccctggttgcactgaccagggctcgcacccccagccaggcctcttgtgccccagactcgggagatgcttcctaccaggaagtgcagtcccctgcggggtccgagagagcctgccggagctttgagctcaacaggtgggctgtgcggcaccacatcagctctgcaagggggccctggaggcccatgtgtggtggggtatggcctggctttcaacatgcacgcgtggtcttctgggctctgggatttactgcttagatcttggcctcttcatctgtgaaacggagctaatggctcctgctccctccggctgctgcaggagagatgtctgggaagctgtggcagttccagccccgggcagggaacgtgaaataactgttggtcgctgttctcactcatcaccattaggcaggtcacgtcctaggacacacagaagtttcaggttcataagccatgggagatgaggccggcccagaatccaagcttcccgctctggcccgggtctgcccctcttctggggctgagagggcaggcaggtgccttgctgggtcctgtggtgtggactctgccgccagcaaggccattgaacctgcttgtttacagccgggagaggactgggaagcacc

SEQ ID NO: 91059 - DNA, 1377 bp, Homo sapiens
ggcttctggggcgtgactggggcaggcgcctccacgtggcactccgcaggaacgcccttgctaggctctgggaaggacaagatcctgcttctgcccgcgctcttctggcttgtgtcctgaaaccgcacaagcctgagggtttgcccccaggtgggaggagctgtggagtcctggggtccttgcaccctgggaaccctgagaagctggcacagtggctgggcagcggaccggctgagccctgccaggctgtgggctgtaactgccctgttctccccgcagatccgcagtggtaccccgcccgccagtccctccgcctggaccccagtgagtacagctgtccactcggcccgccccctgggctcctgggtggcagtgggagaaggcccgggtagcccctgagccctggcccgcctctctgcagagggcaagtccctgaaggatgaggatgttctgcagaagctgcccgtgggcaccacggccacactgtacttccgggacctgggggcccagatcagctgggtgacggtgagtcctgaccctacccacggcctcttttcccgtcagccacgttgggtgactcatcttgcccccctctactctcaggtcttcctaacagagtacgcggggccccttttcatctacctgctcttctacttccgagtgcccttcatctatggccacaaatatgactttacgtccagtcggcatacagtggtgcagtaagtggggcaggtgggaggagggtaggggaaggcagaagacctgccggaccagccccagctgagcctgctccccccgaccagcctcgcctgcatctgtcactcattccactacatcaagcgcctgctggagacgctcttcgtgcaccgcttctcccatggcactatgcctttgcgcaacatcttcaaggtgagagcccgtccccgcctcacccctaagccccgcctttctgccccaccccgccccgcccccaccgagccccaccccaaggcccttcctgtctgccactacgccccagcagagccctacccctaggccccgcctaacctccccagccccgccctcgcagagcctctagaccccgcccgtcctccccagccccgcccccgtcgggcccctaggcctgcctatccaccctagtcccacccctaggcaccgcctatccccccagccccgcccctgcagagccccgccccagtttcacccctaggcccctcctgtccaccacgccctcacagagccctgccctagcctcaccccttggccccgcctatcctccccagccccgccccaaggcccctcctgtcctttcccaccatgctcccaggcccctcgggatgagacatgggcagcatctgccttgtccggtgctggccc

SEQ ID NO: 91060 - DNA, 1025 bp, Homo sapiens
gcctctctgctgtggtggcggggaggcgtgtgccgctgggcttccgccgtatacagccccgcctccgctggaattgggttcccatccctgactcagaaagcaggggcggcgggaggtggctggctgagtccaggacagccacatacacgggttgcgaggctgcccacgctcactctccgcccctgcccacaggtggggtcctggatcggtttcgccatcatgacgcagtgtctcccaggtgagcctgccgccctccctcggcggggccctgcccctccgggccggcagcccctccctgacgcccgttctttcctgcagtggccctgttctccctggtgggcttcacccagatgaccatctgggccaagggcaagcaccgcagctacctgaaggagttccgggactacccgcccctgcgcatgcccatcatccccttcctgctctgagcgctcacccctgctgaggctcagcccctcaacccggtggcattctgggggaggagtggggcccacagctctccagcacccggaataaagcccgcctgccccagtcggactcgggctctgtgtgtttctttccggggttggggaccaccacactgcccttcactctctccccactctcgcgtcggagcagtaagaggggactctggttgaggggcctgaaggcttttatttgactggtccatagggtggggggtgcaccccctacagggccaccttggggtccacttccccgggtccctggcctttggccaactctgccgccttcttctcccgccgcttcttccgctggagcagcctccgctcccgctcaaactccttcatgcgcatcacatagctgggggaaaagcacgagaggggctgtcagggtccctggccaggacacgccccccaagccctgggaagcggaggggccgtcccagagcactgtgggggaggcctctgaagaagacatgtccgagtgcctgtggcttgggtctggggtctgcccacgcaggtggcagggcttcccactggaacctg

SEQ ID NO: 91061 - DNA, 1035 bp, Homo sapiens
tcccatgttcatgaattgggaggcttagtattcataagatagaagtactccccaacatgatgaatttaacatagtccctaccacaagcccagttaacttttttgcgtaaattgacaggatgaccctaaaatttatgtggaatggtagaggattcacaatagtcaaagaatcttggaaaagaagaaccaacttgaagactcacatttcctgattttaaaacttactacaaagctacagtaatcaagacagtgtggtatgggcataaggattagacatatagcccgatgaaatagaatcaagagtacagaaataaactcttacatttatggtctatagattttcaacaaggatgtgaagacaattcactggggagaaagaatggtctatttaagaaatgtttctgggacaactgtatttcagcatgcaaaagaatgaagttaagcttctgcttggggcctggaagggtgatgtggctgtggcatcgccggcctcgctatgtctgccattttcaatattcagagtctattgactgtaatcttgctgcttatatgtacctgtgcttatattcgatccttggcacccagcctcctggacagaaataaaactggattgttgggtatattttggaagtgtgccagaattggtgaacggaagagtccttatgttgaagtatgctgtatagtaatggccttcagcatcctcttcatacagtagctggggaaaatgccagaatttaattgccatcagatttcattgtgaacaaggacttactgcagaaaataatggaaaggatgtttaactcttttatctccgaacattgaatgagataaatttccagatgctgttctctattttaatgttattggaccaatattctgtataaataattaagatgtaaccatttaatagtctgtaacaatgaacctcagtactgtcactacaatattacattctgcaaatgttattctgttgtatcagatacgaaattttagtgaggtatctctaaggcatatagtagaaaacaaaattggttaa

SEQ ID NO: 91062 - DNA, 1020 bp, Homo sapiens
ccaggttgtcaaggtagttccaacctcccagcccacaatgcccattgctgcctggcccagaattccagtgctcaccccactgggccctgattagtctgtggccccggcaagaagacattcactctctcttcccacccccaggtagtgggactgtaccgtctttgtggctcagcggcagtgaagaaagagcttcgggatgcctttgagcgggacagtgcagcggtctgcctatctgaggacctgtaccccgatatcaatgtcatcactggtcagcatggccccctctcccctgcctgctcacccccattcaatgcctcacttcaaggccttggggctcctctgggacctcagtcctcctatctgaccttgctttcacccacctcctcttcccccttagctgtgccctccttagccttagaagccagtggtgccctgaccagaggggaccctgtgttcacaggcatcctcaaggattatcttcgagagttgcccaccccactcatcacccagcccctgtataaggtggtactggaggccatggcccgggaccccccaaacagagttccccccaccactgagggcacccgagggctcctcagctgcctgccagatgtggaaagggtgagttgggcctggtgggagtgatgggacttgagagtgggctgataccaatagaatgtttcacccatgcctgggcctgagatgggcatgagctggcagcatcatcatatccccaagaaataggtgctattagcatcccacttcatagatttggaaactgaggcccaaagcaggtgacagttgcccaaggtcacacagccaggatgtgtcaaaaatgcaggctgaacgctgatctttcaacctacaagggaggttcctggctgagggaacctagacaagtcccatccctctctgtgcttcaatatcttcatctgtaaaatgagattcatggcagctctgcttttccaatgcttagttgcctttggcttcagtcttccctccaacaaaataggctcataa

SEQ ID NO: 91063 - DNA, 1079 bp, Homo sapiens
gtcacggagaggcatggcttcaccccgagcctaggcgcacaaagggcgtggtctggcagggttgggggcgtggccgcacagaaactggcggcaagggtcgtggccctggatcctgctgcgagaaggggcgcgatttcttccggagaggttccctgtcgcgcccaagtctgggaagtgccctttctctcttaggtaccacctcatggagacccccgcggccgccgcccccgctgggagcttattcccctccttcctgctcctggcctgcgggacgctggtggccgccttgctgggcgccgctcaccgcctggggctcttctatcagctgctgcacaaggtgcggggcacagaatgggaggtgggctgggggcagtcaaagagggaggggcctcgtggtgctgcttccagctcactcattgtgcagggtgggaaagcgagccccgactagtccagagggactggtaagaggttctgtccagggccctgtctccattgccacgctgtgtatggaggcctggactttgccactggtaagagagaacacggaagctgccgctgccggggcactcgcaccccacctacctccttccccagtgactcttttcacagaacagatggacagcactctgtgctccctaacctggatgggataaatggggcagagggcaggctccagcgagggggtggcagtgacagtttcataacagttgccctctgctgagctcagtactgtagactttcttacctaccccttaccttttccttgaaagtaggtgctgttctttctgtcttcattttctgcaagaggaagctgaggctcagagagattgtgtggtggtttgccctaggtgacatgtttggagagagctgaccccacaggtgtccccctaaactccttgcacctctgtttgaaatttaccccttctccagaccccttcctcaaccctttctctcctagcagggaccaagcttgacctctccctccccaaacccttctctactgcttcctctgctagccaggagtgatgccactgaccttcaggacttaggagatttaaagcaagccttggatgtgtagg

SEQ ID NO: 91064 - DNA, 2642 bp, Homo sapiens
ccaggtctgtcaagctccagtgtacaaactcatagctctcgggctcccccaagaggctggaagactttgctactgttagctggggtttcgctgacctctgtgggttctggccccccaggaggagacccccctattcctggccgcccgcgagggcagctatgaggctgccaagctgctgttggaccactttgccaaccgtgagatcaccgaccacctggacaggctgccgcgggacgtagcccaggagagactgcaccaggacatcgtgcgcttgctggatcaacccagtgggccccgcagcccccccggtccccacggcctggggcctctgctctgtcctccaggggccttcctccctggcctcaaagcggcacagtcggggtccaagaagagcaggaggccccccgggaaggcggggctggggccgcaggggccccgggggcggggcaagaagctgacgctggcctgcccgggccccctggctgacagctcggtcacgctgtcgcccgtggactcgctggactccccgcggcctttcggtgggccccctgcttcccctggtggcttcccccttgaggggccctatgcagctgccactgccactgcagtgtctctggcacagcttggtggcccaggccgggcgggtctagggcgccagccccctggaggatgtgtactcagcctgggcctgctgaaccctgtggctgtgcccctcgattgggcccggctgcccccacctgcccctccaggcccctcgttcctgctgccactggcgccgggaccccagctgctcaacccagggacccccgtctccccgcaggagcggcccccgccttacctggcagtcccaggacatggcgaggagtacccggcggctggggcacacagcagccccccaaaggcccgcttcctgcgggttcccagtgagcacccttacctgaccccatcccccgaatcccctgagcactgggccagcccctcacctccctccctctcagactggtccgaatccacgcctagcccagccactgccactggggccatggccaccaccactggggcactgcctgcccagccacttcccttgtctgttcccagctcccttgctcaggcccagacccagctggggccccagccggaagttacccccaagaggcaagtgttggcctgagacgctcgtcagttcttagatcttgggggcctaaagagacccccgtcctgcctcctttctttctctgtctcttccttccttttagtctttttcatcctcttctctttccaccaaccctcctgcatccttgccttgcagcgtgaccgagataggtcatcagcccagggcttcagtcttcctttatttataatgggtgggggctaccacccaccctctcagtcttgtgaagagtctgggacctccttcttccccacttctctcttccctcattcctttctctctccttctggcctctcatttccttacactctgacatgaatgaattattattatttttatttttctttttttttttacattttgtatagaaacaaattcatttaaacaaacttattattattattttttacaaaatatatatatggagatgctccctccccctgtgaaccccccagtgcccccgtggggctgagtctgtgggcccattcggccaagctggattctgtgtacctagtacacaggcatgactgggatcccgtgtaccgagtacacgacccaggtatgtaccaagtaggcacccttgggcgcacccactggggccaggggtcgggggagtgttgggagcctcctccccaccccacctccctcacttcactgcattccagatgggacatgttccatagccttgctggggaagggcccactgccaactccctctgccccagccccacccttggccatctccctttgggaactagggggctgctggtgggaaatgggagccagggcagatgtatgcattcctttgtgtccctgtaaatgtgggactacaagaagaggagctgcctgagtggtactttctcttcctggtaatcctctggcccagcctcatggcagaatagaggtatttttaggctatttttgtaatatggcttctggtcaaaatccctgtgtagctgaattcccaagccctgcattgtacagccccccactcccctcaccacctaataaaggaatagttaacactcagtgttgttggtctgtgtctaggtaaggtggggagtggtggcagtgggacttctatctcccccacccagggctaacttgagctcccatcttggggtaaatacatttgacttgccagtctacttatgcttcctcttttggcagatgactaccgattggattagtggttgtcacctgacttaagctgagccaatcagattcttttgctcgagaactttctttaatggagaggctaagaaagttgtcagttggtggagctcttaaggtcacaatcagatttagaaatatcagtggccaattcgaggtggtgggcaaagagacaagcaaacagggcagaagaatgaagctaatattcagggagaatcagaaatgagagctcaaatggctccttgagggctgggggggttatctcggctcccagtgcagttatcaattccagttaatt

SEQ ID NO: 91065 - DNA, 1021 bp, Homo sapiens
tagggaggctgaggcaggaaaatcgcctgagcccagcaggtagaggttgcagtgaactgagattgtgccaatggactccagcctgggtgacagaacaagacactacctcaaaaataaataaatggataaataaaaaccacatgtgactgactactgtattggatgtcacaaccctaggttcaactgaaggaggtccacacagcaccccctgtgtataaacagtcatgcacatgcacgcacacacacacacacacacaaacacacacacacagacacaaagtgcttccccattgcacagagtcattttgcagatttgcacacacatggatccagacacaagtacttggatattcacggcaggcctgcctcctctacccctaggccacattctagacaatttctgcctccctgacatgggggccccaggacaggtgcctggtcctgacctctctccccttcatcctccagggaaatcagccttacactgggctgcggctgtgaacaacgtggaagccactttggccctgctcaaaaatggagccaataaggacatgcaggatagcaaggtgagccccagcccttggtccactgggtgtcagcagtggcacagtgccattgcaatccagcctgggcaacagagtgagactctctcaaaaaacaaaacaaaataaaaccccaaacattggattaaaatataatttactttggtgactaaagtttttgggggccccttaaattttgtgcctaatggctgggtgtggtggttcatgcctataatcccagcactttgggaggtcgagatgggtggattacttgagttcaggagtttgagaccagcctggccaacgtagtaaaaccctgtctctattaaaaatacaaaaattagctgggcgtagtggtgcacacctgtagtcccagctgctcgggaggctgaggcaggagaatcgcttgaacccggaaggctgaggttgcagtgaactgaaatggcgccactgcactccagcctgggcgacacagtgag

SEQ ID NO: 91066 - DNA, 1012 bp, Homo sapiens
aagaccaaaaaaaaaaaaaaaaagaaaccttgtgtcttccttttattacctccttgggctatggcacacattgatttcctgttaatctcagcactttgggaggctgagaggggctgatcacctgaggtcaggagttcgagaccagcctggccaacatggtgaaaccccttctctactaaaaatacaaaaaattagctggacaccgtggcatgtgcctgtaatcccagctactccagaggctgaggcaggagaatcacttgaacccgggaggcgggggttgcagtgagctgagatcatgccactgcactccagcctgggggacagagcgagactctgtctcaaaaacaaataaaacaccaaacagatggtaaatgatttcccagggctctgtgtgtatctcctaaagagaaacctgtaggaatgcccagccccatccctggcagtggctctccccagcaccaaagggtgagatctgagatccagggtgcctgcccctccaggtagaggagccaggcatgggggctgaggaggctgtggattgccgtcagtggactcaacaccatctggttgctgctgacatccgcgtggcaccagccatggcactgacaccaccacagggcgacgcagatgctgatggcatggatgtcaatgtgcgtggcccaggttagtgacagtgcccctcccaaagggatgcccctcacccatcctacctgtgagaggttatttctgactctgtgttttggggagaactgggggagtctctaagcttctgtgaagggtgtgtgtattcagcaacactcttggttggaagtgacaaaggtccaactcagactagcttaagtaaaacaagggatttatcaactcatttaactaaaagtggcacatttggatccaggactcagttttcccctctctaccctttgactccaatcttacaaaaccttcttaatgctccagaaaagtctcaggatgcattctgattggacagactagggtcacgtgctcatccttg

SEQ ID NO: 91067 - DNA, 1031 bp, Homo sapiens
ccccgcctgaggccaaagccccgccctcggctgaagccccgccctctgcttcctgctcttaggggagccgctggagcctccagaacccagcgtcccgctgctgccactgctagtggcgggcgctgtcttgctgctggtcattctcgtcctgggtgtcatggtggcccggcgcaagcgcgagcacagcaccctctggttccctgagggcttctcactgcacaaggacgtggcctctggtcacaagggccggcgggaacccgtgggccaggacgcgctgggcatgaagtgagaaccctgctcgctccctgtccctgactacggggaccttgtgaaccctggaccccgccttgacctgactcagacctctgaccccaccccaaatcctccttcccagctggacacctctagtgtccccctcacatcccctcttcccattgtccgccaggaacatggccaagggtgagagcctgatgggggaggtggccacagactggatggacacagagtgcccagaggccaagcggctaaaggtactgccccccctctgacctttgccccctcctctgacccctcccctcagggtactgggtggggtccccagtggatgatgggcgtgatcaggggatggcaccgctgtccccacctccctagctccagagaatagtcccagctttgcaaccctttcttctcagtgtggttctgtgacctcagagggaggaagatttgccactggggccccaagggtccctccgggcaggtggaaaatcctcccctccatcctgcccctccccagccaggatcctgcttcctggccagcctgcactcttcctggaggtgtccccccagcccagagagcgagtctgccttatctctgtcagttcctattttgtccagcatggacttagcctgaaagtgctctgagccggttctgagctcatggagtcatgcccctgggttcagtatgagtcagctttggctgccattaaaaaatcccacagaggtggatcacctgaggtcaggagttcgagacc

SEQ ID NO: 91068 - DNA, 1012 bp, Homo sapiens
tttaaaaaaatattatcaagggctgcgtgcggtgacttatgcctgtgatcccagcactttgggaggccgaggcaggtggatcacctgaggtcaggagttcaacagcagcctggccaacatagtaaaaccccgtctctgctaaaaatacaaaaattagacgggcgtggtggtgcatgcctgtaatcccagctacttgggaggctgaggcgggagaatcgctggaaccggggaggtggaggctgcagtgagctgagagatcatgctactgcattccggcctgggcgacagagcaagactccgtctcaaaaaaaaaaaaaaaaaattatccagtgaatggcaagatttgcagaaagcctggcatgggtccgtatattccagtcccctgtgcaagccttgtctggagtctctgtactctacggtgtgaatgcatggaaggggattgtctcctctgacccctgactccgcccctctctgcctcacccttccccaccagcccggtgtacgagaagtactgcgccgaccactttgccgacggccgctgcgaccagggctgcaacacggaggagtgcggctgggatgggctggattgtgccagcgaggtgccggccctgctggcccgcggcgtgctggtgctcacagtgctgctgccgccagaggagctactgcgttccagcgccgactttctgcagcggctcagcgccatcctgcgcacctcgctgcgcttccgcctggacgcgcacggccaggccatggtcttcccttaccaccggcctagtcctggctccgaaccccgggcccgtcgggagctggcccccgaggtgatcgggtgagtgaccccacctggaaaagccgtggtggctggggagaggagagatgctgttgatccaggtcttgtgtgtttcatttcacttaatgcctttacccaccagatgtcaggagcaccgcctcctggctgtgacaagcaaaaaatgcctccagatggagctagtgcttctggggtagaattgcccag

SEQ ID NO: 91069 - DNA, 1005 bp, Homo sapiens
tggggtgtttttttatttgtttgtttttttgagacaggttctcactctgtcacccagacgagtgcagtggcgcgatctcagctcactgcaacctttgcctcctgggttcaggtgattcttctgcttcagcctctcattatagctgggagtacaggcacccaccaccacgcccagctaatttttgtatttttcatagtgacagggtttcaccatgttggccaggctggtctcgaactcctgatctcaggtgatctgcccacctcggcctcccaaagtgctgggattacctactggtagtgcgctgaacatctgtgtgtgtccttttgtgctggggttctttgcgtcttcatgggtatgtccaggtgggtctgtgtcccactaagctgagtgggtccctctcttaccccactgaagtgtcttcctggctacaatggtgataactgtgaggacgacgtggacgagtgtgcctcccagccctgccagcacgggggttcatgcattgacctcgtggcccgctatctctgctcctgtcccccaggaacgctgggtatgccagggccagggttggggggacaggatgagaggctgtcttcattccctcttgaccacccctcgtttcttcccccaggggtgctctgcgagattaatgaggatgactgcggcccaggcccaccgctggactcagggccccggtgcctacacaatggcacctgcgtggacctggtgggtggtttccgctgcacctgtcccccaggatacactggtttgcgctgcgaggcagacatcaatgagtgtcgctcaggtgcctgccacgcggcacacacccgggactgcctgcaggacccaggcggaggtttccgttgcctttgtcatgctggcttctcaggtaagcgttggcgaaggggctggcctgggaccccgcctgtcattcccccattgtggctgatctacatgctcccgctcgctcaggtcctcgctgtcagactgtcctgtctccctgcgagt

SEQ ID NO: 91070 - DNA, 1098 bp, Homo sapiens
ctgcctgtgccgtcccggctacacaggagcccactgccaacatgaggcagacccctgcctctcgcggccctgcctacacgggggcgtctgcagcgccgcccaccctggcttccgctgcacctgcctcgagagcttcacgggcccgcagtgccaggtgggtggagttactggggacctgggggaggagcctgcctgggatcctaggagggagaagccaagtcggggcacagtttctcccagactaccccccaccccacagtactgactctgagtgcttcccctccagacgctggtggattggtgcagccgccagccttgtcaaaacgggggtcgctgcgtccagactggggcctattgcctttgtccccctggatggagcggacgcctctgtgacatccgaagcttgccctgcagggaggccgcagcccagatcggtgagtgggagcatgtgggcgggcgtgtggggccttgggaaggggctcatgcacgtacctcctgctagtgtgagccgaatgggggtgccacagagcctatggggcatgatggggtgtgtggctgagtggtgtgggtgtgtgagcatgtgacaactggccgggatggtgtgtgtctgtcactgtgagacagcagggatggtgtgtgtgctacagggtgtgaccgagctgctgtgagcgttgaaggcatgtgtgtgtatgtcagtgatgagaccttgcctgctggggggatgtgtgacaacctgatggagtgtgggtgcgatcctggggactcattccaccaaggatgttgaatgatctgtgtgatggaggcagaagggggatgtatggggttacctctgttcctgtgccactctcctctttgcaggggtgcggctggagcagctgtgtcaggcgggtgggcagtgtgtggatgaagacagctcccactactgcgtgtgcccagagggccgtactggtagccactgtgagcaggaggtggacccctgcttggcccagccctgccagcatggggggacctgccgtggctatatggggggctacatgtgtgaggtaagggggcgctccccaggagagggaagaggaggtgggcatgcttgggtgcgtc

SEQ ID NO: 91071 - DNA, 1033 bp, Homo sapiens
cataccaagtcttcaaaatctgaaacccagtatgtattttacatttatagcacatctccatttagtcacaatttcaaggactcagtagccacatgtggctaatggccactgtccttgtcctgttccaagcacaggaattagatcaggcacaattagcagcgtttgcttggcagcttaaagggaccttttggttttcccaacatcctgcccttgccacataggtgaggtttccagataaaggaggggacgaggccacagaaggggatggatttagattcctctgaccaaatgcaccccatcccagttgaacctggtttcctcctgaattcttctcaatccaaggcatatcccagtcagactgggctaatgggggcaaggtaggtgaccagaccgccttcctcctgtccgcagacccatgcctgaacggtggctcgtgccaagacggcgtgggctccttttcctgctcctgcctccctggtttcgccggcccacgatgcgcccgcgatgtggatgagtgcctgagcaacccctgcggcccgggcacctgtaccgaccacgtggcctccttcacctgcacctgcccgccaggctacggaggcttccactgcgaacaggacctgcccgactgcagccccaggtgggcggggcctctgcttggagagcagggactctggcttgggatggggcctgggacctgggacgaagtggggacagcaacgacttgggggagtcctcagcttggtacccactgcggactctgatgactgatggggcagggccagggaaggagcagggcgtctgtttggagctcaccttggagtctctggtgcctgagagggcatggcttccaggtggctctcaccttagggctgaagtccctggtgaattggagctaagggacctgattggcttctgctggggctgcagcttcttgccgagataagggtcagggagtgggacgtccccagcgctaacagcgggactcaggaaggagggcagggcctgtgagggggcggagcctgatcctccctcc

SEQ ID NO: 91072 - DNA, 1068 bp, Homo sapiens
gaggctgagacatgaggatcacttgagcccaggagttcgagactagcctgggcaacataatgaaaccctgtctctacaaaaaataaacacactcccaaagccagattagtcaatacgtagataaacacgcacacacatgcacacacaattagccagacgtggtggtgcgcaactgtagtcccagccactcgggaggctgaggtgggagaatcgcttgagcccaggaagtggaggctgtggtgagctatgatcatgccactgcagtccagcccgggcgacagagtgagaccccatctcaaaaaataagaagaagaagaaaagaaaaagaaagggacttcatggaagtttggggaccagaatgatctggggcaagtcagctcttggttgaggaggcgggtgtcctaatctgcacaagagctgatgcgttatgaaaaagaggtcattgctcgggggtgtgggtgtgctaagtggggtcacgtcgtccctccctggttgtccctgctgactttgttctgagatgagattgcttgtgtactccccagggcccctttgtaacgtggagatcaatgagtgtgcttccagcccatgcggcgagggaggttcctgtgtggatggggaaaatggcttccgctgcctctgcccgcctggctccttgcccccactctgcctccccccgagccatccctgtgcccatgagccctgcagtcacggcatctgctatgatgcacctggcgggtgagggcccttctcagcctcagacactgccccctctccctggcccacctccctggcctgactaccttcccctgccaggttccgctgtgtgtgtgagcctggctggagtggcccccgctgcagccagagcctggcccgagacgcctgtgagtcccagccgtgcagggccggtgggacatgcagcagcgatggaatgggtttccactgcacctgcccgcctggtgtccagggtgtgtacctcaccttccctctgcagccccaccaacaccatgggccttctcatctctcttctcctctactctctcctcccgctatgttagcttcttttttgct

SEQ ID NO: 91073 - DNA, 1554 bp, Homo sapiens
tccccaccccaggcttcagcggctccacgtgtcagctggacgtggacgaatgcgccagcacgccctgcaggaatggcgccaaatgcgtggaccagcccgatggctacgagtgccgctgtgccgagggtgaggcgggccaatgacagtccgacaagaatcaggaggcggggcttgtgggcgacagggccaataacagacttggggagagcttgggggcggggttgtagcaaggcaggacccagtgacagagttggggggtggagccaataatgcatatagactgacataaggctacgtgtggagccaaagtgttgggctgggcacagggtgcctgtaactgaatggggagggcccaataccttcccctggcacctgccatgtgctcccatctccagtggagggtggggcagaaacagggctggaggtggggccacagctgggggcgggatttaactgtgggagagtcttggctagggacaaattctggagcttgtagtggggtggagtggaagtaagtggggggtggggggtggggcctgtattgagctcgcctcctgacagcttgatgggcagggcctcagatagagctgaaccaggattggtccgaggcctcacttgtgggcaggcccctggcaagtgggcggagcctgaccctcttggccccacaggctttgagggcacgctgtgtgatcgcaacgtggacgactgctcccctgacccatgccaccatggtcgctgcgtggatggcatcgccagcttctcatgtgcctgtgctcctggctacacgggcacacgctgcgagagccaggtggacgaatgccgcagccagccctgccgccatggcggcaaatgcctagacctggtggacaagtacctctgccgctgcccttctgggaccacaggtgggaccgggggctggggcagaaacagcacacctggaggggcacagagggtttgggaatggtgcatctagtggggcacagtggtggccactccatgccatgttcctggcccctaggtgtgaactgcgaagtgaacattgacgactgtgccagcaacccctgcacctttggagtctgccgtgatggcatcaaccgctacgactgtgtctgccaacctggcttcacaggtgggcaagtggctgccatgagagggggtccttagatcgagggtgaagtcactcgtctctgtgggcctgttttgcccgtatctttgcagactcttgtccaacgaggttgtccgtgctttgccctgagtctgtgctgtctcattggcataaggttgtttcgagattattctgcaggctgggcgcggtggctcacgcctgtaatcccagcgctctgggaggccaaggcaagtggatcacttgaggtcaggagttcgagaccagcgtggccaacgttgcgaagccccatctctactaaaaatacaaaaattagtcgggtgtggtggtgggcgcctgtagtcctagctactcgggaggctgaggcaggagaattgcttgacctcaggaggcggaggcggcagtgagccaagattgtgccactgtactcc

SEQ ID NO: 91074 - DNA, 1044 bp, Homo sapiens
acctgggaggtggaggttacagtgagccaagatcgcgctattgtactccagcttgggcaacaagagcgaaacttcgtctcaaaaaacaaaacaaaacaacaacaacgacaaaacaatactcaaggggtgtgggccttttgggcagagcaggaagatctgcctatgacttctgcttaccacttcccaggcctcctgtgtcacctggatgacgcctgtgtcagcaacccctgccacgaggatgctatctgtgacacaaatccggtgaacggccgggccatttgcacctgtcctcccggcttcacgggtggggcatgtgaccaggatgtggacgagtgctctatcggtgaggggagctccatcgtctgtgaatgggctgggaaagaggggagaggagggggtcccggccagccacgcccacaccgatcgcactccatccggcaggcgccaacccctgcgagcacttgggcaggtgcgtgaacacgcagggctccttcctgtgccagtgcggtcgtggctacactggacctcgctgtgagaccgatgtcaacgagtgtctgtcggggccctgccgaaaccaggccacgtgcctcgaccgcataggccagttcacctgtatctgtatggcaggtgggtggtgggcgtggcctgggcgggtcctgaggcagggggcggggacagagaagcccgcggatggggagctgagcagaatggggtgtaagtgggtttggagtgggacccttagagactgaagcctggaaggaggtggggtcaggaccagaagggaatactgtgtgattctgggggcttggtcaaatggagtcagtagaacctcaggtgggctgggagtattcttggccttaggacccactcgggaaggggttggggatagagaggcagagtcggggctgctgtgaggtcaaggtgaagcctgcagacaagcttgcagtaagcctgggcaaaggctatggggggccctggggctgggggctggggactggggaaagggcttagtctgaggactggggagaggaggaggggtttgaa

SEQ ID NO: 91075 - DNA, 1367 bp, Homo sapiens
tggccgtggtgtctgccagagttcagtggtggctggcaccgcccgattctcatgccggtgcccccgtggcttccgaggtgagaggggaagagtctggaggggaggtagtcgggggtgtggtcagtcctaaactcaccctgtcctggtccctccaggccctgactgctccctgccagatccctgcctcagcagcccttgtgcccacggtgcccgctgctcagtggggcccgatggacgcttcctctgctcctgcccacctggctaccagggccgcagctgccgaagcgacgtggatgagtgccgggtgggtgagccctgccgccatggtggcacctgcctcaacacacctggctccttccgctgccagtgtccagctggctacacagggccactatgtgagaaccccgcggtgccctgtgcaccctcaccatgccgtaacgggggcacctgcaggcagagtggcgacctcacttacgactgtgcctgtcttcctggtgagtgagccctactcaggagagtcagaggggtgggcgtggggacagcaggccagcccggcggtgaccatccttgcccccttccctgctagggtttgagggtcagaattgtgaagtgaacgtggacgactgtccaggacaccgatgtctcaatggggggacatgcgtggatggcgtcaacacctataactgccagtgccctcctgagtggacaggtgggcactgcggccagagggagcggggaggcaggcctcgggtggacatgcgccaggtggctggactgctgcatctgtgtgccacaggccagttctgcacggaggacgtggatgagtgtcagctgcagcccaacgcctgccacaatgggggtacctgcttcaacacgctgggtggccacagctgcgtgtgtgtcaatggctggacaggcgagagctgcagtcagaatatcgatgactgtgccacagccgtgtgcttccatggggccacctgccatgaccgcgtggcttctttctactgtgcctgccccatgggcaagactggtgagtggccgttttctctgcagggagccatggatggtttttagtgagggcaaataagaagtctgacttgagtgttagaaagattatgctaggctgggcacagtggctcatgcctgtaatcatagcactttgggaggcccaggcgggcggatcactggggtcaggagtttgagaccagcctggtcaatatggtgaaaccccatctctactaaaaacacaaaaattagctgcgcgtggtggtgcacacctgtaatccaagtctctcaggaggctaaggcacgagagtagcttgaacccaggaggtggagattgcagtgagccaagattgcaccactgc

SEQ ID NO: 91076 - DNA, 1444 bp, Homo sapiens
acactcagcacccttacttcctgtctcagcacaccccattctgcacatcttagctctggcagcttcccgagcccccacatctggcataagacagcccctcctcctgccttcccctgctttgtggttcccagggctcgagctggcagggacagctgcagcctcaacagctggggctggggcggggggggggggggcgtgggaactgtggatggggggactccctgcacccgcagagacgcccccatccccatgcagctgttgcctggtggagggagggagggggtttgtcacttgggcctggggttcctgggcacctggctgatcctccaccttccttcacccccacacagcccccccttgcctggacggaagcccgtgtgcaaatggaggtcgttgcacccagctgccctcccgggaggctgcctgcctgtgagtgcctggctcagagccaccagtgggccctgtgtgtgggggcgggggggaggggcgatttgtcttctccctctgcctctgtgttcaccatggatgtctctaccacttcctacatgtgtgtggcttgggcaacctctcgtgtttccccattggaaactgagcaggggctctgcactcttcttggcatgggttcaagtcccacatcatgttgctgaccggctaggaattaaactctttacatctcagtgtcatggtctgcaaaatgggcccagtaatcccagcttcacagttcttggccacctgaggtcacatgtaaagccccccatgaggtaggtattattcaatcaacaaactatcagggaccaatcgcagtggctcacaccctccacacccctcccatctctcaacatttagtggagggggacataggaggcctataatacagtcccacactgccacttacttgcagtgtgactttgggctagtcactttccctctctgatcatcattgcacctgtgaaatagggaatgcttcactggcgactgtgaagggacttaacaatttagttgttagatatcacaaggaaaggcaagaggttgcagggagcagagcagaggctgggaaggagctgagcagagacagaaagagctcagcttaaattctggggtctgggacaccttgagcattcaagctttttgagcctcagtttttgcatctggaaaatggggcaataataactcctgtatgcactcaacatacattaagtgctcagaatatagtatgtgctcaacataggcattattataaataataatggtagggaggcaggaaacaggtgctctaaggagaagtctctcaaggttatgaggaaatgcttggctcctttcatgctatcattaataacagcagttcacgcagtagccattgattgactcattaatgtattcatttattcagcatcatgtgtgccaagtactgggtcaggcccaagctgggtgggtctggggtgat

SEQ ID NO: 91077 - DNA, 1077 bp, Homo sapiens
gcaccctggcctgggcagaggaagcacacctttggatatgggggttcccaggagatgcccccatcctgtggatagtgaaacatggcaggagggaatgtagctggtgcccaggccaggaggggtatctagtaccttcacagacccaggcaggcagcagtggcattcctgaggcttgtgtccctgacctgggtatgtgtaggggtgcaggtgtatggggccaccccaggagcaggccttatatctctcccccaaccctcccaccccagactattccctgcaccacatcagccagttcttccgttcccactacatgttcctgttccagctgccctggctgcccgagaagctgctgtctatgtctgactttcaggtacagagggtgcaggttgaagggaggagggaagcaggtcggggctgggcaggctgggcactgaagccagagtcctgctgtgtacctagattctgaagaccaccctcacccaccgcaagacaggcatcccatgcttgacccccagcgagctcgaggccttcctttataacttctcacagcctggtggcctcactgggcccctcaactactaccgaaacctcttcaggtgagaccagttgccaagcataagctcaggagatttgcaggggcaggggggtgggaggcaaccatccttctgcctgtctgtctgcctgtctgtctgtcctggccacaggaacttccccctggaaccccaggagctgaccacacccacattgctgctgtggggggagaaggacacttacttggagctggggctggtggaagccatcggcagccgctttgtgccgggccgcttggaggcccacatcctgccaggcatagggcattggatcccacagagcaacccccaggagatgcaccagtacatgtgggccttcttgcaagacctgctggactagtggtccttgctggcctgcccaggaggcatggatactcaggaaggaacacacacccattatctgtgtgtgcctgggagtccatacaatgtccatacatgggtgaactcttgaatcgctcataggcatgggactcctggatcccacaca

SEQ ID NO: 91078 - DNA, 1007 bp, Homo sapiens
taagccccgcacaggacctgctaggccccgcccatttatttcccccctttccaacctcttcctccccagcctccgcaccctacccttgtttcctgtccctgtcgcgcccaggtgtttacctggcactcaggtgagtggtgcgctctggctgttttctgtcggagccgcccgcctcttccttcagcgcgtcccacaaatcccgacggcacggaggggccccaggccaagggcgatgggcccctgagccctgacaccgcttcgccgctgctgcaggtgcccctggccggcagcgccgccgtggtcccggagcgcggcgacatgccggagctggtggtgaccgcgctgctggcgccgtcgcgcctgtcgctgaagctgctgcgcgccttcatgtggagcctggtgttctcggtggcgctggtggccgcggcggtctacggctgcatagcgctcacgcacgtgctgtgccggccccggcgcggctgctgcgggcgccgtcggagcgcgtcccccgcctgcctgagcgacccctcgctgggtgagcacggtttcctgaacctcaaggtgatcgcacgggggcgctatcggggctgcggggtcgcgtggggtcgagacggttcaagcctcgggagagagggttccccaggcttcaggctgtgccctccccctagagctcgggcctgcgtctgcactatgtctcggctggacgaggtaacggacccctcatgctgtttctgcacggcttccctgagaactggtacgtctggggccaggggcctgaggcccacgggactcgggggcaggtggagcttgggctcccaagaggcagggaggagggctgtatagatcgggacaagctgaacatagatggggataggggtactgagccagcatacccaggatccctaggccctgaagggacaggacaaaggggtattgaggttgattgaagttccctggattcagggtgtagctggcttcagcctcagcctctgcctctgcctgggatt

SEQ ID NO: 91079 - DNA, 1119 bp, Homo sapiens
cccccaaaataggatcctcaccccccatgcacatacacacacattcctgtccaagaaagcccacaggtggctgctctgcctgtgtgtccacttgtgtatgtacatgccccagccacaaggcacgggtgacgcccaagaagagcccctaagatgtaagatacaagtatataatttatatgtatgcagagacaaactgattgaaacatttctagcactgtttattctcctacatcccctctttttgacctgaaaggtcctttattgtctttggatctgccaaacctccctgtgagggtgtggttcaggcatccagccagaggtccccccacttcttcgatgtccatgcccactcaggcactttctcatataccactgtgccacttcaagtgtgacgtatttaggttctttggggtttcttccatctcatcccacccactcatttttgttccttgttttgttcagacacttccccagcctgggtccaactgctgagctggatagttttctctgcagcttcctgctgaagatttaactcagccatggccttctccacacctccctgatgggtgtctctctacctgggttgtaattagaactgggatctatttaatttctccagccatttcccaacccttcccacagtactagaaatcttagtcctataccagagtaagaggtgtgtacaagcccccactgtactgtatgcacggatcgcttggccaataattatgtcagtgaatctgagacttgtattaaacactttagacatttgtagaagggaattcgtagacttttcacttacatacgaaaggtttttttttttttttgtgcagttctcattgcaaaaataaacatttgtactgagtataaagttactctcctgtgatggctgctttttgtttgagggtagacttgggagaagcggggagatgagggcggggggtcagtgatgtgtaggagaggaagaagggaggttccccagacacccaccacccatgcgtccagattagcggagtcggttgggagagatcctgggaacatcaaattgtgagataattgatttaatggaaggtgtaaaagaaaaagctgccaggcacggtggctcacatctgtaatccc

SEQ ID NO: 91080 - DNA, 1596 bp, Homo sapiens
gcttgtagctgcagggtggctaggtcatcctcctgactccctccttcctttctcctccagatggcagctaccattgacatgaatttccagagtgatctattgtcaatatttgaagaaaatcttttctgagcgcacctaggtggcttctgactttgattttctggcaaaacattgactttccatagtgttaggggcggtggtggaggtgggatcagcggccaggggatgcctcagggcctggccctcctgcatgctatgcccggggcaggcctgacgggcagctgaggattgcagagcctgtctgccttacggccagtcggacagacgtcccgccacccaccacccctcacaggacgtccgctcagcacacgccttgttacgagcaagtgccggctggacccaagccctgcatccccacatgcggggcagaggcccttctctccgccaaatgtctacacagtatacacaggacatcgttgctgccgccgtgactggttttctgtccccaagaacgtgacgttcgtgatgtcctgcccgccgggagtctttccccacaccccagccatcgccgcccgctcccaggaggccagggcaggcctgcgtgggctggaggcgggcgaggccggcccaccccctcgctggcactgactttgccttgaacagaccccccgaccctcccccacaagcctttaattgagagccgctctctgtaagtgtttgcttgtgcaaaagggaatagtgccgtggaggtgtgtgtgtccatggcatccggagcgaggcgactgtcctgcgtgggtagccctcggccggggagtgaggccaccaaccaaagtcagttccttcccacctgtgtttctgtttcgtttttttttttcttttttttctatatatattttttgttgaattctattttatttttaattctctcttctcctccagacacaatggcactgcttatctccgaaatggtgtgatcgtctcctcattgagcagcggctgccaccgcgctgtgggtagtgtgtgaccgtggctgtactgtatagtgaacatagttggcatatctttgtttgaagtttgttggtgactccaccaaactggtgtgaaaaaagaaaaaagctcaaaaaaatccacaaaaagacaaaacacacaaaaaaaatcctgcctatattttactcagtttcaaactttattagtctatttttaattataaaaccagaaagctacaatttcttttctttcccctccaccccccccccccccacccatttgttggcttttttgttttttaatgtcagatctgttgagttggtttttttggttttggtttttgtttttgtttttgttttttactgagaaaggaagggccaagggatgaggtgggaaccgggccctgggggcgccacagactaaggcagagactcccctacctggcgcccagccccaaccagctggccgctcctgcccatgcttttttttttttttttttttaatttttataattggagcccctggtgaggttacgcgtgccatgagaacccactctacaccacgacgctggtgcctcagtgttggccaaactctggagtcactgactgg

SEQ ID NO: 91081 - DNA, 1049 bp, Homo sapiens
cataagcttgctgtggggctggtggaccatgccccactggggtgaggtgggccagggcccaccggctgtttatgttccagggccggaaatgaagcctgtggatgtcgggaggcctgtgatccggcccccagagcagaacgcaccgccaccaggggcccctgacaaggacaaacagaaacaggagccgaagactccagttgcgcccaaaaaggttgggatggaggtccatgggtgtcgcttgccccttggccctggaaggtgccatgctgggcacacccccagctatgccctttaggcacagcagacccctcacccaccccaacctctctgttctgcaggacctgaaaatcaagaacatgggctcctgggccagcctagtgcagaagcatccgaccaccccctcctccacagccaagtcatccagcgacagcttcgagcagttccgccgcgccgctcgggagaaagaggagcgtgagaaggccctgaaggctcaggccgagcacgctgagaaggagaaggagcggctgcggcaggagcgcatgaggtgggcgggtgtctgggtggggcatggggactcttggggccacaccagtccccaggctgactgggaccctctgcccaggagccgagaggacgaggatgcgctggagcaggcccggcgggcccatgaggaggcacgtcggcgccaggagcagcagcagcagcagcgccaggagcaacagcagcagcagcaacagcaagcagctgcggtggctgccgccgccaccccacaggcccagagctcccagccccagtccatgctggaccagcagagggagttggcccggaagcgggagcaggagcgaagacgccgggaagccgtgagtctggaggcctggtggggaccctggtctaaggattagctcctgagggagctgggaaagggggactggagcctggacagggaggggcagcgggggagccccgtccctgctggtcggcatgtggtcctctggactcagctgtagggccctgagtgctgtgtggacggggtgagcgctatgaggggt

SEQ ID NO: 91082 - DNA, 1060 bp, Homo sapiens
ctgctggatccttcccagccttgggttggatgcaggtgtcaggctggcctgtttcctaagagacagctccaggcccttttccgcctgctccccactcggcgcaggtggaggccaattccaggcttctctcttccgtgggggcgtgcaggctgagtggggaataggactgtggggagggtcctgagcatccccacccccaggactgggtcttgcaccccctgcaatcatccaggtgggccaggctagttggcaggaacccaggctgagctttgtgggtttaaaaagtattagggcccaggccctgccaagcccacatgtgtcaggatctgtgttttccacagtatcccagatgattctgatgcacacaggagggtcaaacaccaggactggtgccacagggccctagaaagctctgctgcacactgagttatgccccacatgcagggggacacagggcactcagccctttcggggaggggtcatgtcctcaccaggcccagtcacttgtgtgggtcttcaccctttttgagctgggctaatggacccttgtcccagggcctgggcggcacatgcagtttctccatacagcccacgttttccttcccgacaattctctcagggccagcagttctaagccagccccttgacacattccttgtcccttctcctaggtcacctccgcgaagccccctccccgcttatgatacattccccccagatgtcacagttccagagcctgacccaccagtctccaccccagcaaaacgtccagcctaagaaacaggtaactggcagggctgggccatagtcctgtgggctagggccgggggtgcctgcccacctcaccggccgctgtgcctgtgccatcccaggagctgcgtgctgcctccgtggtccagccccagcccctcgtggtggtgaaggaggagaagatccactcacccatcatccgcagcgagcccttcagcccctcgctgcggccggagccccccaagcacccggagagcatcaaggcccccgtccacctgccccagcgtgagtgctctccctgcccacagcc

SEQ ID NO: 91083 - DNA, 1112 bp, Homo sapiens
tccccctaccttccgccttctgccccgggtcccctccaaggtgtgcccagcatgcccccagacagcgcggctccatcacctccttgtgccaggagagaagccctggccttttcttcccagttccctagtgtgcagggtccccctggtcctgtggctgccaacctctgcagccagcgctcctccccccaccaccacagcagtcagactccctgttgccctgacactgcaaatctactcaagctttcccttctggcatgtctcacccacaacagtatctctctcatcagatgtcatactctgacccagagcgtcctgagccctgtatgcaggttttaggcggggccccaggttcccccgtgtccccagttgcagcccctggtcatttgtacgaggacgtgtgtctgtagctgctgaggtctgtgtctgtgtcttgtctggcgtggagtggtgagctcttacagggcacaaggtccttccccatcccttttggtggcatgctgcactgagggccacgtgcctcacagaagcttagcgtggccctccacgaagcagatccaagtggaaggagcctggatttgggcaaagcatgtgtcctccaacaccagcagcaagaggcagcaccctgacaaggagctcaggcgaagccaggcagtgccatgaggtgcttctcagtgacaggaatccaaaaggcgccataccatgggcccggcctcccatctggtggcaggcgactgtgacctgccagcccatgagcactggccagggctcatgtccccctgtggggcttgtacaccatccatgtttggtgaggggacatccaactggcaaaagtcccttagtgtaaatctctggggtgaggacagaggtgggcacgctggctctcgagtacacctctcaggggcagacacaccctggacccatccaccctactgtggtgccaagccgtcggcccacacgagtgggggcgtatgctgccttctgtctgcagcatggtgactgtgtcccaaagcagggacttctgaggtccatctacctctttagtagctggtcattcccaggaggccagcctgctccttttttttctcccggagtgggctctctgtgttttccct

SEQ ID NO: 91084 - DNA, 1078 bp, Homo sapiens
ggacctgccaggcaggcactggtgaagggccttgggcctatcatccccccaaccccacctcaccccacccgcctcctctagtggggtgagtctgggctggtggaccagagagggtgtcacagaccctcagggactgccccatggacacctctgactggtgttaacagtgtgaacattttccccgtcttcagtcccttagaatgacgacagcccctggggttggggcaggcgagtgtggccacatcatccaagccctcccagagacacaaataggcttttttgctctaaaaataaataccagcccttttttggtcacaaatccagcatctcagcagaaaactgcctgacatgaaaagtcccctgaggaactgcatctgcgtttcaggggcttttcattttttctccttttttaaagtgtagattgtgggtgcttcctagaggcctgccttcttctggaactggaagtgggctatcaccatgggcaagcccttgggtgcaggctccccacctgcctgggaactctggcagctctcctcagctccttgggcttgagcagctgcaactgccccagatttgctgtggaagcaggggctagccctggcctcaccagggcctcccggggccctgcattgatgctcaggagttcctgggctgctcttgatcctttctgggcatccagcttccagttaagctctgtttgccaaacaaactattctcagctgccctttggcctgcgcctgatgtgttcctgttgcagtcccgcctgcctgagacaggagcaggcaggagagccttcatgcccagattcccacaggacaattggggagctgctggcattgtctttctgggaagattctgctttcttggaccaaatggcagcctgattaccagtgtcgggcctgcatgctgcccccgacacacgcacgcacgcgcacacacgtgtgcacatgggccatagccacaagccagctctcctccagggtcctttcaacctcgctgtccagggaccctgtccttcttgcccgtggggcttccatctggcagagaacgttcagggcttgttgaacttgaaagctca

SEQ ID NO: 91085 - DNA, 2104 bp, Homo sapiens
aaagattgtgcaacaagtaatctgagagtcctgggaacagctgtcctggcgggaaggagggcgagatttacagtctcagagccgctggctcccaggctcccaggctctggcggtccagccctggccgctcatgcagctatctgggctctggccttcccctcttcccaggcgccctccccaccttgggttttgcctggctcccttttgtcttcccaatcctggccagcaggggctttcctttgccttctgtgtgcactgagtgagctctgtcgtgggccggcagggtgcttctcctctcaggaggggccgctgcgagggtttcgtacggcagatcccgaaatgggaacccacaccctggcaccagtaaatacagccttctgctgccctgtcccgcacaggactctgcactctcagggcggggggcagagggggcgtagctccttcagcagctgctctcctgggtccaggaatcccggcagccctgatgtccatggcccgttacaggcagctctgccttaacgggagtgggtcagggtgggggaacattatttccctttggtcttttggtgcctagttgatttgcaggcccgcgcccccgcccccccccccccccccgttcttgtgtttccatttggattggagccgaaattcctgaaagggcctatttttgtcacttatactacggggttagttccgctgacaacggccctgagacatgaatcaccagaagaaaacgaatggagtcactagattgaggctggggggtgtgatacatgaacacccctcttggtagctatccatagaccgggatgctgtggactgatgcaggcgtggggtggtcctctggggccaggctctagttcagggagcaacggaacacaggcaggaggaggatggcgggggtgggtgctgctttcccagctgtgtcccaggccaccatgtattccccaccctctgccccagcagcatgcagtgcagtgggccagccctaccacttcctctgattccagctattgcttgggctgtggtcttccattgagctgtgattccagctaaagcctggagctgcttgaggattctgtattgagacaggcaggggtagggcacaaatgccactctcccaccacccctagggcatctgcagacctgggtggagcaggctggaggaagacactgtcccaggtgggctgtggacagtactgtggctttgctgtcattagcactggggttaggtctgccaagcacatggggcagggcatgtcctaggaatcttctagctttcacttgtcacatagctgacatctggttcttcccaagtgtcatgcacaggtctttgtgagcagaagtgtccccacagcttatgtccctcttaggaatacccgtttaacctcagctacctgggctgggacagggtctcagggaggtgtgagagatcctcctgggctttggtctggtcgtctagttggaacgggagcgcagtccagctattttagtttcctggcttccttttcccaggattggagcatgtgggtgtttcttaatagctccaggggaaaaaggaatgcttgatgttttggaaagatttgagctgggaagtgcagacagaggccatggggcgttcttaccacacaaccagcctcagcttcctgacccccagggtctttgagggacttagtccatctccaggcctgctgcttgcctgctccagagtgtggcgcttacctaggggaatggtgaggaccctggaggtgggggagtaggaagagacttgaagatagggcagtagcctttctgtctgcacagccaggtgactccccccacaaacagccagcatttgcagctggagggattctggggcttcatgggcgggtgagggcgagccttgtggaatgtggcccagagtgagaggccgccagtgggcgggtttttcccatgcccgcactcaggggccagggagtagcacgtcggttgcatccgtgactccagcagaggcatccgctctgctacgtgggtgggaacaagcccagtgcccctccctggtccagggagccatgttggataccccaaaaaaggaaagaaaggacaagactttattccttagcct

SEQ ID NO: 91086 - DNA, 1780 bp, Homo sapiens
ctcctggggtccttgggcccctacctggggcacaccacatgatgattccagcgtgcgtctgaacagctgtgctgagagacccccgggggtctctccctgccttgcgttaccttttggcagcatgttccttttggatcttcttcttcccctgctagaagagtaactgggagaatccaagccttatgcccagcggtaccttgtgttaggaaattatccttctgcctggtctcttgaatccttgataaaccccccaaaggagactttttgagagattgaaggaaccttgaaattccattgtaagcagtctacccatgggaactgtgggaccacgtgggttctgggagtggcagctggcagttgggagcagcccctgggcccaccgtgcacaggctcctcactggtccttcctccagatggatggggtgtgcccatggcttagagcggcttcctgggccacagccctgcctgaccagctcccattgcttggattgcagctgagaaagttgatgtgattgccggctcctccaagatgaagggcttctcgtcctcagagtcggagagctccagtgagtccagctcctctgacagcgaagactccgaaacaggttaggtgacttgtgttctacgtgtcttaccaaactcttcccacctgtgcctggcactagctcggtcctgtgtccaggatgctagagcccagagacggcactcccagaacttgctgggttcctctgtctgtctgtctctttgttaactgtctccctggggccatgaatagccctgcactctgtgcagtagtgtccattctctcggcctggccgttatgctctccctgccagggtctggtcatggaggatgaatggccaagggcgttgacactgcggagccctggatggtgggcggggaagctgggccatgaggactgtgggcgtgggggtccaggctgtgctgttgaccttgatgtgaccacacccagctttctgcaccagtggagacttcgtgtccccagggccttccccgtatcacagtcacgtgcagtgcggccgcttcagggagatgcttcgctggtttctggtggatgtggagcagactgcagctggccagccgcatcgccagtctgctgctggccctgccatcacctgggccccagccattgcctacccctccccagagtgtgctcgttgctgtgttggctgctcctgaatctgccctaactccacacgcacctggacttgcgtgtccctcctgcagttctaactaacagtcccttcttttcaagccccgtgggtctgcacgttggaccctgggttccccattagagcccaccttctgagcagcagcctcagtgggaggtggaggcaggtagtgatgctgggtgccaggtgggagtggagaggggactgctctcctccaagtgtgcactttcctcattattctcaggggcgcagatgctcaggctggcgcaggggagaggctagggagggagccatggtgcccagaaggcctggcgaccagcccctgctgagagatggagctaacatcctgtgtttacggccaacggggttgccgctaggctggtgcagctgtcagtgagctggcgtgctgcagaccacctgagagctggccctagggtctcaggcagactggggagtggggatccacagtgggaaacctgtgttttggcagtagactcctgcatgttctcccacgggcctgtcccatccctgggattttattctaactagaaataaatgctaaccctcaataatcagtgcatgtaaat

SEQ ID NO: 91087 - DNA, 1113 bp, Homo sapiens
ttgatcctttcagtatctggaaggaggaggttgagccaggatgttcgtctctcctggggctacctgtttgctcctctccctatagccagtcatcaggcccttcgtgcctgacgtgtccgtgtgctcttacttagattcttaggggccctccttctgcgatcaggatggccgtgagacttggtgtctgtcggcttgatcagctcctctggtgaggaagacactggcagtctttggagttgagtgaatgggtggagatagtcttgttaggaatctggttaacatgacaggcgcaaagctgggggccttcccttcccctgcctcccctatgcccacaccctgatgccccaggtgcatgctgtcgcatgttttttggagcagacgcctgggtcttgggtgacaggaaggtggtttcagccctgagtgtgtgtcttgcctgtctggtctacagctcaaagccgtgcacgagcagcttgcagccctctctcagccccagcagaacaaaccaaagaaaaaggagaaagacaagaaggaaaagaaaaaagaaaagcacaaaaggaaagaggaagtggaagagaataaaaaaagcaaagccaaggaacctcctcctaaaaagacgaagaaaaataatagcagcaacagcaatgtgaggtctgtgtcccctgaatttgtcctgggtggggaccctccttccagggcttgctctgagactgtgtgggccactgcccctccctgtcctcattgggtgcggaggctgcccctctgcagccgtggcttcacaggccaggctggtggccacttgcacacaggacttagctgcactgtctctgcctctttctgtaggatgagccttcggagctcaccatgtttggttggggaggataggcggcaaggatggggctgtagtgcatcccccacttgggcagcctccagtcacagtttgcttcggtctccactgggtgctcccagagattgagttgcccatgccccgtttcctgtgaaggctggtgggtggggggtatgggaagggcaccccttccccccaacatacatgtggaggaatgagtgcctggcttcctcagggggcccgttcttgatggtgtctgcatcgtccct

SEQ ID NO: 91088 - DNA, 1050 bp, Homo sapiens
gcagcagtccagctgccccctgtggttccaggaggtgggggcctgccagtttccagaaaccttggcaagggcggctactgccggctccctgccagaagctcttactcagaaggcagtgcttctgggaacaagggcagctgtgcctggaagctctgaggagtgttttcccgctctctgtcccctgtcagcatgtgcttcctgctccttgagcctgggcctccaggcttcatgaaggggtctttgtgcctgagttgggagttgcagccaggacgccctaggaaatgggaagtgcggttttctgctgttctttgagccccagggacaggtggaagggtttggcagagtggagtctgggatgttcgtctctcaggcaaatgcaacacgcgaatgtgcgttcactgtgtgtggtgtatgtccccacgaggtcagccagcatgtggatgtcagcatggtctctaactcgccgtcttattatgatttgtagggacagcaaaacctggcgtttccacggtaccaaacacaactcaagcatcgactcctccgcagacccagacccctcagccgaatcctcctcctgtgcaggccacgcctcaccccttccctgccgtcaccccggacctcatcgtccagacccctgtcatgacagtggtgcctccccagccactgcagacgcccccgccagtgcccccccagccacaacccccacccgctccagctccccagcccgtacagagccacccacccatcatcgcggccaccccacagcctgtgaaggtgagtctcctggactctggagggctgcttcaccagggaggagagcggccctgtccttgcccgtgctttacacagagcctgtcctgggtcccgggcactggtgggtgtttctggggagatcttgctgtgttgaaattgcagcccagaaacagccgccccactgactcaaaggtcccataattgtgtcacacctcctagtgggttcctgccccctgcacctcttttatttagactgtgcatatttgcagatgggccatctaaatagtctctgaattg

SEQ ID NO: 91089 - DNA, 1789 bp, Homo sapiens
gactgggtgtgggcttttttgctgggaggagggtgctggccatgttgaacttgcaagctgtccttgttagcctgaagcatgtgcttctggtgcccttgggattttggttcctgagcatgtctagtagagaaggtgtgaggagaatagtggcgactcatgacaaagtccatttgggtgatgtaaattgttaggaaagagcctgctaaaatgtagttgtgcagaggtgtgcccaaacagagacctccacgtgagagagggtgtgatggggccggcgcagagctcagttgctctgtgggtgatggtctgctggaactgtggacatgactgtcaataactcttggccatagatgaagtgtccccccgatcctacatgtagacctgaaggtcacttcctaaccccgtagccaaacctttcggctcggctgtgccatgaagccagatcatttgtttacagttcagaccacagatgtgattaaaatcaaccctttcaaatagaacgactctggagggagacactatacagaactcagcttttgacctctgctggtgtagtgggtaaaaatgcccagaagagatgggtaggtgagtttcttgaagtttactgtgttttttaaagtctcagctctcaccacttaggtttgagcaaaatgtgcagaccaggctctcagtttagaactgagtgggaacagcatgttatagatgaggtgacagagtgggacccctcaactagtgtgagatgtgcagtgcccagagtcctggtgagctgccatgggggtacgttggggagcattgctggggccctgctaatgtatcatggcaagaaatcctgtgtcattcacgtatttctggtgaaattgaattgtgtcaaaggagggcccctttcagtgattggctgagcttggtagatgcttaaggcattaggatggcttctcagataggccagagcttaaaagatgagggaggtgcaggtagacaagtgtaggctcagcacacctgtgggaacacaagcctctgtgatacctggtagtgtagccattgtggctcctttgggtgcagatcggggaaggacccggaatacgacgcttcatgttttgggggcagggggtgggtggcatggggtgccctgtctacagaggtggggaggggagggccctctgactctacccctgtgtctccttatccagcctggagatgacatagtcttaatggcagaagctctggaaaagctcttcttgcaaaaaataaatgagctacccacagaagaaaccgagatcatgatagtccaggcaaaaggaagaggacgtgggaggaaagaaacaggtagagtactgaaatagcaagtaaattggctttctccccgacctttgtcccttttccaagtttggtggggggctgggagtggcaggaggatgtgacattatatactgcatgccgtgttggtgtttggacatgtgagattgggtttggtgttggatccatcccatagggtcatgtggccctgtggcctcttctaagcagaaataattgggccctgccttttctgagggtaggtgatggacttagggtaaaaggaaagtgtaacttctcaaagcactttgacgtttgttgaacacttcaccctgccagtatcataggtggtttttacttttccattttaaggacattaacatgaccagaaatcattttaactaacatctcagttctaaactttgaggtttgtgattggaattaccttaatgcactggtgtcagagttatccctgcttctgatgctcagtcatctgaagtga

SEQ ID NO: 91090 - DNA, 1170 bp, Homo sapiens
agcggccttagcctctgccaggcatccttactcccaagtttaaagtcattgtgtctgtaagaactgtctggtgctattgcttcactgaatacgtgtcaagcactcgggggaagataatcagaacagggcagtacgtgtctgggtcttgaaatggctcaggaaaggtatggaggcagaagaggcgccacgctctccattgaccaagatgaggagtggaggcagtcagctgtgttggcctgcgggagggagactgttgggggagctcactgcaccaatctctagctgggctggacagggtccatagttgagagtgaaattctcagagcagatgcacagaaccaggagagaaggaactggggactggagtggaacccagagcgttgtgaggcccttaggggttggagggaaggcagaaggcctacagaagagagcatttccccagattccaacatcagaagctacagggaggtcaaagagatgaggattccgacctgatcatcctgttgacctttaggagggcattggtgaccttaggaagacgtgacacagaagtagaaaccagattgcgacggtgtgaatgagaaggtgaggatgtgaagccaccatttcaagaagcttggctttgaagggaaacgcatcagtgccagaatagcagaggggtcagcttgttacaagaaaacgcagtgggaactgaagcagggagggctgagaaggtgaagacaggagaaggaagggctgggggacttgagattgccgagaagcagcagcatcccagttgaggttgagggaacagtgctggccagcgggacagacaagtatgggtgattggttaggccatggggtttgggagttcaaggtcagtctctgaagtgcaggctggagagtggccaggacgttcttggtccaggcagagtgtgaatctacctgtccctatgactgttgacgtcgccctcattagctctgacataagaagaagggactgatccatggtggccctgatctgatgtcttcagagatgggagagtgaggagctgaggaaggagcttgctgagtgagagtggtctcagggcatttggtgggggctgagccaaaggggatgcttgatcaggagcatcatcatgctaaatctgtattctggggacttccttcttcaggagatgttaataaggc

SEQ ID NO: 91091 - DNA, 1276 bp, Homo sapiens
tgctcgatgctttgtgtgtgataaatgcaaggagttttaatgtaaatgtcatatgtgggagcctgcacatcatccccttccacacacaggcagcatctcctaaaaactcacaggtgggaaaagggatgtgcaggtttgtgagacgtggcttcattgtacatccttccccatgaccttcatagttcccagagcctttgctggctcctagtgggctctcaccacctcactctgcctcctctgttggtttgtggtctcctccctgctggagggtaagtctttggggagaggagacattggaaccctttcagtcaaagcatggggtggtccctctggccaacttggctagctaccgccagggaactcagtccttggagaccacagccagagggacttgtcattctgagcggtgcccatctgctgactgatatctcacgggggctcttctcttcctttgtagagtgcctggtgaagaatgtgatgggatcactagcatgtctgcggagagcggccctgggacgagattgagaaatctgccagtaatgggggatggactagaaacttcccaaatgtctacaacacaggcccaggcccaaccccagccagccaacgcagccagcaccaaccccccgcccccagagacctccaaccctaacaagcccaagaggcagaccaaccaactgcaatacctgctcagagtggtgctcaagacactatggaaacaccagtttgcatggcctttccagcagcctgtggatgccgtcaagctgaacctccctgtgagtagtgtgggcagggcccagggtggccgtcctggaggtcgtctcctgcatgtctcctggtcagggcagttcctggggggagggtaggagatgcatttggaatcatggtgagagctgcagggcccttgagtgagtggtttcagcagttctgatcagttgaaatcagggagaaagaatgagctaattggcttaacaataactggtttcttagatattggaatcctggggaaaattgtgtagaggttgaagcagtgggagaaaggaaggcccacagatctacttccagttccatggtgagttgaagtcagagcacttggccatcctagccccttcatttctcaggtgtggacatagttgatcaaggataagtagacgtagttgatcaaactatgctagaggggaattggcttgctgcagtagtggtcacctagcatcatcgtcactgtcacccggagcacacggtggggaaagatagtgggattacctcgcagggagtg

SEQ ID NO: 91092 - DNA, 1037 bp, Homo sapiens
cctgagtagctgggaccacaggtgtacaccaccatgcctgggtactttttttttttttttttttttggtagagatagggttgcactgtgttggccaggctggtctcaaattccagacttaaggtgatccacctgccatggcctcccaaagtgctgggattacaggcgtgagccactgtgcctggacaatctttgttttattacagcaacttgctgatcaagtgttgcaggctgtgacactgttgaatatagtgcaatctggtgttgaaatgatcaattgccttgtgctgatagttcctgcaatgccatctgagtttaccatgacatccccaaggcacctgggcactcagtttgggaactacagcattgtctaaccttgcttcatccttttcttctacactgggaacatgatatagggtttctgttggaagtagatacaaaagtaggacatcaagttcgattatgtagccgcctttggattggaaacaataagcgaaattcttttccttttccttgaccttcagctaactcttaacgtggtgaatggtggctcctgctttttggccacaggtcagtatgaaaatggagagggagcagcagtttttaatcttttcaacggaaaactttgaagatgttgtctcctgttatctatgccaggcatgccttctcttgccactgcctgcctgacccccaccacagaagcgcacacactcttcccccgcctctggtctcattctctgtcccttcttcagagatgccgcctgtccctcgggtcagtgcagatccctctccccgtccatggccagagcagccctgcccttctcctccacagtattcaccccatgtattgcctaatcactcgggagaatgccatgtcaaccgctgagtcctagggcaaggcatgttaggacctgttgcctgagcgagtgactgagtctggtggtctccacattatccatgtgagagtgtgaactgttttgcttttccagagctttgagattgagctggaagccccaggatgacaatgtgggtatggtc

SEQ ID NO: 91093 - DNA, 1111 bp, Homo sapiens
aacttgtgatttcatgaggggctgtagtcagttggcattggctggcagtctgtatggaataaaacaaatttaagccatgtcccctcaggcatcttactgcttgggaagcataaataacaacttggtgtcccttccccttgcccccacacctcatgacttcagcacagtggtatgttttagatttcacctatgacacgggatatatctcattgtaagcagatggccaggtgctgcagggagaggtcttggctctgatttgtttacgaggatgaaattctttggaatactactgctagaagtctgacttaagacccagcttatgggccacatggcacccagctgcttctgcagagaaggcaggccactgatgggtacagcaaagtgtggtgctgctggccaagccaaagacccgtgtaggatgactgggcctctgccccttgtgggtgttgccactgtgcttggtgagtggagacagctgtggagcagaggacttgaagcacacactgttccaaatgacgtccagccaaccaggccaccatccactctgcctctgtccccatggggatgatgatgaagatgataaagtcgcagcctgctttttagggttgttgtgtggataactaagccaatacagatgaagtgctcgataacagcatcagctcaagaagtggcaggtacctcctgtggagctcttctaggccctggtgcaggtctgtgtgatgatggcttgcataaagctctgctaagtgtggtttaaccagccatcgtcttggcgactgcttctgccttccctggcgtctttctacctgtgtgctccatcactttaggagaggggtgagtctgaacagaccagacagaatgaaggcaggattactgggtttcaagaggtccgctgggaggccaggacttcaggtagaactgcaaatacaaagtatagctggtcccaacccattggttttctcagtgacttgtgatggacggaactgggaactgaatctccagcaatcagcagattctgggcagttgtttgtggtctttctcttttcctctctggcttgcctttagagtcccagaactaagcctgccctgcatgtctgtatctatctatatc

SEQ ID NO: 91094 - DNA, 1123 bp, Homo sapiens
gctaaggagtctggctttctgctggaatcatttggaaaggtcgtgggagaaacatctcaagcctgcctaggttgtctctttagggcctggcctctggcttagggcactagttgtcagaacccagaaaacagagctatggggcctgtgtcggggagtggggttactaaacaaaggtattttgaggtaaaagacgtgaagcatttctaacgtggttctgtagtttgctttccctaggttgttatggaccaagagactgtagctgactttgtttaactctcatgttcaggagtggaggaggggacttgagtattaacagccgccttgacacagtggggacctggtggctgtggaagcctgaggagtcggtgcctgctcctctgaactttccctcccctcagcagatggtactgttgcgtgttctctctggtgccagtgaaagagctcattcatgccattcacagagtagtgtgcttagaactcagccctcctccatctgcaggggcaggcacccgccacggcttagtggccaccctcgggcgttgacttcctcccttcggcggccctgtgtgtctgctgggcagtgcaccagcctgtgtagcaccagctgctcggctgctttggtaaaaacaagggaagactgtgaagctgttctgtgctctgcacaccagcaggagaagccagcggagggtgtggatgggcttagggcagtgtctgcagttccggatgaattctgcctgtgccttataaacatcttctgggaaggagctgatttttgatgggtgattgtccaagtttataactggatcctgtgtttcactcctcttcttctatttatttttatttattattttttgagatgtggtcttgctctgtcaccagtctggagggcagatcatagctcactgcagcctgaaactcctggcttcaagcgatccttcccagccacccataaatccttttaataagttgcagatgtgatattacctctgtgtacttcagcaaacatttcttaagggcattctctttgaaagcagggactgaaacatgtatttgtacgcccatgttcatagcagccctatacacagtagccaaaaggtattatagaagcaacctgtgtccattg

SEQ ID NO: 91095 - DNA, 1504 bp, Homo sapiens
tgagatgttccagtggagaatgtgtattctctgggtggactgttatcctgttcagtgcataatacggaggcaatgagaagagattaggaaccacagagcctcacttgtgaaagtcataaggagtaggaatttttaaagtgccatcccatctgccacctacatttcttttttccatagggtttaccatctcctaattttagttgttattttcattcttgattgtctatctgttcctgtgaacccacaagggcagatgtctttgtgttgaatctcctgagcccacagtctcccaagagatgtagtaggatgagtcagaactcccagtattttcacctaaaccaggaaaatttcaaatgatggggatactgagtcatccccaggcacctgctgtttggctagcctcaactaggagctgatttgcagtctgttcttcaccttaacaccatctccttataggcctactccaggagcagggcataacaagtcaggagcaggcccagtagacacatgttaggaacaggatcggggtggtggtggtgggtgataagcaatggtcaggtcacagttaccataacccattgacttgggggttttgcagggtctgaagtgccatcatacccacttctttccatctgggaccagtaaaaaaaataccatatgcgtctttaatgcaatagagttttttcttttctttttcatttatgaagaacgctttttaaaacctctcaaatgtttccttgggttgaaatcaaatttataatagcctgtatatcatcccctagagatagcaaaaccaactcatgagggagcctgtgtttatgagggaagagggggtacacttaggttttcgtacatatgggtatgagatggaacacactggaaacatgaaaactgcaggcttagatgagaagcgggtgtatatgttgtgagctttaccatctgaggcagagtcccagcctggccagattagctgtttgcctagagcatctttctaggggttggtgttctgtatgttgaaatgaatgaaattgcttccccagggctggaacacatctgtttgggtggtgttctaggtgtatacttgcacccatttattattaaaggggtggtttgagtttgtactggatttgatgagagtttttctttttcagtactcgtgatgcatttcttcacctgaaagtataatgcattttgatttctatggcaaccagtgaacgccaagggaacaaattctatttctgttttctaacgtaacaggattagtggaggcgcatcaaaaattccattctaagtcagtgctgcgtcttgaagagaattgaaatggtctagtactaactttttaacattgactttgaatacacttttaataatccacatgtcagtcagcttactcttggtgttaaatgtcactcgagcaggaggaggcctcgatgggagcttctttttaatctccaatggatcctcagtgaagtccttagggatttcattttctgggtttcagaag

SEQ ID NO: 91096 - DNA, 1780 bp, Homo sapiens
gcctgtcgtccagatgtgtccagagcagccacagtctctctcctctgctgtgaactgcacgtccagacctttatcagttacagctgcagaaatgcaagggaacaagaacatttcgccttggcgtttatgttttgctcaacacagaaatgtttagtttcagagtatgagaaaatcattacatttgcgaaaactcagactcatggtatgtcctagcatggtgctccatttcttaattgttcctgattgtgctatccaggagcccccagccctcagtctactcattagcctacaaaaagacacttagcgttttggggattccagggaatcgtatgccaggaaacggtgaagaccaaatatgtatttcacaatatcacatgctacaacttggatgaatcttaagacattatgctaagagaaagaagtcagacacaaaagggcaaatattgtgattcaacttacatgagataccaaaaatggtcaaatacatacacaaaaaatagtggttaccacgagcaggaggattaaggagttactgttgagtgggtagagtttctttttggaatgatgcaaaagttccagaggaggataatgatgatggtagcacaacagtgtaaatgtacttaaagccactgaattgtacacctaaaaatggttaaaatggcggattttaggttctgtgtattttacaataaacatttaaaatataggtgtgctttaccccttccgggtcgctagcttggggacaccttactatcagtcatatccactagagactaacgagtggtgcctgcacgagtcggctaaagctcttacactctgccatggcggttaaatttttggctgatttttcttttggcaagaggacatagctgtctgctttcctgctatcgagttgccagctgttgcttcctgtcttgtacctttaactgctactctccttttaatggtctgcttatgatctggtgtcctgggaactgagataagcctgccagtggccttacccggtgccaccctgctgggtctacccagtgccaccctcctaggacttctggtttgggctcaggtagccaggagcccttaaaacaaccactctagtgtctttaacaagcgaaactgtatggtttcaggcttgttttttagcttcggtttttatattggcacctgaggttcagctaatctttttctgagttaaagatgagcttatttatttatttttttctttcagcctggatgtcactgttttgagtggtgctgccattggcctccttgaacttttagcatcgacagtagtcggctgttgtggagacacccaggtgtgcacttggtgtggtctggcaggaagcaccctttcaggggcacttaactccaagaggagttaagagagtaggacattaactaccagcagtgtgagcagagttaccctccttctgttgctgcaatcctttcacatccgaaattgtgagacctaaaactagacttttggtttggggatgtttcaggcttttcttttctttctttctttcttttttttttttttttttttttttttttttttttttttgagacggagtcttgatctgtcacctaggctggagtgcagtggcaccatctcagctcactgcaagctccgcctcccaggtttataccattctcctgcctcagcctcctcagtagctgggactacaggtgcccgccaccacgcccagctaattttttgtatttttagtacagacggggtttcaccatgttagccaagatggtctcgatctcctgacctcgt

SEQ ID NO: 91097 - DNA, 1044 bp, Homo sapiens
ccgcacgcagcccccacaaaggcagttttatttcttccttcccaatctgtgcctctctcatttccttttcttgtcttattacattagttcggacttgaagtatgattgaaaaagagtagtaagaatatgcttgtcttgttccagatgcagggggaaagcatctagtttctcagcattaagtagataccctgtgattgtgataaggcaaattctggccacagcaacagttgggaaagccacccaaggcaggcttgaaattagcaaaaatggaggacacacggaaagccttttgaaggaaagattttagccagatggagtgtcttggagaacaaggtattcccggcagagaaagcctagtgtattgatagaagaaatcgagggtcaggaggccacatgagctagcaacagcaagtgcatccgtgagagagatgcgggaacctgtctctagtccctgggctcttgttagatgcccagtgccatgaggtgctagggatacagtatgcatagacaccagacacacaccgtggcacccccaggctgcagtgggacatggcacaggtttctccagcaagctggttttctgggatgggcagaggttcaacttcaacaatatggtttgttttctgggctgttgcccccttttatggaaccttttatttaatagcaggctaggaaattgtaaacagcacaaagtagtagtatggtgttgagtgtttagacggaaaacattcatagctgaactgtagtttttatcttcattttggagttagtcatgttctttggtctctgaatggccttctgggcgtggggtctgggacagcctgcacacctttcaatatccttgactgcctgctacttcactgcacagggctccagatgcccctcactggctgtctgtgtcccaggcaccttggatgttggccaggccctagggacccaggctctgaggagatagcgattctgttcattttggattagccatggcacccagccatcatttacaacattcttccctgggaacctggcagagaagtcccaatgatt

SEQ ID NO: 91098 - DNA, 1503 bp, Homo sapiens
ccctgagcaaaggcatgtccaaaagcagatgagatgtcaacttgctgtgaaagaggcccattagctctgtaaatacagagcgtatcttagttctttgcacttgtccagtaaacactacaaaggaatgtgtggaagtgcgtcaggctttgatgggtaaaagacttgaaaagcaaccgcagtaccccaaggcgattttaaaactctgtgaagccagggtttgggggggttcggtggcagtggctcagtgcttctctgtatcgtgtgtacgttgtttattcaggaaggtagggagcagcagtatagtccatctgatgttttcttagcagcggctctcaagtagatttaggactgcagaaggagcagcttggaaggctctgcagtctgtgcagcctggtcaacgggagggcacaactggagaccatgccaggcctggctgccatgctatgttgtgtcttttgttaagaatgtagctgagggctaatgtaactgagggctactgctgtatcacatcctgtgactttgtgtgtcaaaggggaaggaacttttaaacgtctatctgttagaagctatgctggctgcttttatgtatcttttgtttactcctcacagatacaaggtagatgttacgaaatccacctagaagatggacctggggctgaggtgcctgcccaggggcaggatctgaacaaagatcttctggctttgaagtatctgtttgtttcatgtggtggctgttggtggggggggcttctgccgtcagagcctactctccatgagaggtgggcagaaagggttatatgcctagagaaccagggagaaacagttgctcttcagattagagaagtctctgtcaacacaactcctttgttaagggaattttcagaggatttagagtaagttgatttgtctccctttatgcccctggattttccaacttaaagctctgccgctggacggagtggtgcttcagaatctcagtgtggctggacggtcaggagactgcactttgggatgctgcctcacatccagatccttttggctccctgtccacttcagcggccatagtttactctccgcgccactgctctctaaagacacactggctggtctgcggacatcatgtgctagcctctgcctcaggctttgggccttgtgtggctgaccatcgtggctaatctctggctttcttcaaacacacattgaggcctgtcaacctgcgaagcactcactagatactatccatgccaatatgcacttggaagaaggggaacaaatgcggccacagcattacagtgtggtagatgctgtggttgcttgtaattgtgcattactggtatataaagaagcagttgatgtttgtgtatctcgcagccttgcttcttatccaggagtcttcgggattctttttttttttattttgagatggagtctcgctctgtcgccgggctggagtgcagtggcacgatcttggctcactgcaacctctctctcccgggttcaagc

SEQ ID NO: 91099 - DNA, 1034 bp, Homo sapiens
cctgtcttcttcattcaccccctacccaccaccaccaccaagggactcttgagttgattactttgctgtgggcatagcatagcaatctgtgtgcggaatgtgtggaagtgtgtcaggctttgatgggtaaaagactttgatgggtatatgagcacatatatcatgagaaaggaattgtgtgagtttctgtgaaagttacagaactctccagcaaccattagtcttggggaattctttttaaaatggcaggggtcattctgttcattctctatgtgatggtcacttctcatagagtgatggggccttctcccttaagacagacacgtggatcaggaatagacaggactgacaagagcccctcttctttcccagatggaagacactgcctatttctacaaaatgggggatacctagccaccccggtgggcagccatgatagctgagcatgtttgctccccatgtgcccacttactgcaagtgtttgtggtgccaccatgactggggaagggctctgtgccggcagaagagggttgttgctacacctggggtgtgacctgtaaaggtgacacgatgtgccagcagttacccaaatgccagaatcctaggaaattatcctgggctgcttggggatgtcttagtgtgagacctgttttctttctttgggtcttaggcggagtcggattgatatttgaatgattgggcattctttctgttaagctgattttctggttgtgggaagtagattgttataattttggcttagttcaaagtgttagggaagctgtatagaatttctttcatctctttttcagggtggggtgaggagagaagggatgtgaccacaagcttttttttttttttttttttttttttttttttttttttttgagttggagtctcgccctgttgcccaggctggagtgcagtgatgcaatctctgctcactgcaaccgctgccccccgggttcaagtgattcttctgcttcagcctcctgaatagctgggactacaggcgcctgccaccgtgccgggct

SEQ ID NO: 91100 - DNA, 1055 bp, Homo sapiens
ctaacatggagaaaccctgtccctactaaaaatacaaaattagccaggcgtggtggctcctgcctggctacttgggaggctgaggtgggagaaatcccagctactcgggaggctgaggcgggagaatcgcttgaacccaggaggtggaggttgtggtgtgctgagatcgcgccattgcactccagcctgggcaacaactccgtctcaaaaaaaaaaaaaaaaaaaagatggtcttaattttaatgtaggtgaatttatgaatctttgttttacggttggtgggaagaacactatcctgaagtgaaatatattttatattttcttctggaagttgtaaggttttgcccttccaattcatgcccttgatccatcaggaaatgattttttgggggtataaggtgaggagtcaggtgtgaccttagatgaattaccgatttcttctcgcatcagcttccttggctgcaaaactgagaccctaatccctgccctgtgcgaggttcttgtgaggtcggaatacagcatacagacacattgagccccatgtctcagtaagcattcagtaattgcttgttggtttaagtccaaccttcttccctaagcatgtggacactcagggaaagttggcgcttaactgggaaagttgttgctcgtacattgtctgccagcttactacaagcatcatggccaggctgggtttggctgctcagcacatcccctggcagggcactggcggcctggaaaatgtatagcaggcaggtgctcagtcagtcctagagctgatttcatgtgatatctgatgcatttattatagaaatgaaagcataaaaatgtgttttaactgtttcctactcccccggcacagtgacaaggctgattccaggcacagcttggttaggccagcacttgtaactatggtggggagcctcgaggcactgagtgagctcagcctccttgggcagaaaagcttgtttagttattgccagcacacactgtgtgttcctgtgggcaaacaaacagacggctggagatccgggggacctggtagtcgtcagcat

SEQ ID NO: 91101 - DNA, 1966 bp, Homo sapiens
ccgcctcggcctcccagagtgctgggattacaggtgtgagccaccgcacctggccccttttttgtacttttagtagagatggggtctcaccacattgcccaggctggccttgaactcctgagttcaagcaatgtgcctgtcttggccgctcaaactgcagggattacaaatgggagctacaagctactgtgcctggccgatgcttgcttttattagtagtaggtgtttattgaacacttgctttgtgtggcatttcatttgacccagccctgtgagggcattttcccatgttagtattgaggaatgtcggctgaacccatttgcctacatgcacacgcatgtgtttcaaaacataaaatgcaacatcctaaccattttacagtgtaaactatatgcatattgtcgtgcagcagatcactagaaagttttcatcttgcaaagctgacactgtatccttcgaataacttccttttccttctttctcccagcctgtggcagccagtcttctactttctgtttctatgagtttgactaccatagttattcatataagtagaatcagacagtattttttgtttgttgagtatttttcgtttgtttgtttgagatggagtttcattcttgttgcccaggctggagtgcaatggcgcgatgttggcttactgcaatgtctgcctcccgggttcaagtgattctcctgcctcagcctctcaagtagctgggattacaggcacccgccaccatgcctggctaatttttttttttttaatgtatttttagtagagacagggtttcatcatgttggccaggttggtcttgaactcctgatctcaggtgatccacccacctctgcctcccaaagtactgggattacaggcgtgagccactgcacctggccgattcagacagtatttagaattttgttactggcttacttcactaagcataataacctgttctccaggtccatccgtgttgtagcatgtcagaattccactcctttgttgatggagttgggttgcttccacctcttggctgttgtgaataatacagcagtgaacatgagtgtgcaaatatccacctgcctactgttttttgtttttttgtttttttttgagacagagtttcgctctgttgcccaggctggagtgcagtggcacgatctcgactcaccgcaacctccgcctcctgtgctcaagcaattctcgtgcctcagcctctcaagtagctgggactacaggccccttgccaccatgcctggctaatttttgtatttttaatacagacagggtttcgccatgttggccatgctggtctcaaactcctggcctcaagggatccacctgcctcggcctcccaaagtgctgggattacaggcatgagcccctgctcctggccatcttgcttactttttgaacacatgttagaactaagaacgtgggtgcggaagcctgctgaggggctttaaattccccatatcctgcctccacacggaaactgattttggggatggatattgggcatcggtgaagagtaggcacaaaggtacgggagatggttcaaacagtggtgcagccaggtgtctttcaggactgcctaaaggactgtttaaggccaggcacggtggctcatgcctgtaatcctagcactttgggaggccgaggcaggtggatcacctgagatcaggagtttgagaccagcctggccagtatggtgaaaccccgtctctaataaaaactataaaaattggccaggcgcggtggctcacgcctgtaatcccagtactttgggaggccgaggcgggcggatcacgaggtcaggagattgagacctcctggctaacacggtgaagtcctgtctcgactcaaaatagaagaaattagccaggcgtggtggtgggcacctgtagtcccagctactgaggaagctgaggcaggagaatggcgtgaacccgggaggcggagct

SEQ ID NO: 91102 - DNA, 1367 bp, Homo sapiens
gtagggctgttgtcaccctgttttgacaggttttagagaaaatggggtcactttagttccttgaccatgtggagcttgtcgacatcctcatggatgctgtcattgaagcggttggatgtgcaagcctggaatgcaagggtggatctagaccagacttgggggcattgggcatctccaggaggatggatgtgagggctcctcccaataggacgtcggaaataagagtcccagcagggtcccagacttgagaaagccaggcccctgtgtagtaagaacacagattagtgaatttgctttaatctggggaatggtgaagggcttttctttccaaaacaatgtgtcctagagtgaactctagtgacctagataagtatcatgtttaatagttttgtcctctgttcttggaggctagaaaatttcccacttctctttggaatttgctttgtctgacatctttcatttcattcattctatgcgtccacaccctcacgtcctccattttgtgagcagggttttgggagcaggactggctcattttggcacattatatttgtgtgtggaaaatgtgaagtgcgaacgaaagttcaagcacatactcaaggctgagctgtggtactagaaggtgccagtggtgggtccacctggagtgagtcaagcagtggttgaggtgacttgaaaatatcccctatcgatggttcaggcaggatagcccctgagttcctaaggcagagattcttaaatttggtctgtgtaatcttccctctccctcatcatggagtttttccggcaagcacttgatgtttctggttattgagcagttacttgtgctgagtgccagggattgtctgggtgctggaggtcagcggtaagcaaggtggatgatgcacaccctcctgcctgcccattagttcatgtgctaggagactgcagggcaagtgatgcagcctgcttggcttttactccatgattacagattatgaaatataaatattaatacattaaacagttcttactaaatcattacattcacactttttttgagatggagttttgctcttgttgcccaggctggagtgcagtgcgcaatctcggctcactgcaacctccgcctgccgggttcaagcaattctcctgcctcagcctcctgagcagctgggattacaggcacccaccaccacgcccggcaaatttttttgtatttttagtagagacagggtttcaccatgtcagccaggcttagtcttgaactcctgacctcagatgatccacccgcctcggcctcccaaagtgctgggattacaggcatgagccaccgctcggcctttttttttttttttttttaaagatggagtcttgctttgttgccc

SEQ ID NO: 91103 - DNA, 2587 bp, Homo sapiens
aggcaccgctcccagccttttttttattttttgaagggacgaggtcacactatgttgcccaggctggtcttgaactcctgaacttgagcaagcctcctgccttctttgtctcccagactgctgggattacacaggtgagccactgtgccaggctggttttcacatgtatcttacttttctagacatttacaactttatgacttggaaacagggtggatcacccattttggtttgtccttgcaaaaatcctccagaggtttcacagagttgtcaggtaacgtgtcaacagtgatgtgaaccttcccagggcccctgtgcccccaactttgtcagcctgtgctctttcctggggataaggaatttgagaatgtaccagaatgggtctgttgcaaaggccgcagatgagggtcttggaactagggctctacactgaagctgctgctgtttgtaaactgtctccatgatttgctgttggtatggagcctttgctccagaaggtaactgaatggttcctagccagcctcattatttatgtggtagtgttggatgtgggtaggcttacaagatttatgctgtggtcccttacgtggcttaatgtgtgccctgtgctgcgggacatttgcttacgcatgcactggaacctgcagattgaggaagaaagcttgtgggaaactaccattcttcagcatgacatgcttacgtttagggatatcgacatgctacaccaagcagtgtacacagtgccactctctttctcctcacatccttgtctggtggaaggaataggaaatataataccataaacttgaataattcatacttctgtaattggggcagagttgagtcagaggatggaaaagaactcttattacttctaagaatagcacctattacagactccttcacccccccgccccaatctctatagtttgaagattaaacttgtatgtgccaatggatgttttccctcattcatgtaccattggtcttggcttttattaatcccatttctctgctcagttgaattgcagtcttactgtacaggcatgatttttgtaacttaagcagtttcccctttctattttgtaattaagagaaataagatcatgtgcgtgaaagagttctgtgaaaggtggtgctatctgtgtgtaggttgttttcatttgtaatcttcattaaaaattacttggctctgaagcactttcagttataaaaagctgccaagtaatagagttgtgtgtgtatgagactcttcatatgttttccttttgacagtaggaaaccattcagctgacagattagctgcctggaaataataccaccttcgtgttcatctttttcaaaataatagctcagctatctgtaatcccaggaatgcagttttaaattaccagtgttagagcggtctctctattgggcccttttgagttgcgtagcatgctgcctgcagcttgcttatcctcagtctttaggcctgtctgctctggtaactgatgtcctttgcacttgtgagagctggtttaccctttctggcctgtgtctctttcccctgaccttcctgaccaccaccaccaccaccaccaccccttgcccaccaccccccactcccattgttcaccttaaagcagtccttatctttgttgactctgaaaagttcagggtttgtagcaaatagctgcctatgaataggcttccctgtaaagtataaaactacattttctgactggatgcttgacatcttccttaatttttttctattgcttactgcatgcctgttttaaagtggtggagccagacatccatcagtccagtttctgtgtcaaccatgatgctgtagggagctgcagacttggtcacttcactgccacattgccctccccagaccctgagcttgagcacactgctgctgattgttctgttttagcgaatatttctaagcctctacgcattccttaagtcctcagaaaacaaccatatacactgggcactagtatcatcccggtttgcagatacggaaggtggtgcttggagagctgtcacttgggcagggttgcagggtcacagagttggtaagtacttggagcacttgtgtccagagcccactagctcttgtctgctgtggcataagctgtgggagtccaccatattcagctttgttctcagtgaactcagatggtttggatgatacgtagtgagcacagggtagagctcagaagtgctttccaagatgtccaggcaaggcagcctgagagggaggagaccttccaactgggagcataggaagggggctagcattgagtctggttcttcaatgaggacagcagaggtttggaaagagacctggacaggtctgaaagcaagtacctgtcccttggaggtgctcaccagtgtgaggggatgatcagaagagggatgcagaatgctgactggacaggtctccttttcacccagacatctggtcagtaaaaacagtgcttccctcctgaggagtttctcatgaagacattcacaagagtggaatttaacctcatcttcaaaaagtttccgctagagaaccaagttgccttgatttggtttcacttctatt

SEQ ID NO: 91104 - DNA, 1344 bp, Homo sapiens
aagaaattatggatggctgaaaggaggtttccatactagtttgtaaaccagaattagtggaaaacagttcagaattgagttactcacaaagggtagaatgaagatagttaaggatgtgtgtatcccaaatattttcgtagaagatgaaatgaaagacactgtgtatcttacctgtgtcaggcatagaaggagctctgggagaagtcaagccaagtctcaggagttacttgggtgggctgaatgatccagtttggcgggaaaacagccctgaagggagcacaggagtgagaccagcttaaagtgttcaggaaaatcttggataagagaccaggtagatataaagtttaaataaatgcttacaagattgaaattgtgtttatcacattaggtctctcttccatataaataacaagttgttatttatataacttatgtaatctgtatggtatattgttattactagtaactattgttagttcaggagactggattcatctatcttccgtgcctgcaaaaggtacagttgtaattttgctatttgctaagctatttccatactcaagttctcgtagtctgctgcttggcattcctcaagcattacgaaaagcctcctcagatttccataatcaaaaacaagtgttaagttctactgtaataatcgttttcctacagttctcactgttggaaatattattcctttaggagacacaaaataattgagtctagtggctaagaatgggactgaccctgcttctctctagatcatcactccttaagaggaggctggaggtctccttgagtatgctacagatgctttggatcctctctccacaaaaatgcacataggcataaacattgaactctaaagaccaggtaccagaatgaatttcctgattttactctgtggaagaaaaatttattacgatgttggttaaagggctattgatggcttttttgttttgttttgttttggaggtagagtctcactgtgttgcccaggccgtagtgcagtggcatgatcacagctaactgtagtctcagcctccccaaactcaggtaatcctcccacctcagcttcctaagtaactgggctacaggtgtgggccaccacactcatctaattttggtatttttttgtagagacggggtttcaccatgttgcttaggcaggctggtctggagtcctgggcttaagcagttcatctgcttaggcctcctaaagtgctgggattacaggcggagccacttcaccctgcctcttgatggttttgaatactttttatttttattttttaagacagggtcttgctctgttgcccaggctggagtgcagtggcatgatct

SEQ ID NO: 91105 - DNA, 1151 bp, Homo sapiens
tctttccatacctttctggcctccattggctctgattctgattgtattggcatctgggcttggtgaaaggattctggtccccaggaaggtgtaaggtctccctggaaaagtttggtagagtaattttggcagctggatgtgtggaggtcctgactgggagtctggcatactgccgatcgactttgggccttttgaccagaagaaccagttaagtccagttacttactaggcgtcattgggatccggttccacaaaggttgccttttgcttgtgtgaaatgcaattgaaagatatattttctttagaggttggtcacataatctaagcattagcttcaaattaagagaatgtgaataaatttgacatttgttctatttttcgtttatcctaggtgtagacagttgtgtgatccttccccttcccccctccccaggcatgtgttagcctgttctgcccagtgtaggaagtttctgggaccttgggctgtggcagacagcattggttgggcttgggtggagccgtgtaccagagcaggagaggagagagaacaccatggagttcactgttgggtgcagtcccagccccacccccttctggccttgacctcaggggagttacatcgtctccataagcctcagttttctcttctgtaaaatgggatcagtgtgcctgcacagtgacaaaagggggaccatgtgggtactgacctgggcctcatgtctaattgtataaagatgcctgggactgttgagaaagatgggggccgaggagtgctggctttgctttctgcctgaaaaagtgtgagaaatgctatccaggcccttcctacttagtatgtgtggtcaccttccttgtcttggtctccactcaaggctgaaactctttatttgttcctagctgctgttagtcaggagacactggtacattgtcagccagcaccaggggagaggtgttgggcttggtattacacaattttcagaaacgtgaattagtaattctcgtgtccttgtgtgttgctaatgtctgcagttgttccttctcaggcagtaacacatacatgtctatgggtggattagccttcaaagttttgttttgtgtaaagaaaagggaagagggtgagaaaaatttggggacttcatacttgaaaattt

SEQ ID NO: 91106 - DNA, 2509 bp, Homo sapiens
agcgcagctgtcccggtccgcggtcctctaggcgggctcggccgcggcgctcacgtgggccggggccggcgcgctctccttctggcacccaggtcgttttgcctgggccggggcagcgcgcccccacccccatctcttcaccttcccggcggtccccggagtgctgcggagaaaggggcaggtcccctgcggagggaggtggctgcggctgcacgccggtctgaggccaggcctcagggcgggagcggtgccctggaggcgagcttggcccgcttgacgcacccactctcagcctggcagccccttgctgggcgctttgttttgctcggtccgtgctcgccggcgtccttgcaacggcctattttatttgcagtgttgtgtggtggtggtgattgtggtgatttggggtggggatgtgggggagttgtgattcagcgaaataaaatgatccccctcctcccaaacggaaatagcatggcttcactcggctgagatgcccccaaggcttgggtttgcttgaagatgggaaaccccactctgttgtagtggacggtgtaaatactttagttcaggccggtgcatgagtcatgtgcttctcctgggtggctgacctcccttttactcaagactacgctttgtttttttaagatttttatttgcttgtttacttgtttacgtttcgtgcagcctggtggggtgtctggtcttgggttcatttctctgcgtgtgtgttggatgctagtgaccccttggaatgtatgcctcacgagaattggaatgtctttgcttaccttcgacagggctctaccagtccgtggttccaaaaaccaagtcgcagtttacctcgtaagccagtggctctttggggctgtaacaatggtcgggagttttttgtgaatggagctgtcaagttccctaccgtctttggaagttgtaaagaaagcgatactcaaaaggatttatgaatgtgtttttaatttcaagaaagtttttgatggcacaatctgttttatgatcttgccaatatatacatatacttttagatggagtctcgctctgtcgcccaggctgtagtgcagtggcgcgatctcggctcactgcaacctctgcctcctgggttcaagcgattctcctgtctcagcctctcgagtagctgggactacaggcgcccgccaccacatctagctaatttttgcatttttaggagagacgcgggtttcaccatgttggccaggctggtctcgaactcctgacctcaggtgttccatcctcctcggcttcccaaagtgttgggattacaggcatgagccaccgttcccggccgccaataatttcataaagcatttatttcggtttaatttgggtggggattatgttttttatctttttatcttatcactgatgcgttgtagataaccaagcgcttccccccaaaaacttcagccagggaaagataaaccactcagggtttccattgatcaaatggagaaggcaaagcctaatctgaaacaaaatgtattgctgctctgttatccaccatacctctttctttggtaggaaacatagtatcttaaaggctcaaactggagttagccggtctcagaatggctttagttggtcttaattggaaggagtcgagtccacctccgagtatcttgctagcagtcagcccagtggaattgctgaagataaggaactttgcctacggatgaaagataagaaggtagctgctgagttttaaggattgtttggctgttctggggtgctatatgcctagcttcgctagtctggaggacagcgagggaaaatttttagctaagaataacgagaatcattggccacttagtaacatttccactaaattattgaattgtttaaaggaatttagactttgtttctaaaagttgcctttttgagccagttgttgtgatctttgtactaaattgcacttttgctttaggaggtgggggtaacaatattttcttgtttcacaattcaggttattgaatgacttcagatttacagatttaagagattgaattttgttttgtttttattttttatttttttgagagagtctgaagtcagtcgacaggctggagtgcagtggtgcgatctcggctcactgcaacctctgcctcctgggttcaagcgagtctcctgcctcagcctcccgagtagctgggattacaggcacgcgccgccacgcccagctaatttttgtatttttagtagagacggggtttcatcatattggccagtatggtctcgatctcctgatctcgtgatccgccagcctcggcctcccaaagtactgggtttacaggcatgagccactgcgcccggcctgttttgtttttaaagcaaaaaaccatttggcacctcagtgatttgaagaccctgggctgttaaatctgcttctgacaacctactgtatagtgtgttgtattttgtgaatgtaaaatgttttggtttctgattttgaataaacttgtagagtagaccatgt

SEQ ID NO: 91107 - DNA, 1744 bp, Homo sapiens
gaggcaggagaatcacttgaaaccaggaggcagaggttgtggtgagctgagatcgcgccattgcactccatcctgggcaacaaagcaaaactccgtctcaaaaaaaaaaaaattgcagaatgggccgggcatggtggttcacacctgtaatcgcagcgctttgggaggctgaggtgggtggaaaccccatctctactaaaaacacaggaggcggaggttgcagtgagccgagatcgcaccactgcagtccagcctgggcaacagcgagactccatctcaaaaaaaaaaaaaattgcagaatatctccccgaggtgttttctgaatctgtaggctctgagaacatgtaggattcactcctgtggcataatttacagaagtgtttcccttgtggactgctggttctgaaaagctgacatccccgcaatcatgggcctcctgagctctgcttacaccacgctgaccggtgtttcctctttggccagggtgaggaccctttcaccagtgaaactgttgatccagaaatggaaggagatgacaatttaggaggtgaggataagaaagagacacctgaggaggtggccgcggacgtcttagcagaggtgattacagcagcagtgagggccgtagatggggaaggagcgcccgctccagagagcagcggggagccggctgaggacgaaggccccacggacacagcggaggccggtagtgatcctcaagccgaacagctgctggaagagcaggtgccctgtggaacggcacatgagaagggcgtccccaaggccagaagtgaggctgcagaggctggaaatggcgccgagacaatggcagcagaggcagaaagtgcccaaaccagagttgctcctgccccagctgccgcggatgctgaagtggaacaaactgatgcagagtctaaagacgctgttcccacagaatgatgctcatttccctgttccagggaaggcgttgggatgatggatgcgttggtctttctcccttggtttgtaagcagtacaagggcgtgtgctcccagaatatgctgtaatctaattttggtgaagagacccagcgtttcctcctgagcagtgcctctcacggcttgtctcatgcagtcgtgtggcttcttgcccaggtttcaaagctgaagtacattgtccttagcggctgtaacatgtctcttgacagtagtgcacttggaataataaaggttgggtgattatatcttgatgatacattacttgttcaatacagccactgatggaatgcttccttttttatttttttccttaatttttttttttatttggttgggaacagctgaatactaggaatatatcttgctctatagaggatttttttttgtatgtttcaagcttcagcctttaacctatacctttgtagtgcaccatatggtgtgtgactttcacaggacttcgcagcacctggttcacatgtggcactgaccgcgtcacatccacgcactcccaaaggccagaagtatctgaccgacctacgccactggaaacacacccaccgcaacctcaagaaccagactgtgcagagggcattgcgtcccaatctttagtccttgctgaatcagttctctaatattttacctcatttgtgttccacctctagattacttcaggtttttttcctttaaaattagttactaccactcaaatgtatttacaaagagaatttggccaggcacggtgatgcatacctataatcccagcactt

SEQ ID NO: 91108 - DNA, 1021 bp, Homo sapiens
gcttgtctcgaactcctggcctcaagtgatccacatgcctcagcctcccaacgtgctaggattacaggcatgagctgccacacccagcatattcatacttttgttgttgaacttatgaaatcaatgtaaccccaaaaactgaaaagaaagagcttgtccttttcctccactgagtccacacagcctttcatttgtaaatgctcttgtttcacccccaattctgcatgtgctacatgggtatcagtggtgcatctttgcatttatctcttaagattgcctagcttttccagtttgttagtcttggttgcacagtctctggagccttctattcttggaggctggcgttttgagattcgcttctctgcatagggctgatctcaggatgactcggcagagcctggctggtttattctcttccttaatctttgccatttttaagagctcacatttggttccctttgcagttggctgctgaacagttcaagaaaaccagtctccatgtggctaagagtgttttgaacaacagacatatagtgaagatgctggaaaaatacctcaaggtttgtgcttgcaagtaccacagacaggaaaagctttcaaaagggaagatgaaccccaggagcagggagttgaatccagagtgcagcatttagcatttctgagtcttttgacagttgagggacactggaatgcatcaagctcaggaacatgacaactgggatttctaatgagtcagtgcttgcctggggactctggggatgtggcgctgcttgattaatcagtgcgtaatggatttttaccatgaaaaatcctgattgtttagccttaaaattctgagcaaatgatggttaggtgattttttaagaaaaacccaaggctagccctactcgggaagctgggatgggaggattgcttgagcccaggaatttgaggctacagtgagtgatggtgttaccactgcacttcagcctgggtaacatagcaagactggtcttgaaaataaaggaaagcggggaaccgg

SEQ ID NO: 91109 - DNA, 2930 bp, Homo sapiens
gaagcagaggttgcagtgagctgagattgcatcattgcactccagcctgggagacagggcgagactccgtctcaaaaaaaaaaaaaaaaaaaaaaaagacattgggtaaatataaacaaaagctcgggaaacgtggtggaacccattttctatgaagaatgccagaactggcatcccccaagtgagactctatctccctacggttggtgaacaggctccattcatagaattgtacgggtgggtctttgtcatggggcaggcagttctgcagcttaggaggaaccgagagagggtgggtgaatggctttttagcaaggtgattgtcacagaatctctgaaggcaactaggagtaataacaggacacacaggccctgtcctgagccccggaggctggtcctaacacactgtggctcattcttggtggcatagcaacctaggtcttgggtgagactgcccaccaggcagtggccagggactgggctggttgtggagagtctggacacaccagctcactgccggactttgtgtatactcttttccaggaggatgaactctgcgactctgggaggcaaagaggtaggcatcaccgtgtcccttgcagctttcctgtgtcttcccagctgccccgcacttactgcccagcttctgagcaagccaggggcctggatggaggggcccgtggctgtgggggaagaggggctgcagccaccagatgggccttgaccgtggcgatcagccaacactttgcttcaaagtgtctggggcagcatttactggaaacgggtctgtctgcctgacccgatgtgggctgcagtggggatggggggcagccttgggtgtccaccacagtcgaagtttgtagggaaggagaaacatgagagaagaggcccccagcccatcttctgtgccctcctcggccagtgcatttccctgaagtgttttctctggggcttccttttgtccagttccttcagtcgcctgccctgggctgtgctgtgggcctctgtggtggggatactggcagctgcactgcacattgcttcgtgcctgcgagtgtgtgacagcagacacctgcggggtcgggagcacccaggcccactgggtctttgagaggcgggcgcccttcagcaggtctcttcatgtccaatgcaggagaccagagggtctgcagcaacagcagagcaggcttaaatccctcatggcagagcggcctgaggtgccgcggcctggagctcaccctgaagccactcgtttctttacctgtcctgtgggtctttccgtagctggttaccccaaggatcataggctggctcctcagtggccctgctcccatccattctgaaggcccttggcttagatgttcctcctgttcaggctttgccagccctctgcggtcctcccccccgcgacccgcagcagtcctgtccatagcacggggcgccccgagcgcttagcggcacaatgctaaagcaaaggtgacatgtctgttgcgcgcaggtcctgctacctacccgggatgactttgctattaaacagcagtcatagtttcaggcagtgacctcttgccaaaaatcccacacgcccttttgagaggcttctgagcagcgcacgccggtcgccatcttcgtgggacagtctcgggactggcatcaggggtaggggttacagttcagatgcttctccaaccttttttcagcgtccgtccctggcctcatgctgggatgatggccgcgtggctctccgaggagctcctctgctggccccgggggacggacgggaggaccaattggtctcttcccaaatttttttctaggattgcttcccacgcagccctgggaaagccctagattgacggtttttgtgagtggaagatagaggtcgggccagcaaggactgtcagacctgctgaggccctagttcagacggggccgccaggacgctcgtcacagtccacctagaggtgggatagagggcggcggagcagctgcttcacttcctgaggccttcagctgccgcctcttcatccggggagaattggcttctcctgtgatattgggagaagaccccatcgcagggcatgagattggacaagcagaatggggaggacagagggagcagggggctgtggtgcacatggggtgggcaggctgtgtccctagcccatcctggccgcctcaggccatgtggggagtttggtgactactccgggctctcactccaggcccgtgtccaccaggagtctctgacagtgccttggggcatcctggaccctgccgcgtggtgcaggcagtggcagggcacagggtgcggtggccaagctgcagccccccgaccaggccctggagctcagctcctttgcaggccactcagagcgtctcgaagggacttgtctgttacaggagagaaggaggacgaggacgaggatgtgaagaagagaagggaaaagcaaaggagaagagacaggacgcgggaccgtgcagccgacaggtgaggcgcgggcacacgaccccacaggaggaggtggactcgtgcggtggaggcgctgccgagctcacctgtcctcgctccacaatgctgggggcctggtggcctgactcctctggccaaaccagtgggaggcaaaacagtaaacaattgggagtgcagaaaagaccatcactcgtgctcccagcacacgagctacctgtcttctaggatggctgggacgttgctttggtggttaggtttctgttcttgctttagaggattggtgtttgactcctgtgtctctattcctctggaatcccagccttgctggtgggtctgtgtggtccataactgctcagcagcgggctctgttactctcctgcaggcctgaggggcatccctgccccctagcctggtgtctggcatctcagacactgtcctgtgttcaccttatccaaatcca

SEQ ID NO: 91110 - DNA, 2411 bp, Homo sapiens
tggcagcgggtgcccctccccggttgtgtccaccatggacaggcctcgtggctgctgaagtctgacttggctcctccccctgtgacaggttatgaaaactacaattactatggcgcccagaacaccagtgtcaccacaggcgcaacctacagctacggcccagcctcgtgggaggccgccaaggccaatgatggcggcctggcggccggggcccctgccatgcacatggcctcttacggcccagagccatgcaccgacaattccgactccctcattgccaagatcaaccagcgtttggacatgatgtccaaggaaggaggcaggggcgggagcggcggcggtggggagggcatacaggaccgggagaggtgattatggacccaagccctcccccgggaccccacacatccccacctttgtgcgcatgggagtgggcacccactcttgagggagggcctgtccccgcctccctcttgggtgtggcattgacgagttgggctcgtggggggtcagtgatgttacagtaggacttccttgcttttcttcatggcggggcttgggcgtggttgttggctaagctccccgagactccttttttctacatcatgctattcctgtggccaggggctctgtcccctgctcagcagtgttccagggagggtgttggtcagttttggtcatcccagcacttaggtgggatgcagggtggtttggtttgctgttttgaatgtaggggcgtcgaggttatactgagggagtgtggcagtgggtgatcggggtgaccgcccctgatgggctgtgcttctgttgcagctccttccgcttccagccgttcgagtcctatgactccaggccctgcctgccggagcacaacccctaccgccccagctacagctacgactatgagttcgacctggggtccgaccgcaatggcagctttggggggcagtacagtgaatgccgagacccagcccgggagcggggctcccttgatggcttcatgcggggccggggccagggccgcttccaggaccggagcaaccctggcaccttcatgcgcagcgaccccttcgtgccccccgctgcgtcctctgagcccctgtccacgccctggaacgagctgaactacgtgggtggacggggcctgggagggccctcccccagccggccacctccgtccctcttctcccagtccatggctcccgactacggcgtgatgggcatgcagggggcgggcggctatgacagcaccatgccctacggatgtggccgctcgcagcctcggatgcgggatcgggatcgggtaagccctcgcaaggttccttccggccgccttcgcttctctttttagcagctttattgaggtaaaatttccccatctcaacattcacttaaatgtttttaagtgcgcagttcgacttttagttaatttacaggattgtgcaaccatccccaccatcacagtctaatcttagcatttatgtcaaccagaagagaaacttcttctcattagtcacccctgtctcttccccgcccccaccagcccccgacaaccaccactggtctctggatttgtgtgttctagacattttgcacaaatggagtcgcgaaacgtgtggccttttgttcctggcttcttttcactcagcatgattttctttttagtttcaaattatgttgtctctttgctttttgaaaagaccttttgtgcctgtgttgtctgatcctacaacctccttgttcttttctgtggggcatcttcatggccctcgtaagtagctcatggggtgtgcttgttgtctgtagcccaagaggagagggtttgaccgcttcggaccagatggcacgggcaggaaacggaagcagttccaactttacgaggagccagacaccaaactggcccgggttgacagtgaaggagatttctccgaaaatggtatgtcctgggggccaggtgggccagacagatgtaggatgggtcggctgcctgctgggggctctgcttgccccatctgtgtcgtggacactcgcaggtggcatgtttcaaccccactgtggtcagggcagactcaccctggatggcgagcttgggagggcggaaaccggatgggaccgttctccggggactgacttttcctttctttgtgtctggcagatgacgcagctggtgacttccgctcaggagatgaagaattcaagggtgtaagtccaccaggcagcccttttgcctctagtgtgggatttcttctttctttaatcacccttcctcacaaaggggcaggagcagctgccatggtagatttgactacctctgagtggattcaggaccctgacttttagctagatttctaaaagttttccaccttagccggcacggtggctcacacctgtaatcctagcacttagggagg

SEQ ID NO: 91111 - DNA, 1020 bp, Homo sapiens
ccccgtgacccgagctcggggcgggcggagcccgcgtggccgaagctggaaaccaaacctaataaagttttcccatcccacctccgggtttctctgttactgtgccgcgcgggcggggcggggtgggcagaggggcggggtgcgcatgcgcgcgggccgggccgtcgggcaccgcggtgggaccacaactcccattaggccacggagctggatcgtagcagcccgaaaggccagctgggacggcgagggcgggccctcgtgaagaccagccaatgggggcgcgcggaagtagtgacgtgtgcgcctggtcttccagtagtcgatggcggaggtgcgctgaacgcatgcgtgctgtggtcgcctagtaaacggggctgctggtgggccgcgtcgaagacatggaccagggctacggaggtttgtgttggctgctgggtgcggagcggggagggaaggctctgtgcgggcgacgcagccgctgcgcagactgccgccggccgggccttcgtcccgagcgtggttgccccagctgggccctccggagaggcggccagggcgcgcgcgcgccgctcattgggctttggcgccgtcgctcccggggctctgcgtgcggattggccgccaggccccgaggaggcgggcgggactcggggttggggcagacgccgcggtgggcttcgtgggggcgtcttagacagtgtgggccgtttttgcccctcaccttcggcggagtccttccggcccccagcgaccccggggtttgcactcccggcttcctcttccgaagacgccacaaaatggcggcgctaggggggcggagctacagcgtggggttgtgaggtcggacccggggagctgggtctggggccgcgggcggaccgcgggggccgcctctctcccgacctgccctaggcccgcggggccgtgtagggtctccgctgggctcacgtggcccagggcgcctgtcccggaagccgtcgggctgcgcggggtcgggcctttagtccccggtgcagcgcg

SEQ ID NO: 91112 - DNA, 1328 bp, Homo sapiens
ccgacaccacccccaagcattctgagcagaggatgggctgggcctttgagtcccccagatcccagaaggaagatgcagcaccttttcgggccctgcctcgggactgcgtactccactctgcacctcagggccacctggctcacgccagggcatccttccttccggtccccacctgggccaagtgcacacgctcctgcccagccttggtagcgaggccctccagcaactttccagcgactcgttgcctgttgcagcagctgctgtctcaggcttcagcctcctgcctgtgggaaggaagagctcctcccctgtcccctacgttgcagtaactgcagcctgcagactttctggccctttctactcccgaccccactggtcccagcctgtccctctgctgggaccgtacttcagaggcccgtgagcaaggcctgtttcagggcttgtgtctgggttgggtgaggcggcagcactatcccctgggacacttgcagcctcagcccctcgtttccttcctgtggcaggatccagtttgtgtgttctctgtgcaaataccggaccttctatgaggacgagatggccagccatcttgacagcaagttccacaaggaacactttaagtacgtaggcaccaagctccctaagcagacggctgactttctgcaggtgagccttggagtaacacagccgctcttagtttcttggacccctgagaacataaggcggcccacatgaacctttatattccttgcaggagtacgtcactaacaagaccaagaagacagaggagctccgaaaaaccgtggaggaccttgatggcctcatccaccaaatctacagagaccaggatctgacccagggtgaggagattttcagcccactcccaccaggcaaggcctcagcctgcactcctgattttcggtgcagggtcaggacacccttctgttcccccagggaaggtcaggagaccagccttggctcaggcccaggtggaagtggcagggcgagttgaggaggagctggtgtggtttttttctcgaacacctgggtctatcttaggcacctgggcccagtggtgactccctcctccccactacagaaattgccatggagcattttgtgaagaaggtggaggcagcccattgtgcagcctgcgacctcttcattcccatgcagtttgggatcatccagaagcatctgaagaccatggatcacaaccggaaccgcagggtgagtggccacagtgctctccctctgtcctgtgggtagattgagtgaggcctctggggaggttgtgcagttggaacctctgccagcccgtgagggactgc

SEQ ID NO: 91113 - DNA, 1040 bp, Homo sapiens
ccagggcagggtgggtgctggactgggagattggggagggcaggagcagttgcctggaggtgagggatcctgaggggctccacctgatgctcaccccatgcctctgcaggtatgactcttatgagtcctgcgactcgagggccgtcctgagtgagcgcgacctgtaccggtcaggctatgactacagcgagcttgaccctgagatggaaatggcctatgagggccaatacgatgcctaccgcgaccagttccgcatgcgtggcaacgacaccttcggtcccagggcacagggctgggcccgggatgcccggagcggccggccaatggcctcaggctatgggcgcatgtgggaagaccccatgggggcccggggccagtgcatgtctggtgcctctcggctgccctccctcttctcccagaacatcatccccgagtacggcatgttccagggcatgcgaggtgggggcgccttcccgggcggctcccgctttggtttcgggtttggcaatggcatgaagcagatgaggcggacctggaagacctggaccacagccgacttccgagtgagtggaggcagccttcccctctgggaagcttagttcccactggggcggagctaagggccgggtgccatgcaccctgacacggcttcccccccttatgacccagaccaagaagaagaagagaaagcagggcggcagtcctgatgagccagatagcaaagccacccgcacggactgctcggacaacagcgactcagacaatggtgagcccactaggtggtactgggcggctgccccctgcctctgggaactcctgggttgagcttacctccttttccctttcagatgagggcaccgagggggaagccacagagggccttgaaggcaccgaggctgtggagaagggctccagagtggtaagtggctctggctgggcattttctgtctgcaggcagggcgagctggcctaaagagtggtgctctccctgggggccagaggcaatgctgtgtcagctctgcgtgcatggtgaccagcat

SEQ ID NO: 91114 - DNA, 1362 bp, Homo sapiens
aaagtggtgttcacggagttgatgctgcttcctttcgttgtgcctcctcactctgttgtggcagatcctcagcaggtgaagcttgcagtgaccacattgtagcctcccaagcagagccctgatggatctgcttttgcctccatatcctattttctttttcttttctttctttttttttttgagacagagtctcgctcggtcgcctagcctgtagtgcagtggtgcaatcttggctcgctgcaacctccacctcccaggttcaagtgattctcctgcctcagcctcccaagcatctgagaccatagacgcgcaccaccacacctggctaatttttgtatttttagtagagatgaggtttcaccatattggccaggctggtctcgaactcctgacctcgtaatccacccaccttggcctcccaaagttctgggattacaggcatgagccaccacgcccaactcctattttctttagaatagctagtgcccactgtccctggtacaaacagtcacttggccaggtgtacagtagctgcctgggctacctgtgtgttgttctatttttttttttttgaaatggagtttcaccgtgtcgcccaggctggagtgcagtggcgcgatctcacctcactgcaaactctgccgcctgggttcaagcaactgtgcctcagcctcctgagtagctgggactacaggtgtgcaccaccacgcctggctaattttgtatttttggtagagaaggggtttcaccatgttggccaggctggtttcaaactcctgacctcaggtgatccgcccgcctcgacctcccgaagtgctgggattacaggcgtgagccactgcacccagccttgtgtgtttttctttatgtggctctgccagcctctcttgcctcttagaatggctccattctttcctcagctaccactcctgacttacccatgctgctctctggctgttagcatctctcttaccaacaggcagatctccatgcctgagcagtgcctgggactgcaagcctctgttccctgtgctcaggggatacataaacaaatggatgagaagcctgttttggtttctccagcccaagagtttttgttttgtgagctctcttgttaaacatagtggtcatcagcagttcctcagcttctctctgatttcttcccattctttttgtgcactgggtcgtggaggaacccaagtgcaggacgacagcctgcctgttctctctggctcatcttttcagttgacttacactcttcctgctgtggtctggcttctgccacttattgccctgctgtctgtctcactgagcttcggtcccctgccctgggatgagcatgtcctctgcggggcagagatg

SEQ ID NO: 91115 - DNA, 1034 bp, Homo sapiens
gaggccggtatgagccaatgcggtcgggaggcggggctcgggtgtgtgtggaggggaccctgtggttagcagcagctatcgcagcgtcggatgttcagagcagcagaagccggcgtcgtcggatgttgtgttgcccgccaccatgagctacacaggtgggcctggcagggtggggtcgggctctgcgtgggggatgggacagggacgtgcggatgccgcaccaggcttgcccgcacctcccctggggccccgtcactgccttccctgcggtcacaaaatggcgccgctggcccgtcgcctcagggtcgctgccctcacgcctcgttgcctcagctctctgtgtctgcagccggcgtcccggctcccggccgcctgatgtcttggcttctgtcgcctgtgtccgtgggtccgggcctcagcgcacgaggtctccgcccccaccacctccgtccctggcctgcgctcctggacctcgacgccttaggtttccctttctcaggccttggtccttgcgagcaggcagcaggctcggctgccgtcgccattgtcgcgtcctcccccgcgcagtttctctgcaaaaacgccgcagctctacacccccatcccgatcccacccaccacccccttttgtctatttcagaactgggaaaggcgccaggccctagggggataagtaaatattggaagggtttgggctgagcggggagccttgggcccctaggggctgaactgcaaggaatgacaaggttccatgttaattccctctgcgtctgtcaaatgaaccgtgtccggtacagactgggtattgggaatacagacaagaattcctcaagcagcttagaggcgaggatcttaataggcaaataagcgagtgtaggatatattttagggtggtcagtaccgtgcgggggtcgctccactacgtggagtggttggagccttctgtaaagaggtgacatttgagcagagacctaaatggagggagcgaataaagatatctggcccagggagcttttgctgtaaaaggcttacgg

SEQ ID NO: 91116 - DNA, 2482 bp, Homo sapiens
tgaacctgtgtaagtgtgaccctgcagtagggcagggagaacagttggaggggtctcctccctgcctccccttgggggtatccagagtgcctagggttgaattggaagggaggacacgcaggtagagaggacacagggttagctgtgtattcctgctatgcagacccctgcaactgagctgctgctcaattgtcctttattcatttgagaagcaggattgtgtcattcagtgacagcagaaagattccatctcttgtgccatttcaatcgattggtagtggctgccagccagactcctagggagaaagactgcggggatccattagtgatgtctgctacagcaggagcgtagggactggcagtgaacgtctgaactgtgtctttctgacatttttggtaattaagtgcttgacattgggagtcaagtgtgagttaagatctctgttcctccacagtctagctttatgtgaccttgggcaagtttcctcatttggaagatggagatcagcatagtcccaactctgtctggttttcttgaggattaagtgggataaagcacttagcacagcacctggttacagaaaactctgtatgccatcattgtaatgtcacttgctcgcttgcctgtcacaccagcactgtgttcattctgctcaggttgattggatgcccactgtgtgctgagcaggtgagggcagcccaggcttgtgccttagcgctcacgtgtgttgtgtaccagctctgtgccccatgctgagagctgttcccattttagaccgtcccaaagtaacactgggaggtaggggttttcatctccattttgcagcggaggaaacaggctcagagagggaaagtgacttgcccaggatcatacagggaggtatcttgaagccagctagaatttgaagtgacagaacaagcagaagagccagatgttaaaagggcctctggaagcccagatgagggagcaggttgttgcggtctggtgggtggtgtggacaggggtagctaggcagctggcactgatacgggggctttgagcttggaggcttcctgcccgcagccgccgcctccttctcctcctcctcctcctcctcctcctcctcctcctcctcctcctcctcctcctcctccctcctccctcctcctcctccctcctcctccctcctcctccctcctcctcctcctcctcctccttccccctaccctggatcccctgcagcgtcccgggcagagccggtgcgcgacatccgctgtgagttctgcggcgagttcttcgagaaccgcaagggcctgtcgagtcacgcgcgctcacacctgcggcagatgggtgtgaccgagtggtccgtcaatggttcgcccatcgacacactgcgagagatcctcaagaagaagtccaagccgtgcctcatcaagaaggagccaccggctggagacctggcccctgccctggctgaggacgggcctcccaccgtggcccctgggcccgtgcagtccccactgccgctgtcgcccctggctggccggccaggcaaaccaggtgcagggccggcccaggttcctcgtgagctcagcctgacgcccatcactggggccaagccctcagccactggctacctgggctcagtggcagccaagcggcccctgcaggaggaccgcctcctcccagcagaggtcaaggccaagacctacatccagactgaactgcccttcaaggcaaagacccttcatgagaagacctcccactcctgtaagcagcgggcggcagggtcctgggagggcgaccgccagggcctgccaggccaggcaatgccacaagcgtgcacactgaccccaagtggggcccccatggctgggtctgtgtgggaggcgggattggcacctggcctgggcagggccatctgggtgcacctgccccctttgggctgtgactcagcagcaccccctccgccccgcagccaccgaggcctgctgcgagctgtgtggcctttactttgaaaaccgcaaggccctggccagccacgcacgggcacacctgcggcagttcggcgtgaccgagtggtgcgtcaatggctcgcccatcgagacactgagcgagtggatcaaacaccggccccagaaggtgggcgcctaccgcagctacatccagggcggccgccccttcaccaagaagttccgcagtgccggccatggccgtgacagtgacaagcggccgtccctggggctggcacccgggggcctggccgtggtcggccgcagtgccggaggggagccagggcccgaggctggccgggcagccgacggtggtgagcggcctctggcagccagcccgccaggcaccgtgaaggctgaggagcaccagcggcagaacatcaacagtgagtgcttggtggaggagggtcgggagcgcagcgggcacctgtcaggcccacccagccactccccaggcgctctgctgtggcccttaagtcctttctccagt

SEQ ID NO: 91117 - DNA, 1990 bp, Homo sapiens
cagctcatttgctgaatctggcctttgctagctgtgcagtctctcgcatgacaccatttcttcgtctgttgatcctaaggttgttattgactagtgacgggccctggggtggactccagggaggtgagaggagcaaaatgaatttggcccttgctcttgagggccattcaagttggggaacggggagacagagaagcagataggcaaggataaaggctctgtggaagagggtgcaggagactgcaaggaccagtgtttcgggcaggagttgagccacagagggtggttagaacttagttcagtgaggcatgtggctgtcaggtcagcgtttgtgtgaacctgttgccagggcaccccgtaggcctgaaaggttgtgaaaggtgtcccactggctggatgacagaagggctctatctcctgctgtgtgcccttgggcacaacttttccctctctgagtctcagtttctaacccttattggcaaagcagccaagctattctctgcgttgttagggtcattgtgaggtttggggggcctgacggaggcaaaacacttccatggagcctgggtgagtgggactctcaggggaggagaagcgggagagctgggccgtgggcctcacagcctgctctcccggcctctgtgttgcccttcagcccagagcctgaccacctgcgaggtctgcggtgcctgctttgagacccgaaagggcctgtccagccacgcgcgctcccacctgcggcagctgggagtggcagagtcggaaagcagcggcgcacccatcgacctcctctacgagcttgtgaagcagaagggtctgcctgacgcccaccttgggctgcccccaggcctggctaagaagtccagctcactgaaggaggtggtcgccggggccccccggcccggcttgctcagcctggccaagcccttggatgcccctgctgtcaacaaagccatcaagtcgcctcccggcttctcggccaagggcctgggccacccgcccagctctccactcctcaaaaagacaccactggccctggcgggctcccctacccctaagaatcctgaggacaagagcccccagctgtccctgagcccccggccggcctccccaaaggcacagtggcctcagtctgaggatgaggggcccttgaacctcagtgagtgtgggtcccaagagccgagggaggttctggcgctgggagggtcgggacctcaggttgggctgtagcccagggacagggcccagggtgggtgggggcggtggggactacagctcccatgtcctgggccagccaggccagagtattggtcaagcctctgcatctccttttgggccgccttggatgtggatcgtgcctcccactttactttgctgatcttcccctgaaagcctcactgcggctgatgagcctgccagggtcatgctcgccactgaggggcagctcttggctttctctgggcctgtgggtaggggcggtgaaggtaaccagggttcctgtggcctagctttctcagtggtagttggaagcatcttggatagacaggggatcacctgatgggaggtgcccacgattggtcctgtcatcaagtcttcctggctgtccaccacgcagaggcagctctctgcgcctgccggtgaagccccacctcctgggctgcctgtgggcacggcaggcagggtttgggaagaaaccctccaggtgcagtgagcaggtttaacaaggacgtcccttacaacatcaggctttcccatatctttgtggacattagagtctgggggtgaccccagggtctcaccccctgcccaatggagccccccatttggcaccttatgttcccttgaagttgcttccactgagtctgccgtgcttccaggggcagggccttgagcaggtgtgcccttggctgcgtgagcccagcagccaccatcgcccccaaatagctcccatagcagggatcctaggggagagggtctgggagtatctgat

SEQ ID NO: 91118 - DNA, 1098 bp, Homo sapiens
cccaggatgccagcagctgagcatcagagatttcccgctgtcaaagccactcctgcatggcacgggccagaggcctctcggaaggctggcctttccctccacactagcatccaccccctactccttacagctcgggagaaacaaaagcaccgtccacccacaagggctgggggaacggaggcgcccttggagcgaagaggaggaggaggaggaggaggaggaggatgtagtgctgacctccgagatggatttttcccctgaaaatggggtcttttcacccctagccacccccagcctcatcccgcaggcggccctggagctgaagcaggcattccgagaggccctgcaggcagtagaggccacccaggggcagcagcagcagctccgagggatggtacccattgtgctcgtggcgaagctggggccgcaggtcatggcggcagccagggtgcccccaaggttgcagcccgaggagctggggctggcaggcgcccaccccctggacttcctgctcctggacgcgccgctgggcggcccgctggggctggacacactcctggatggggatccggccatggcactgaagcacgaggagcggaaatgcccctactgccccgatcgcttccacaacggcatcggcttggccaaccacgtccggggccacctgaaccgcgtgggcgtcagctacaatgtgcgccatttcatctccgctgaggaggtgaaggccattgagcgcaggttctccttccagaagaagaagaaaaaaggtagggcagcttcacttttaaaggcccaggagacacatggctgggcaacccaccgttgatctaaattctctcccttagcgccaagcagggggacactggggcctctgctcctgagagacttgagagccacagtgaaggccacctggtcggtggatgtgtggagacgccccagtcccctggccattccagccactggaggaaggagtgtgggtagaagagtcagcctcaggcagagaatttcattcattcctccattcaacaaatatttactgagcaaggttcccctctgttctggggacctggggacacagcagtggacagaatagcagtt

SEQ ID NO: 91119 - DNA, 1084 bp, Homo sapiens
ctctcaggagcagagatcagatggcacccaggcgtcctttctgaagacccagcaccctctccccaatgcgccaggaggcccccaaatcagactctgcaatagcatcctgggtattgagcaccaacggtgtgtcaggccctgagttctgggctcccacgctcccattggctctatgatgcctttgtccccgtttttacagatgaaggaactgagactcagagggggcgctgtgtatccaggacacacagctagtaagaggctgtactgggattcagacactcaaccccaaggtcacattaattgagcgatccgtggggtctcactttaaccctcacccagcgtggggtttcactttaaccctcagccagcccaggatgcttgcttcattttcaaaggaggcatgtgacccccggggaccagtgctcacacagaagctgggcctgagccctgtcccctcttcctccaggaattgcatcggacagagcttcgccatggccgagttgcgcgtggttgtggcactaacactgctacgtttccgcctgagcgtggaccgaacgcgcaaggtgcggcggaagccggagctcatactgcgcacggagaacgggctctggctcaaggtggagccgctgcctccgcgggcctgagcgtgggcgcgcccctgcggctcccgagggtccaggccccgcccccaaaggaccaggactcgccccaaagatcccgagggcataggccacccccctcgaagttcaggttcagctcctggatgaccaggcaccgctgttgagcagcctggtggtactggccacgcccctcaaggcaaggctcctccccttagggggcctgatcccgccccttgaggcttaggtcccgccccctgacttctcgcacctgtcctgtttgagggaccagggtcgaccctgcccccttgggctcaggccccgcccccaggatcctacggattgaggtcctcaggccacgcccctgcagatccaggtctccaggccttgcccactgagccttcagaggacctaagacccacctatgactcagggcccaccacaccccacccccccccaactggctg

SEQ ID NO: 91120 - DNA, 1393 bp, Homo sapiens
cctcatgatttacgtggccttggaagggcaggggcagctgtaaacttggggtcccagagtcaccttggccccaggttcaagcaggagatactgaaggctgaagatccagtttccactctgaactgtgacactgacttggttcctctctgcacccagctgatactgcctgcaggttttggccagctgcccaggcagggaggaggcagccaggcctatggcctacggggattggctgcccctgactgcccagcccagcccagccttgcctaggtgaggggccagggacaaagaagccccaggaggagggaagaggaagttgtgtgggacaagctgctcctgacagaaggtgccaggctggaactgtcggggctggagggtcctggtctgggagagggaggggcactgcccaaggctggggtggctccagggagctggtcctggtggggctgatgggttcctggtaactgaaaccaagccactgacaacctgcagtgattcaggctgggcctttcaggactctaatcagccttcctctctctctttctctcttccctctctcttctttactctcttctctctccgcctcttctcctggctgtacctgggtttccctctctgctttcagcccttgttttctcatctctgagctctccctgcctccagcacctcccatccctgcccctgtccaatgtccccgaagctccccgggctctttttctgggcctcaggacctcaccctccatcccgtgtgccctgcaggatgtcgctgctgagcctgtcctggctgggcctcgggccggtggcagcatccccatggctgctcctgctgctggtcggggcctcctggctcctggcccgtgtcctggcctggacgtacgccttctatgacaactgccaccgcctccagtgtttccagcagcctccaaaacggaactgcttttgaggtcacctgagcctggtgagtatggcagcacgacgggtctggggtctcagggtgggtggacttctagaggggtgggaatggggctcagggagctggatattgagggtgggttggggtctgggacatcagaggagtgagggaggccgaggggagcccctatttcctcactgccccaaccggattcattcctcctctctgtccactccatggccccaggcctttttctttctctctcttccccaccctaagcctgctttggctcaagttcctacttgtcttccccacattaatgcatcgttgtatccttgttctactgggggcttctagggtggactgcacagagcaggtactccctggctgcccatgttttttttttttttttgagacagggtctcgctctatcacccaggctggagtgcagtggtgcaatcatagctcaccgcagccttg

SEQ ID NO: 91121 - DNA, 1017 bp, Homo sapiens
tgatctcagctcactgcaacctccgcttcctgggttcaagcgattctcctgcctcagcctcctgagtagctggaattacaggcacctgccatcacatccagccattttttgtattttttggtagagacggatttcaccatgttggcccagatggtctcaatctcctgaactcatgatctgcccatctcaccttccaaagtgttgggattacacgtgtgagccactgtgcctgacccaaagcagatcatcttaactattactgaagatttgacaggggggacctaaagagggcagtgggctgaccaagggtacatagggcacagaagcagagctggaacttgaacccaggtcacccgaaccccagccttgggccttcatgtcctaatagtaacagcttctgtccctcacaagcttggtcctccttggggatgggtacccgggaaagacgactaggagttggttctgggggagtccatcctggaggttggggacgggaagggactcaggggagccagggctcagttcctgctctgtccccttctctggccaggccaaatggcaacgcctggccttggagggcagtgtccgtctggaaatgtttgagcacatcagcctcatgaccttggacagtctgcagaaatgcatcttcagctttgacagcaattgtcaggagtgagttcttccccaggacctgggatcttggccatggacccacaggagtaggttatggagagaggactgatcagggcatctgaagtgtcttcttggagaaaatgagtcagaattgagcatggaagtacagggaaggggagagagaaagatcagttctccaggtaggtagaagtgtttgggtaatggcaaggaggctaggatgagcagagcacgtgcaatggccatcaaggggacaccttggaaatgagattggaggggtcagcagtagctacaacttaatgacattgaaaagccatgcaaaggggtatgaacttcatccaaggctcccagggaatcatgggaggt

SEQ ID NO: 91122 - DNA, 1062 bp, Homo sapiens
agaaagccagccaatccacactcccctgaaatggatgctaacgcccttcaaaccctgggcattggtttcatacacagcctcttccagggataaaaggggttcttgtacagcttcttgttaccctcaaccatggaggcaagttctgagttctggttttcctaggacactaactctagtcacaaagatctctggagtgatcacacatggtggagtggcagggtgaatatttcaaaaggataagtagaacaggagtcttgcccaagccctgtcatgtcagtgtctgtgtgtggcctcccagcccaaccagaaattgacagagaggcatgtatatggtgaaaagatatatatatatatattcagaattaggcagctgcactcagtttagataatcccaattttgttggcaacatccaaagcatcgtaatcaggagtcagtcgaacatataccttcttctctccatcaggccgaatcagggtgttgaccttggccacatcaatgtcatagagcttcttcacagcctgtttgatctggtgcttgttggctttaacatccacaatgaacacaagtgtgttgttgtcttctatcttcttcatggcagactcagtggtcagcggaaacttgatgatagcatagtggtcaagcttgtttctcctgggagcgctcttccgaggatatttgggctgtctccggagtcgcagtgtcttcggccgccggaaggtgggtgacgtgtggatcttctttttgtggctgtggacacctttcaacactgccttcttggcctttaaagccttcgctttggcttcggctttaggaggggcaggagcttccttcttcactttcggcaccatcttgtgaaaagggtccaaaacaaatttttttaaataaataaggatttggtacagtggggacacagttgatccacaacataggtgagtagttctgtttcgttttgttttgttttgctttgctttgttttttgagacagagtctcactttgtcacccaggctggagggcaatggtgccaatctcggctcactgaaacctccgccccaccaggttc

SEQ ID NO: 91123 - DNA, 1081 bp, Homo sapiens
caggacttccttgagcatttcttataaggcagaaaatattctcaggatgtcagttcttcccaagtaattatgtagattcaatgcagtcccagtaaaaatttaagaaggcttttttaatggatatcaacaaactaactctaaaatgcacatggagagacaaaagacctagaatagtcaacacactgttgaagaagtggaatattgtttgaggaatgacaatatcccacttcaagacttactgtaaagttacagtaatcaagatgttgtggtattagtaaaagacaaataggtcaatggaccagaatacaaatcccagaaaatagacccacgttaagtataggcaactgatctttcacaagagttccaaggaagtacaatggccctaaacaagaaaatataatgtatttggagataagaatcaaggacaaggtgactgagtgtaacaagggaggaatatgagctggagagaagatttgacaagtctgcagggtgcagcggtgcagaattccttaggctatgaacagaggtcaatgtttgtggcaggacatcattttaaaacattaactgaggcttctttccttctcctaccaccttgcactttcaggtgcccgcaaccagtcttagaaaaaattgcctcctaaatgcacagccctctaaaaggcaagagattattcaaggagcacaaatattacaatttttgcctgtaagttccaagacagtctttaaagtcgtggtagaaaaaaactatcttgaaaggcaacatggtttattagccagactttctcagagaggaggtaataatggccacatttattaagcatccaatatgcaccaggcaacaagttctgagttctccacattttgtcctcaggacaaccctgagttaggtagtgttgttgcccacattatatgtttgaggaaactgaagtgcatagaggggaattaacttactcaagtcacacagcaaagatgagacttcagcccaacagtctggctccagatcccatacctttgggatggtgttctgtttccagtcatctgtctttgaatctcaagggtcaaacaggatgttcctgactgc

SEQ ID NO: 91124 - DNA, 1020 bp, Homo sapiens
ccttgcctgtcccaaagcctagaacaatgaggaggacttgtggctggtgggggatctgggctgctacttccatgatgtccacctctggtgggtcaattccctttaccccatcctatagcttgtctgccctaagttcgttgctctcctgctgcaggtcccggggatctccaagaggagactccaccccagcttgggtccctttccttgacccctgtgcttcccatcgttggacgggcgaggctgagcagggggaatgggcagcatcctacagagaccatggctctgacctcaaaatgctgagtgactctgggctggtacccagctgtctctggttattgaagtctctttcagttgtgagtggtggaaacccaacctggtgtggtctaagcaaagaaagataatctattgactttaaagtccagggagggtggccttcaggcatggctggatccaggtctcacacaaggtcactggaaatctgtctttctctcttggctttagctttctccatgtcgcttttcctatcaaggtggccttttcctcatgatgtcaacgatgagtcccagaagctcagttcttatgggaaaggccacctttcccctagagttcccagaaatggcccatggtttacttctcctggcctggatcacaggaccaatttttcacccaatccctgtgtctctgattgcccagtcttggtaggcctgggtcttccagagctactgttttgggggcacaaagaagtttgttggttaaggattcaggccatgggtgcagacagacctagtcttaggcctcaggcttgccgtggtctgggactgtgggcaagtgactttattgttcagagcctcaggctcttcatctggaaaatgggatgaatgagagcccagggaacatggtgtgtggatccacatggggaaagaccttttctgtctgtgtaactgaaggactggagagtcctgcatggaggatgtgaggaggcagggggtgctcagcactgacaggaggatgagatgctgc

SEQ ID NO: 91125 - DNA, 1019 bp, Homo sapiens
gcagggttggtcagtgtgtcctggatattggggattggtcaatgggggaccaggtcggtggagacctggtcatcggggcccatttagtgagggccaggtcatggaaggcccgggtgatggggccctggttgcctggtcagttggacctggtcatcccaggactgatcctcagggaacactctgacttcaccaggctcccctgaccatgccagtccctggcctgcagccaatggtgtcctttgtgtctctcccagcacagacccaggcccaggggatgcccaatgctgggaggaggctcagacagcaggaaggagagaaggaaggaaggaacttccgtagtaccgatgcctacaaaattacaacacgtggtgctgtttctactccatcaccatgttcgctctttatttcctatgtaattctctattcaaccggcctcagttgagcacaaaaccatccttgtaccaccatgaatagttggccatggctctttgatagcaatttttgttctgccgtagaaattatccttgaaccagaaaaaaaaatccccaattcaacactccatttttgtgaagagctggttccgaattctgggtcactttttggaaaaaatatctgttgtggtaaacagtgctgcatctgtgatctcaagtctctactggaattggatagagatggtgaatttcagccagagcgcccaaagaactcgtgtcccgcgctcctgaacgccatcagccgccgcacctccatcttccctcctcccacgagtctcctgctccccgtgactctggtaagagctcctctgtgaacgtggaggtggtctgggaagttggcccagtgctcctgggaccgcactaacaggtccgagacggggtccaggtcctgcctgggccaatccgggaagagcttgccaatggcatcacaggcacctcggggaaggggatggtttggttcaggaccacccagaggcctgctgggcccactccaaggcctggctgaggccacagaagggctggccgcct

SEQ ID NO: 91126 - DNA, 1050 bp, Homo sapiens
gacgcgcaggagaagctggagctcacggagaagaaggcctccgacgtacgtgtgcagggatgcgggagcccgcggcggggccaggccggagccccggggccgggaaggcggggagagccgcagggggaggaggaagaggaggaggagaaggcggcgcctcccagcgctttctccaaataagtcccgaaaaggggcactttccagcagctgtggccagcggtgccgacgtcaggccctcccccagcggtgctgacgtcggcggtccggccgggtgacctcatcgccccgacggcagccggcccggggggcggggagaggcgggggcggcccccgcgcaggcaaaggcttggggggccggggcgcggctgtgcagctctcgccggagccgagcccagccgagcgtccgccgctgcccgtgcgcctctgcgcctccgcgccatggccggcctcaactccctggaggcggtgaaacgcaagatccaggccctgcagcagcaggcggacgaggcggaagaccgcgcgcagggcctgcagcgggagctggacggcgagcgcgagcggcgcgagaaagtgagcgccccggcctcgggccccgcacccgcagcctcctcccccgcgcgccctcctttcttcccggcttcccgcgctgcccgcccgcgcgcagtcctcgggccgcctttttacgccctcggacgccgatcgccgacccacatccctgcgcccgcagccaggaccccctacttcctccgccgtcctccttcctgggcctgggacaggggagggggcgccgcctccgggtcgggcggggccggccaagcgggaaatggggggatggggcggagggggtgagcgatctccgggtggagaagtggagcggcgggagggggcgtatcgtgcaggctccgactccggggctggcgccggggtcccgggccgaggggaacccgcgaccggacttgtgggggagaatgaggatgaaaacgtggagcttccattgtctagggtttgaccggccgacagggatttcgacgggggaccggggatctgggg

SEQ ID NO: 91127 - DNA, 1034 bp, Homo sapiens
taagcctcaatcggtagccggtctggcctctttctcacacttaaccgacacagctcttgctctgatctcatcccaagtcatctcgctggaggacaattaactcggcttcaaaatggccctcagcctggagccaagatttaggagcaagaccgtctagttgggagagaagatgtttttggagagttgaagacttcttgaaaaagttcgaaaagttcttgaaaaagcaaaggatgcttctttccgtctgggagagggaaaacctctcccagggcaaaaggaactaagaccaggggtgggttaaaaaaaaaaaaaaaaaaacctttcactcttgtagaataagccaggagccggcgtgtggtagacttctgggcctgtttcccgacagctggtttcgtttagatttttgtgtgattaactgacatcttcctgttcctttgccacatgtatctagcaagcctcttttaccttataagggaaatcctttgtagcgtgtggaaggctttgattgcaggaaggggtggaacccaaaatgactcggccgtgactagcagtttttcaaaaatacatatatatgtatgcatgtacagatatgcgtgtatctcccaactccagacagctgaaaatctgccaaaagcgttgtttgccaggattcagaatttcccacataagggctactcacttcttaaaagacaactcatgaatcaagcacctctgtttgatctttaaaatcaattcctcgactgctaatgggtacacagttttttgtttgtttgtttgtctttggcgggttatgaaaatgtcctggaattcgataatggtgttggttgcagagtgtttttgcaacatcagttcctggcccagttactgaaggtggtaggaggagttaagatctaggcaattaaaaagaatgaaaggcacccattcatgggaaggcctcagtgacgtttcttaagacagtttcatcagtggttttcacaattctctgcatttggtgtttcagaggacactgcaatacgaaacacctgtgggagtgc

SEQ ID NO: 91128 - DNA, 1089 bp, Homo sapiens
acagcggtatctgagagcacatgcccagtttgcttttgttttcacgtcttcagaaaagcatcctgtaggcataattttctttttgtaataagcttttcatttgtgagtgagagaggctaaccacccactttgtgtttcaggctatggttaagggcacacagctacagctcaaaggcagcaagtggagaaaatgagaatgagggggcatgaagaggaggactgcccgtctttatttcggttgtagagtcacagacacatcagaagaaggctctgacgttcaaaccagaaggcaggccaccggagctcctagaagcccacaggggcgtaggaggcaccatgtgagaaggacagagggcagcgacctggctgcctctcagagagaggtcatgtcgttgagagcgtggtccagttcctcgctgatagctttgtacttgagcttctgagcgtataactcatctagagggcggaggtccccagggagacagttcagaagtacaggggacagaaggcaagggtcggaatggagtgccacagatgaaccacaagaggaagaaaaaaacacgtgagcaaacaaagcacagactaggagaaagctgtgttccatgtgaaacagatgaagaaaaccaaagatctatggagttgatctctaagtggtttgaggttctgcagggggattagccacaatgaagcttcaaaacagtggtaaccagaagtgacagagcttccccccactggtccccacccctcagtttatttcggatttccaatgacgtcaccctgtccaaaggtcgtattttggaatggggcattttcccttatatgggaacctcacttccccaaaaaaacattggaagatatggtctgaagaatgtgtcctttctgggtgggatgggcagtttggaagattccatttgaaccccaagattctggaatttctgaggccgaatgttaaacactggaactcttgaaaaaattctgggagaagtgggccccagacttgcagactagtctttattgcagtccctacactttctgtatttctgtttttttttttaaatactatgataagctttgagctccctgggacag

SEQ ID NO: 91129 - DNA, 1020 bp, Homo sapiens
tcacagttgtaagataaaatgcagggcgcccagttaaattgaatttcagataaaccacaaataatattttagtgtaagtatatcccaaatgttgcatgagatgtacttatgcaagagatatacttatgattaaaaaattattcattgcttatctgaaactcagatttaagttggtgtcctgtatttttccttgtgaactctggtaacccttgagtcagaatacctgaacttaagctccagttgtatcacttaagtaagcatctaaccttcctaggtctgttttccccgtctgtcaaatgggggtaacgatatcaatgcgtggtgtgggggttatgatgaggaataaaggagaaatacttcagaacctatgacgtgctgctacatgaagatttcagtcctagatatgtgtgacttaatataaatttccacccaagtgctagttaattagcccctgagcctttgatagttaaatctaaaatcctgtaacccatctttccttcggagcttctgggaatggctgtttaaattatacacataattgtgtaactgtctatgaatccaggagaacggagacaaaccccaggtaaatgcgaaatttaagccattctacaggcatgttattaagtaactgagctgatgaaacaatttaaattaaaaaagaaagagagagagaaaaaagacgccatttagagctatgcgtgacagagcacgagagagaacttagtttgcagtaagtgatggctgataagggacaaggccaagactcattaaaatgctgggggaaagcaaaatgcctcataaaatgtgatatcatcagcctggaaatttacagaaagaaaaaaatgactgcagaagatggcagcctttcttatttatttatttttaaacagggtcttgctctgttgcccaggctggagtgcagtggcatgatcatagctcactgcagccttgacctcctgggctcaagtgatccttctacctcagcctcccaagtagctgggactacaagtgcgtgccact

SEQ ID NO: 91130 - DNA, 1032 bp, Homo sapiens
agagcaagaccctgtttaaaaataaataaataagaaaggctgccatcttctgcagtcatttttttctttctgtaaatttccaggctgatgatatcacattttatgaggcattttgctttcccccagcattttaatgagtcttggccttgtcccttatcagccatcacttactgcaaactaagttctctctcgtgctctgtcacgcatagctctaaatggcgtcttttttctctctctctttcttttttaatttaaattgtttcatcagctcagttacttaataacatgcctgtagaatggcttaaatttcgcatttacctggggtttgtctccgttctcctggattcatagacagttacacaattatgtgtataatttaaacagccattcccagaagctccgaaggaaagatgggttacaggattttagatttaactatcaaaggctcaggggctaattaactagcacttgggtggaaatttatattaagtcacacatatctaggactgaaatcttcatgtagcagcacgtcataggttctgaagtatttctcctttattcctcatcataacccccacaccacgcattgatatcgttacccccatttgacagacggggaaaacagacctaggaaggttagatgcttacttaagtgatacaactggagcttaagttcaggtattctgactcaagggttaccagagttcacaaggaaaaatacaggacaccaacttaaatctgagtttcagataagcaatgaataattttttaatcataagtatatctcttgcataagtacatctcatgcaacatttgggatatacttacactaaaatattatttgtggtttatctgaaattcaatttaactgggcgccctgcattttatcttacaactgtgactcccaaatttggtgcttgttccttagtattctgtgatgttctgctgtaattaaaaatacaaagtactggacaggcatggtggctataacccacctgtattcccagcactttgggaggctgagcagatggg

SEQ ID NO: 91131 - DNA, 1471 bp, Homo sapiens
gtctgtaatcccagctactcgggaggctgaggcaggagaattgcttgagcctggcaggtgaaggttgcagtgagccaagatcgcgccactgcactccagcctgggtgacagaatgagaccctgtctcaagaagaagaaaaaaaaacaaatctttttttttctttcatttaacaaagacgcttattaatttatctttccccatactcttaatcctcaccagagaaacttgcccaggccaaagaagagaacgtgggcttacatcagacactggatcagacactaaacgaacttaactgtatataagcaaaacagaagagtcttgttccaacagaaactctggagctccgtgggtctttctcttctcttgtaagaagttccttttgttattgccatcttcgctttgctggaaatgtcaagcaaattatgaatacatgaccaaatattttgtatcggagaagctttgagcaccagttaaatctcattccttccctttttttttcaaatggcaccagctttttcagctctcttattttttccttaagtagcatttattcctaaggtaggcagggtatttcctagtaagcatactttcttaagacggaggccatttggttcctgggagaataggcagccccacactttgaagaatacagaccccagtatctagtcgtggatataattaaaacgctgaagaccataaccttttgggtcaactgttggtcaaactataggagagaccagggaccatcacatgggtagggattttccatccagagccaataaaaggactggtgggggccgggggtggctattgtgggaagtcataacccacagatagatcaacctaagaatcctggcccttctccactctccaccatgcaggacaaacatcttctcaagcagtcaacgtagaatgcttgggaaatagtcataattacccacatatagtaattaatagatggtaattaattgatccttgatgtgatgttcttttgcatatttccttcattctaaagttgttccctggccgggagcgttggctttcgcctgtaatcccaacactttgggaggccaggacagatcacttgaggtcaggagttcgagaccagcccagccaacatggcgaaaccatgtctctactaaaaatacaaaaattatggtgacgcctgcctgtagtcccagctactcgggaggctgaggcaggaggatcgcttgaacccaggaagtggagactgcagtgagccgatatcgcaccacagcgctccagcctggtcgacagagtgagactccatctcaagaaaaaataaaaataaagttgttctctgaagagcaaatgtctcattccagtaatgacccactcagcaggaatatggtggagttcagtccaattcaggtcagccatatccaaaagaccacaagtcattactaagttgagcaaaagagtttttatctattagcagaaagggcctct

SEQ ID NO: 91132 - DNA, 1089 bp, Homo sapiens
atcttcctaactcaggcaacagagatgattttccctgcttttatctcttaaaatcctactcattcttcacagcctggcttaggcagcgtaggggataaggaaggccaggagttttcgagtgaccgaggctgagtgctctcgcctgcaatgagactgtaatatccttgtatcatgaagtcacagtataaagcaaatagataaccttgtctacattcttggctctggttattttccctttccatccctttaacatttgttgaaccaaaatgctctgtgtacccccacacattctaaaattcacgcaaattgtagtttatgtaaaaatttatttgaccaaaatgtagaaaaagtgatactattacatatgatacagttgcaagaatctaaagtgtggattttattccattgcacaatttgctagtgtatttcctgggtagtgtggtgctgaataaataggagtagggtggtggggtggggtgggtaagggattcagataagccagaagcagggtgatttttagttggaattgtaaactttagtcagcccccacacgctgctggggaatgtggaatgttctagctctgagatgttaactgagaaaagagaagtcaaacaaagccgatacgtgcagccctgtctacagaatccttcattatccagtttaatcaggagtttcttggtcttttattaacttggtcccaaagaaggaattcaagtcctagataagtaaatcctcaatttgctgttccctgaagtatggaaatgaagttgggccagtttttaatctctgctgccagagaggccctttctgctaatagataaaaactcttttgctcaacttagtaatgacttgtggtcttttggatatggctgacctgaattggactgaactccaccatattcctgctgagtgggtcattactggaatgagacatttgctcttcagagaacaactttatttttattttttcttgagatggagtctcactctgtcgaccaggctggagcgctgtggtgcgatatcggctcactgcagtctccacttcctgggttcaagcgatcctcctgcctcagcctcccgagtagctg

SEQ ID NO: 91133 - DNA, 1042 bp, Homo sapiens
agctgacgggccagtgggacacagaccacccgcagaaaatgaatagcatgtacaaaagctgggggcaggagagaacgtgaccatgtgcattgacgcatggtggggcctaaggccctgtgtgcctgggggttggtcagctgcagggtgttggggagcaagggactcaggcctgcagagggctctgttgagacccactccgtacaactgcctggggtggggaggcgggttcagctggcagcaagggacaagagcagggctttgccacccgcgccccctgggtttgctctgcactgctcccatcagctcttggagagggaaaatatctccaagtgtttccagatctggatattccgacatcctgcatgcccagcaccaggcagggtctccgtaagccacaacagctgtcacctgcacaggttggtggcgcccagctcagacacaacttgggaaatgggctgacagtgacgtgccttttttcttttttctttcaggaattgactttaaaattaggaccatagagctcgatggcaagagaattaaactgcagatatggtaagagtcattgttctctgtcattctctccacctggcaatggcttcaagccagaagcccttggccttctccctccaccgtccctgtgaccttggcctccatttcttggtgcccagtcctggcacatggggctttctccagaagctcctggaggtttatacccagcccagagagctgtcctctgctggctgcagggcaccagggcctacagcatcataggcacaaagctgcccagccctggctagctcagtgttccacagtgggcaccatctgggtctggccttcagagtgggctgcttctgttgaacgggaagagagccctctcagtgccaggtgctggtgacgcctgcagggactgtgagatgccccagccgagagtttccttttgagcctctcaacccactcagaagcataaaggtccaacttcacttcctcttttctcccctggggcaggcctggcctcccttcctagcgtacagaccgaaacccc

SEQ ID NO: 91134 - DNA, 1072 bp, Homo sapiens
gccgagatcatgccactacactccagcctgggagacagaacgagactccatctcaaaaaaaaacaaaaaaaaaagtgtcaaagcagaaggtcccaggacaacagctggggcctcttgcagaggagccagggagggaaggaggaaagccaaggtcggggggtaaatatctcagcctcactcacctcccataggctagacccgcccagcatcccaggtgcgggggcttgattgatacagccatagaagctgccagaaagcatttcagaaaatgtgcatttgctcagagtagcagctagaaccctggccccagccctggcattggctgtgtgacatggggccggctgcttggcctctctgagcttcagcttgtcccttagaccaggctgtacctagcagtcctgaccccaccgctctgatttctggggacagactgtgtgttggcagaggcacctggcctgtgtcatccggtctgatcccccgtctgtccccctccctctcagcacgcctctgcagacgtcgaaaagatgatactcgggaacaagtgtgatgtgaatgacaagagacaagtttccaaggaacggggagaaaaggtgggcatggtggcacaaggggcagagggcctcggggtcttggggttcttgtgcagaggccttcccctgtccctcctctgccccaggggcctgagacgagttggtcaccccagtggggcacgtgccatgggatgacagaagcacacacccagccggggcttcttgggtgcactctgcgggcatctcatcaaaacctaccatggccccgctccagactttcaagaccacaggagcggggaacagagccatagtttgatcccagcaggtccccgccaccctcccatctcagctgccatccccagcaactccatgccctgtgaggccctgtggaggggcattcactatagaattgagggagtgatccaggaagtcacgcccacagccccagccctgttgctgctccctcttggcgccggccctgccttcagctcctgttttaggcaagctcagatgcgcccggcggctggtgtgctcatgcgtgt

SEQ ID NO: 91135 - DNA, 1679 bp, Homo sapiens
gcattgctggttcatttcctgccactcacgaagctggcaagtgacctgggttccctgttggaccagcctgggtggagttgagggagggggacaaggcacagagcctgaaacctccagctgttctaaatgtgagagccagtctggccaggctccatcttccaccccatgccagcctgggctgtgttgagcctgtaaactcacctccatgtctcttctctctccagcaaatggaaaggatcctaaagaaggcatccaaaacccacaagcagagagtggaggtgagtcgccgtgtccagtgggggagactgagccattcagggtcccagctgggcccagaggctatcagctggcagagggagctgttggcatgttgacgagaagggaagtttacctaatagaagtgacacttccccagggttattcaaaggggagcccagggttcaggagtctgtaagacctggcagggtgagtttgagaggagggggctcaggagagataggatgtgggagaggtggggctgggcagtgccacttctccccagtaccccacttgggtctgcgctgacaccggccttctactccacctccccaggacttcaacagacacctggacacactcacggagcattacgacattcccaaagtcagctggacgaagtagccgcctgcccccagtatggagcagcatcgagggttcgcaaaaggccacactggggttgtgtgtgtttcctttggtatattctggaaacatggctacacacacccttgcatcttctgctacagactgcttttcgaagctgtgtaccctcattctggaacttgattaaagtaagatcgtccttgtactcagtttaggcttcttggcaacatacagaagatacacccttttcgtttggatggaaagtttctaagtttatccagaggtaaagcccattgtgtgtctgtgtcatgtaaaaatgttttcacccgagttgcatgtaacgctctgaggccagccagctgtcttctcctggatgagacagactccagagggtaaggagctagcgccatggtggcctgcagtatgcagagccccgcaggacccagcgtgggcgcccttccaagcttcctctagctttgggcctatgctgtcccctgcaggccctagggaagccacttgcaactatgcggccttcagacttcctcctcagccacctggccactgagacagcatagcctgggtaacggaacagccacctaaggcaagaatggaacggacacaccttgctcctttctgagcccgtttcccaaaaccccccttccaggtgcttctaatgggtgttgccatagcagacgctgctaatgcatcacagcattctttgaaatggaaccagacacagcctgcctctcaatcctcagctgggggctcctagcagcctcttgtatttactcagagttgacacatcacacagatcctgtttggcattcctaccttacggacgtctcaggggtgacaggaccagggcagagccccggtacaaacagacaaggctgcagtcaaatgggagggtccaggtgtccgtgttggagggctgggatcttgtagggcctgtgcgtcctggctgaggatcaaaccacatatgttattgggagaaacgatttctgttgacgtagatattgaaagaataatgaaggcagaag

SEQ ID NO: 91136 - DNA, 1050 bp, Homo sapiens
tttatttcatgggccaaggcttgtgtttccaaagccaggaagggctgaagccagaattggccctggctgcttgccacagagtctggccgggggaccctggacctcagcagggtcatgatgaggtcagctttggaggagcagggccagtgtgtcctgctttctgctcctggaatgagcctcactccctccctgctcaaggcagcccttcacccagccgccgggacaggtgccctgtgccacctgccatccctgtgattctccatctcagtgagtgctccctggggcctgggagcgcatctggctggtgactcctgtgtcccaggtctagcttggaccaggagctttgtagcccaccatgggccaagtaaacggctgggagtggggatagggaaggctctgagggttgtgagggttagggggtccctccatgaaccaggatcttccaggcagcagccccagcctctgaatgctccttaactgtggccgccatgcagtggttgccacatccaagaagaacgcgtgcgtgtcgctggtcttttctttcctctataaggtggtgcaggtgagtctcgctcggaggggccgtgggcttgggtggaggttgtcttggctctgcttgtggacctccccatacctggccaccctacagagagctgtggcatccccagggagcactggggctggaagcccaggaagtgggaaaggggagtcccaactccccacgcctgtggaattctatagctcacgttgctcccctaccgtggggaagaaaggaaagtgaacaggaaaaggtagggctcagagcaggggtgccctgaccctggaagggacaagcaggggtcagcgagctttggaaggatgtggggtgaccagctggatggggctggaataaccagcagagctgcagagctgagcccacctcagaatctcccagggggctctcaaggcacagatgcctgacgcccaccttggagagagctgacacgccaggcccaggctgccagtgagacacagatagcagccagggtgaaggcgccaggacaggtgtat

SEQ ID NO: 91137 - DNA, 1050 bp, Homo sapiens
cgtcccttccttaaccttctgagctttccattgaaatggggaagatgcatcaagctttccactgaaatggggaagatggcagctcatcaggtccttgcctgagtcactccagactcagaaagggatgacagttacagtcgctcaggaggggctgcctgtctgcgggtgtctgggcagggaagagaatgggaacgcagagcttctgaaggcctcgggacatctgcagtggctccagcctggccccaccccacagccagccactgctgtcctgccccataacctgggtccagggccctgtagcacaccaccgagcctgggaagtaggctgttggtaggacttagcgggcaaatgaatgtgtgcaagcgttcattcattcctcatccgtccgctcaatgatctgcctcccattcctccctccctccccaaccgccacaggtgttttccgagtacttcaaggagctggaggaggagagcatccgggacaactttgttatcatctacgagctgctggacgagctcatggacttcggctacccccagaccaccgacagcaagatcctgcaggagtgagtgggcaggggtggggcctggggccaggcctgggcggtgtcatgacatcgacgtcatcaggtgtggaaacagaaggggcaaatttgtgttcatgttgtcccccacctgcctcccacctccagcagtattcgggtttttactaagttgctcttagtggttttaattcgtttcctcctctacgcccccacataaccgtgcttttcctgctcctcatctttactctccatccacacagatgccttcagtaccttgctactaaggagtcacctcccttgtttttactgtcataaaatgagactgtgatcgaaatctcccctctttggaatcctgcccttcagataagaagcaatgtgaattaagtgcttcctgggggccgggccccagcacttcacattcactcgattcacagcctccccgtataccgtctccccattttacaggggacaagcaagcagactcccagagaagcctgtgttcct

SEQ ID NO: 91138 - DNA, 1656 bp, Homo sapiens
gtggtcccacaacagatgaggggcccagcctcacccatccatgaatcctggagactccagacttcccatccatccagggttctgcagccctctctgaggctggagccaatctccccttccgtcaagggatccggggagaccgccaagcccggtgctcccctgagagtctctgagaggccccgacaccgcccccgctccaggtccccgggatgctcgcgcaggcgggagcccggggcgcccgggggatccctgagcgtcacgccgctgttgtggagcgcgtgttgacaacgtcgccggggagacgggcgggggcggggcccgggagagggggaggcgcggccctggcggcgcgcgaggggccgggctgtcagcgcaaggcccaggccgccgcagtggccacggccgctgccgcccgccggcttatataccgcggctaaatttaggctgcgcccggagctcgtccccatccgggacgcgtttccgccgccgccgctttggcccggcccccgcgcgcgccgcgcctataaggcttgggcgggcccggccgcggcccacagagccgtccccgcccgcccgcgccccgaccagcccggcctcgggcagccactcaccggtgtccccgtccgcgtcctttctccccgggtcccggccatggcgctgagtgaacccatcctgccgtccttctccactttcgccagcccgtgccgcgagcgcggcctgcaggaggtgagggcggcggggacggcggggcggccgggaccgtgggcggcgggctcggggtagtagaacgtgggctgcggggtgacaggacgcgaaggcggggactgcagactcaggagaggaggatgcgggccacggggatcgcggacttagggtggtaaaaggcaagcagcgccccccgagccccgccgcccgctcacgcccattgccctgtcgcccgcagcgctggccgcgcgccgaacccgagtccggcggcaccgacgacgacctcaacagcgtgctggacttcatcctgtccatggggctggatggcctgggcgccgaggccgccccggagccgccgccgccgcccccgccgcctgcgttctattaccccgaacccggcgcgcccccgccctacagcgcccccgcgggtggcctggtgtctgagctgctgcgacccgagctggatgcgccgctggggcccgcactgcacggccgctttctgctggcgccgcccggccgcctggtcaaggccgagccccctgaagcggacggcggcggcggctacggctgcgcccccgggctgacccgtggaccgcgcggcctcaagcgcgagggcgccccgggcccggcggcttcgtgcatgcgaggtcccgggggccgccccccgccgccgcccgacacaccgccgctcagccccgacggccccgcgcgcctgcccgcgcccggtccgcgcgcctccttcccgccgcctttcggtggccctggtttcggcgcgcccgggcccggcctgcattacgcgccgcctgcgcccccagccttcggtctcttcgacgacgcggccgccgccgcggcagccctgggcctggcgccccccgccgcccgcggtctcctcacgccgcctgcgtccccgctggagctgctggaggccaagccaaagcgcggccgccgctc

SEQ ID NO: 91139 - DNA, 2264 bp, Homo sapiens
gtgtcttagaatgctggagagagggtgcatgcttaggacccgtcggggagcgtggctgacaacagtggggagtggaccttgcgctcctccgaccccctgggggtgaggatccggattgtggggggagttggggatgtagggcaaggatccctcaggggcgcaacactaccgcggggagcgcgtcaaggccctggttagggataggttgcgctcgccggggtagccatacgtgccctgtcctgggaggggaactgacgcttactctcgccccctccctgcaggtgagaagccctaccactgcaactgggacggctgcggctggaagtttgcgcgctcagacgagctcacgcgccactaccgaaagcacacgggccaccggccattccagtgccatctgtgcgatcgtgccttctcgcgctccgatcacctggcgctgcacatgaaacggcacatgtagccgggacgcccccgcccacctgcgcgcggccgtggcgggtcccacgcgccgggcgcggccccctcccaaactgtgactggtatttattggacccagagaaccgggccgggcacagcgtggctacagagggtctccctcgatgacgacgacgacgacgccaccaccccagcccccgtctgtgactgaaggcccggtgggaaaagaccacgatcctccttgacgagttttgtttttcaaaatggtgcaataatttaagtggcatcttctctcccaccgggtctacactagaggatcgaggcttgtgatgccttgtgagaaataagggccttaatttgtactgtctgcggcattttttataatattgtatatagtgactgacaaatattgtattactgtacatagagagacaggtgggcatttttgggctacctggttcgtttttataagattttgctgggttggttttttttttaattaaaaagttttgcatcttttaaaaaaaatcacagcactggtctggttgcttggaactggggccttggggcacttgggaggaggggggagcggagagtttgatggagggcagccccactaaagcatcgtgtgcagtgggtcctgcgtctgccagcaccgggactgccagctgctgtgcctgcctgccaggaacctgtgggtttttctgtaaatttagacactgcattttaggactgagggagggttattttaaggttgttctttgagccataaattgcctctttgccccacagctggggaaagtgctggtcccactgacgtggcctcctctacgttgaaaaaaataaaactacttacctcttcctggaagcctctgaggttttagccaaatttctggagtgccagctctatatttttatttttatttttaaagggggttaacctgctgagtttctggcatgttctgccctttactcgtctcgacatttagcaagtcttttcttaaggggtgagttccccattctgctagcggaaaacagtgaaacctgcattcgagggccatgcatgaagctcttttccagatgaggaaacggaggcccggagaggtagcggcagggtggtggagttgggttgttagcctgctctgtctgcctccaagggtccctgaaccccactggaagggagtggtagctttctacaatgacccacctgttgtgtgcattggaaggctaggagagcctcctcccctgtaggtctcctggtgcaaaaaattcactgcctcaatggtaggaggtgaccagtctggaaacccacctggagagcagaggagacccctaaatcccaccaccccaagtgtctcaggcaaggaggtatctctccccccagatttcacctgccacccctcaccttccccattctcaggggccccgggtaaccatgaccaccaaccattgcacaagtttccagaaagtgaaaatagctcgtaagcagcgcctgctttaaaacactctcaccccgttgcgacagaggctgggatttcctccctccctgcatccttcctcctccccaactacggcagccctggaaacagctgagaggtgtttggtaatccacgaaaagcagaaatacgatttgacaatctgattcattttccgagagtaaatagcctggcctcacttccgctgctgatgaagggtgtgaatgtttttgagcctcctgtaccctctgcgtgcagcttctgcaaaaaccgtcccaagacagaatgttggcccctcgacctggggagatgatccccctttttaaaagctggcctctgcagtgcaggggcagaaga

SEQ ID NO: 91140 - DNA, 1048 bp, Homo sapiens
aatcacatgcatcccgtccactctgctttccagatggggggcctgagacaggctcgcacgcccactgggcccagccaagacatgcttatcccctgcacatcggaccctccgctgggcggtgggcaggaccctgacccctcccacgcattccctgcctccctccagcttgcaggtcccagccccagggccacatcacccactctccgtttttcctttgcagtttggcaatgaggagcagcagctggcgtgggccaagcgggagagcgagaaggcggaacaggagaggctggcgcggctgcggcggcaggagcaggaggacctggaactggccatcgcgctcagcaaggctgacatgcctgccgcctaggcgagggccgtgtgtaggcgggacagggcacgggcgggttccagagagggggcagtgcagatgtctatatatacacacacacaccgtcgccaccgtactccaaggaccgggactcgggggcttgttcagggtgagcagactcggctgcaagacctggaaaggtcacatctcctggggaagcccttacagaggccttggccaccacttctgcaggtccgtctctccactgtgccatcccccccggggctgactgcctcccgctcttcctctggggacgaacacacagcggtcagtcgaggagaggaagcacccagggcttccccgcctcctccctactcatagctgcagacatccccacccgccctcccacgcatcagtcagacactcccccagtggtgtatgcactcgttgtataaaatgaagtttgaatgattaatataaaatattttaatacaaaacaagagaagcttctttaatctctgtaaacattgttttccctgcatgggtatcaggaagcagatcaaccaggtggaacattgctctttaaatcttaagtttttacttttaaaaaaaatttttttttaagagatgagatcttgccatgttgcccaggctggtctcaaactccttgactcacacaattctcctgtctcagcatcccaaagtgctgggattacaggc

SEQ ID NO: 91141 - DNA, 1047 bp, Homo sapiens
tgggaggatcgcttgagccctggaggccaaggccgcaataagccatgattgcaccactgcatttcagcccaggtgacagagcaagactctgtctctgaaaaaaaaaaaaaaaaaaaaaaaaaaaagaacttaaacctcagcatggcagagctgtgtgcagacccttataactaacacaccgaataaccataccacgttgtgaaactaattcctccttttcatttgcaagtaactctcccctctgcctttttttttttttactgttagaagcttgcagtgtatttttctgctcagccatgattttttaaattagtatgttaataaatgtgttgccatgctaaaatgaatctgtttgaaacgtacctgcatgcaaactattctaggacaactcaagttttagctgctctgtgtgcgttgtgtatgggagtcatctgaagtgtttttcctgtgttgttcacaacccgttaagcccctgggataaagctgattaaaactgggattccccagggtacccccgtccagcctgttagccaagttacaagcttttctcagagaagcgccccgggcttgtgcccaccagcattctgctctgtccgggtgagtaactcatatttctttctttctccttttttttttctcctaaactttccaggtaaaagtacacctgtaagccagcttggttccgcagactttcccgaggcccccgatccattccagccactcggggctgacagcggcgacccgttccaaagtaaaaaggggtttggggacccgtttagtggaaaagacccatttgtcccctcctctgcagctaaaccttctaaggcctctgcctcgggctttgcagacttcacctctgtaagttgagtcctccgcctccgggccaccccactcccttccgcttgcagcttccctgggatttttgtctccttttaaaggcaaacctcccagcttctttagcctcttggtacctcacactctctgtccctcgcgttatttattctacactgccacttctgtaagaaaaacagtttctcaataaaaaaa

SEQ ID NO: 91142 - DNA, 1616 bp, Homo sapiens
gcagctctgggcaccgcctccctgcttttctggcggggtgaacatggcccctcatctttcatctctcctattcaaagccctgagtcagcgcgccccttgcctgccactgctaactgcaaaatatcacatgcactcgggcaatggggaatctggccataaagagagcaaaagtgtcccccaccatgggagctcctggtgggctctgcgcctcacttgctcccctcccaggggctcttttgggtcctttcatgcacgacccctaaccagctttcagactcgctgcacggcgttctcagggatcttgttacatgtgggcaaggcgccttcctaccctttgcagaggtggcgtctgcgacattggcacactccgtagggaggaacaaagctgggcccccttgccctgtcagggctccccgtgcctggctcatgcatagatagcatctctccctggaaatccccccagaggatggggctgacacccaggggtgttcacgcagggtatgtcaaaggtgcccgccagagaacaaatgcgaattttcaaagaagccagaattgtgacacctgccagtctgtattatttttgtcatgaagactggcttgtgatttgtaaattcatttccaaatcacataccccaccctacacacacacacacacacacacacacacacacttttttttcttccagggctggtgcagcccttgcctggcaggttttatgtaaatgtcatgggagccttttgtggtgacctctagaaaattgttatttctcacttcaaatgatatttgccttttgaggaccccaaggcacagcaccttttccccactttcttcttttaatggcaagatgaggccacagccattgggttcaacagccccctgcccacctcacacacctcacagggcaggaaaacacagcggccagcagtggctcgtagtaaatatttgttcagcttttctcaacagttcagaaccaaacctcatcctgttcccttcaatgcatgaagcagattttctcaaaattcggtaaatatttttagtggaaaatctcaacgctgcgatcgcagggacctcagattcttatctcccggggctgtgctgcttgacacagctttgatctaaggcagagtgcgcgcggggctggtgcctgcaggactcccagcctgcaggtcccttacgtggtcccgtgtgtcacattgtaaaaaacaaactcccctcatgtgtcttagatgggagccagaggaagacgttgacgtgtgttggggaaaagcactctttcaagacaagtccccgagcagtgatgaattttagaacctatactgttttctttctcccctctccccgcagctaagctttttttctggcaggatggggagggtggaataagacatgtcagtggccttggatgagctctgctggagtggtgccccgcccgggccactgctctcctaggcagcgtgactctcagaaacctggcagttgtatgggcatctgtgttgtgtaggatgaatgacagttgtggttgtgtgggatcacctgttgtgtagggtgaatgacagttgcataggtgtctgtgttgtgtagggtgaatgatggttttgtgggatcacctgttgtg

SEQ ID NO: 91143 - DNA, 1871 bp, Homo sapiens
ggttatgtttaaaaacctctgcactttactctgacctcatgaccctggagttgtgatcaggcctggggcaggggactgtcggccccttacatttttgagagctcttgagcccctgataccaagacaggtgtgaccttttccttaggtggtcacatcccccctgttcacaccagagtctgcccctgcagcctcgaacctggggacatgtagtttcccatttcgtcttggtgctgttccgggagcggatgggccgggccgcgcatgtctggatgtttccttggtgctctgctgcctccagcagctctctccgtgctgccaccctctctcccagggctcctccctggagcccttctgctcctgggcctctgtacgtcatggattcctcttcctccctggaataagagtgagcgctcgtgctctctaaacaccacacttgcctctttatgttcaatgcttgatgtgtttcttttctcagcagccaagtcctcagtcccaaggatttatggggaagcacacgcgtcccctgggctgctgggaaggcactgctggcgagctcatctgtctcttgtgtctggcccccgctgggtgcaccgcctccctctttcctcccatactctcttttctcgtggactcgtaatgaggtggtttccatagccgcccccgggcccgtcatcatcagctttatcgtctaaatttaaacgatgagcattcatccttcatgagttacgagaagccagaactcctcgctttgctccctggctgttcttggcgtgtgtgtttccgtctcacaacccggctcctactttccccatctggcattgtcccctggcaccgcttttggcttgtcctgctcagtcttcgttcagggaacagcttcctcttaaatgtcccttttgcaggtttttagaaaccggttttcttggataaaagttggcagtgaagtggcagtttgcaagtggccagtgattcccccaactccaaagacagatttttacctttctggttatttttgttcatcttttgggcagggcaaaggttacctgagacacaattactttgggaatgtagattaagatacgttacatggaaacttgcaactggcatccgaaagaaaaactgtttttatcctgttgtacaaatacagtttttaaagcatttttctggcttgtttctatttcttaataaatacttggaagagagatttttgtttactcctgaacacttcaagactgcttcagagccgagagagaggtgtcttagttctcccttgtgggtcgaagttgggggttttaggtccctgagaatagtgtatccacagtggtacatctggaacttcctatgtttggacagttctactcaggttactaaattccatgtgaagctcacgcagtgtgactttatctcaaaagtcaggggtttttttttttttttgtttttgtttttttttttttgagacggagtctcgctctgtctcccagactggagtgcagtggcacaatctcagctcactgcaacctctgcctcccgggtccaagtgattctcctgcctcagcctcccgagtagcagagattacaggcacgtgccaccatgcccagctaatttttgtatttttagtagagacgaggtttcacagtgttgcccaggctggtcttgaactcctgacctcaggcaatctgcccgcctcgacctccccaaatgctgggattacaggcgtgagccacctcacccgccaaagtcagggttcttaaagccatatttatttcttgtctatcatctgattatgagaatattgacctcttgctcaccatccaatcaacttatggagagaagctaataaatcatcccagacttaggccttactgaggacaga

SEQ ID NO: 91144 - DNA, 1050 bp, Homo sapiens
tcttctaacccttagagtttgtagttgggtgtcaggagcaaagatatgttgctttgcgcagtgcagtgccttacacctgtcatcccagcactttaggaggctgaggcaagaggatcacttgaggccaggagttcaagaccagactggacaacatagcgagaccccatctctacaaaaaatacagaattttttttgtattttttgcagagatgggtcttggtttgttgcccaaaaatataggtggtgacacgcacctgtagtcccagctactcaggaggctgaggcaggaggagctcctgaggtcaggagctcaaggctacagtgagctatgatcactccactacattccagtctgggtgacagagtgagaccctgtgttttaaaaaaaaaaagcgtcttttctgacatgttttcctgaccctgcttaatgctgatgatgtctttgttgcacaggcaaggagcaaactttcccagctgcatgaaagccgccaggaggcccacaggagcctggagcagtatgaccaggtgctcgatggagcccatggtgccagcctgaccgacctggccaacctgagcgaaggcgtctccctggcagagaggggcagttttggagccatggtaaaggttgaataaacgtattacagtatggggctctggtcccctggtgtgacagcagaacatcccacccgccagatctgttcatggccaacgttggttccagccaagtgcaggcggctgtctgttgtttttgctgccactttgcgcgttcacaccaggccttgcagcctggcacaggtggccatgctgaatcctggcttccagaacaaagtccaagataggcctggatcctttcagaacctgttttgaatgccctccatctctgcggaagtatttacattgggccaaccacccaagttcagagggcttctcaaacttaaccaaaattggatcagtttctgctcattgtggaaaccccacattctactaatcagggggcaggggacatctgaggggcatgtgtctatgtgtatgtgtgtttccacaaggaac

SEQ ID NO: 91145 - DNA, 1002 bp, Homo sapiens
gtggagggtggtggtcagggggccccctccagcctgtcacaggcttccgctgtgtctggcgtcctttattctccctggcctgacagaggctgagcaaggtgcacgtgccaaggctcgaagcccgcgctccgtgacggtcagttcactgtctttcagtaggaagggcctctggtccgtcttaagtgctcccaggccatttgcttacacagctgggccctattcttgctggctgtgatgctggctctaacaggaggcctggactttgtcacagccgcctccgggaggtgcgggcagcagggccttggagcctctagcagagtggcctggcagggtgagggcgggggcaggaggccctgctctggaaaggccagtgctttggctcctggcgggagggtgagcacaaggagaccctgtcagtgcctcagagcccagtcgaggagtcggcctcaacccctctttcccccagggctggacacagccgacttcatagggctggggcactcctcttgccactggccagggctgaagtcacttttgagcttgttgctcagagccttgtggccttagagaaggcttcacttgggagctatcaaaaggaaagaattgctggataattctcgagaggcaaatacctccaagtagagcagtgaaattcaggatgttacttagtggcttgggggaaatgactgtccttagtggtaattcacagatgaccacactgtgaggtgggagcctgagaactagctgtcgcagagtcatcacccaaatggccaagccgcctccaactggctagggacagtgggtctcagctgcctcagatccagtgtcccttttagaaaccaacaaaacacagtgtcccctttatgactctgaaaccaacacacatacagttcctggttagcgccctgacaccctgactgtcatgtctaggggtcagtagagggaaagtaatttataatgcatgctgcaattgacacatgatgtaatgacatggaaatgaca

SEQ ID NO: 91146 - DNA, 1489 bp, Homo sapiens
tccacccccactcctgtctgcacttttcccatcagcatctttttcagtctgttctgtactccatgacatcatctcagaatctccttccttatatactcttttctgaccctgaatatcaacgtaaattcgaaaggtctgcacctctgcctctttaggagtgatttttttttcccaacagcatctcagtgatttgtgtgtctccctgtccccctgctcagctctcttctgctttccaaaaagccttccgtggaaatgcatccagatctctttcctccttgtactccccgaggttaccggtggcccctccgtccttaaccccggtgccctgtggctgcagccgatcctcctcgaactccgcaacactggagcccgtcggtcttcactcttcatcctctctcctttcagtctctccttcttgtcccctaatttcagcctccctacctgcatcttatctctctgtgcgctccctcccctggagcttctgtgcagaggacttcaaacctgccttctagagtccagaaggtgtctctctcctgcacctctgccagcctgctggactctggaatgggccatttccttgccatgccccaaagtggtctgggccattctacttcctacttgcccactccctcccacttaatcccacgccactgtggaagtcatctttttgatttttgagacagggtctcgctctgtcccccaggctggagtgcagtggtaggatcatagctcactgcaacctcaaactcctgggctcaagcaattctcccaccttggcctctcaagtagctgggactacaggagcgcagcaccaatcatacccagctaattaaacaattttttttttgaagagatgaagtcttgctatgctgcctaggcaggtcttaaacccctagcctcaagcaatccttctatctcagcctcctaaagtattggaattacggtgtcagccactgcatctggctaggattcatcttctaaaacatattcccctgttccaaaaacctttcacagctcccattccccttcctccaaaagaactcagtttatggctgggcgctgtggctcatgcctataatcccagcactttaggaggctgaggtggatggattgcttgaggccaggagctcgagaccagcctggccaacatagcaaaaccctgtctgtactaaaaatacaaaagttagccaggcatagtggcaaacgcctataatcccagcaacttgggaggctgaggcacaagaatcgcttgaaaccaggcggcggaggttgcagtgagctgagatcgcgccactgcaccccagcctgggcaacagggtgagactcagtctcaaaaaaagtcagctttgatgaccttagtaagccctgaatcgactccacctaaccttgctgggtccctttcctgcacttctggctcttggcaacactttctagcctcagcatccttagctgtgttgctccggttgctagaacatcactgtgagctcct

SEQ ID NO: 91147 - DNA, 1050 bp, Homo sapiens
actacctgtgttatgctaatcacagctgcctttatttgctgaatacctgtgttgtgcaaagcaccatataagcattttgctagaatgatctagcacagcatggtgattaagagtgaggacacagggtcagatcatgtgttcaaatcttggctccagccccgatttctctgtgcctttggttgaagctcttagccattccacccatcagttgcttcctttggaaaatggagatataaaaatgtgttgggattatgtgaaaattaagcacgtgaaaaagcgcttagaacagtgcctagcatatgagaggcactcagtgatcctataattactgtcatcatttaatctctgccagatttggacgtttgggagtagagaccgcagcaattaagaattccaaacccaaagagagttgataggccggttgcatgcttgcatgactggttagctgatccaaggagagagaagtgcacagctagccaatttgcaacactgtcactaagttaacagtgctaaaacccggtgattattaattagcaagttcttgttactgacatgaaagtgctctgtaaactgttaagtgtcctaccgataataggtgttaatagctaagtgctacagtttagagtatgtagtcagggggtggggggcggggaaggcgggagtcgggggaaaatcacctaagatcatttcatgagaaagcactaagcactcccagtttgggaggcgtggatctttctaaaacttcctgtccaatttttttttttttgagatggagtattgctctgtcacccagggtggagtgcagtggcatgatctcagctcactgtaacctccgcctcccgagttcaagtgattctcctgcctcagcctcctgagtagctgggactacaggcacgtgctaccacacccggctaatttttgtattttttttttagtggagacggggtttcaccattttggcgaggctcgtgtcaaactcctgaactcgagtgatccacccgccttggcctcccaaagtgctgggattacaggcgttagccactgcgcctg

SEQ ID NO: 91148 - DNA, 1054 bp, Homo sapiens
tctgcgggagtgctgcaggtccccagctcctaggagtgcagtgttcctagcatgttgatatttccaaaacacttcccagccacctctgccattcttcattttaggaggaaagtgctcagagacaaaaaacagctggcaaaatcttcagagccgaggcgtccactgggcaggatgccccgaggcaggcccaggcgaggagctgggcatcacagggaaaggccgcctctgcagagggggatgagagcgaggtctcggagcatctcagtgccagctcggcttctgccatccagcaggacagcacttccagcatgcagccaccatctgaagcccccatggtgaacacagtcagctcagcttattcggaggattttgaaaactctccaagtctgacagcatctgagccaaccgcccattccaaggagtctcttgacagaacactggacgctttgtctgaatcctcttcaagtgtgaagacagaccttccacaaacagccgagtctaggaaaaagtcgggcaggcacgtgacaagagtgcttgtgaaggacacagctgtgcagacgccagatcctgccttcacctacgagtggaccaagggtaagccttggggcccgtgggggccggggcagccgggacaggagctcagcgtgtggtttacagcatcctgggagacacgtgggagagctcaggttcctgagatttgggctcttgttattaatcacctggaggggttggccaagcaaggtggctcacgcctgtaatcccagcactttgggaggccgaggcgggaggatcacttgaggtcaggagttcaagaccagtctggccaacacagggaaccctcatctctactaaaaatacaaaaattagctggctgtggtggtgtgttcctgtaatcccagctactcaggaagctgaggcttgagaagaacccgggaggtggaggttgcagtgagctgagatgatgcccctgcactccagcctgggtgacagaatgagactctgtctcaaaaaaaataaaagtcacctagggaccttggctcaccatttcctcttc

SEQ ID NO: 91149 - DNA, 1021 bp, Homo sapiens
ttctggaatgtagccatttgctgttatctgggaaacaagattctaacaggaaaccagcctaagacacttcaggttgagcgctgcctcggagtctgtgcccgtcgcgtcccctgcttgagttttgcacttggaagaaccctgcaccggctggcgtgtgcgacggcccagtcccatccagagcatggagcccgaccccagccagcgccttccactccatcatttcatttcacacccccgaagggaggggaggccaggaggggagctgctcctgccagaagctggtgggtgaccgttgggaatcggccacacctggtgtccatgggcagcctggtgcaattccattcatttgtacagaaacatttttgaaaaattcttttcaataagatgcaaaatcttccaacttttcaacccaacgtgatgaatatttgattttgttctagatttcctgtagctgtgaattgttaaaatgtatgattcaggataaaacgtaaacacgtgctgttagtaatttcttgtggatttcattgttttgccttcaaataaagcctttttttaaagacctttctcccgcacatgtgtaagtcagaagtgtgcacgggctgagtgaggagacacatgtcctggtttgagctgtgcagcctggggtcagaggccgtgtccaggggctcacatggcgtccccagcgtgctgacctggtcccatgtccttaccctcgagcagggcttctcccatccaccctgtctccctctggctcactgggatgccaggacctgcctgggtggagctgctctgcagaggctggtggcccctgtcctgctgtgagtggggacagctccactgaaattctatttccactggcctgtggtgtcatagagctgggcatgctgctgggagagctgtcactgagctgggatttggctcagaggagtctggggccctcaccgcagcaccacctgccccaccatggaatgtcacacctggatgctgactgtgtgtgtgtgtgtccatcaccccagtacca

SEQ ID NO: 91150 - DNA, 1040 bp, Homo sapiens
gtcgtactccccaggaagaagacgccggtcacggtccaggagccccaccccgccgtaagatcctgtcttaagtgctgcgctggtaactctgggaagctgcggtgctttgctgtgaatgtggaaacattggtggttaggagactgtgttaggaggccgccagcattagcccggggacagtggcacccctcacccttcaccacagtagccacttggcgaagcctgaggcagtaactggggtctgctttctaaccaccatctgggttggaggtgtcctgctctcaatgctgagcgtggggtgggggccagcgtctggagcccccttatctagctgagacaggataaacgggtagagacgcaaaatctgcatacggtgtcacctggtgacagtgagcatgcacgcaagctgcggctgtgaggtcctcatcactgtcattccaataaatgtctcagttacttcttaaaaagaataacctgtctcgattttagttcctctgctggtctgggttctaattcggcgcctcccatccctgactcaaggctcggagaagagaacaaaggccatcagatgctggtgaagatgggtaaggcgagggaatggggagggcgcgggatgggtcctcacgcgtgctgggcccgggagtcaccagcgctttctcttcctcagtgcatgtggggatggatggagtcaggccggttctgactccacccagaccctctagacagggccggcctgcgggttctctctacccatttcccatgtctacactgcctgtctggacattcagccccccacgtgcacccccatctgcctccgccttgttgtggttgtgactgcgtctctgtttccaggctggagcggctcaggcggcctcggtgcgaaggagcaagggatccaggaccccatcaagggcggggacgtccgggataagtgggaccagtataaaggcgtgggcgtggctctggatgacccctatgagaactaccgcaggaacaagagctactccttcatcgcccgcatgaaggccagggacgagtgtaa

SEQ ID NO: 91151 - DNA, 1053 bp, Homo sapiens
attgagagcaggacacctccaacccagatggtggttagaaagcagaccccagttactgcctcaggcttcgccaagtggctactgtggtgaagggtgaggggtgccactgtccccgggctaatgctggcggcctcctaacacagtctcctaaccaccaatgtttccacattcacagcaaagcaccgcagcttcccagagttaccagcgcagcacttaagacaggatcttacggcggggtggggctcctggaccgtgaccggcgtcttcttcctggggagtacgacttggaccgggaccgcgactgggaccgggagcggcttctggaggagcgcgacctgctccgacttctgcagggaagggtgcccaagggtcagcagcagccaggcgtcgtggggaggccacaggaagaggcctcaggcactgccctgaggcagcctctgcctacctagatctggagcgggagtaggaacgggagcaggagcgcgaccttgaccttgagtacgagcctgaagacttggaggatcttgagttggagcgggaggaagaacgccctcgactcttggatctgctccgagacctcgagggtccgctgtggggagaggcctgatgatcaggtgccccagtggatgggctgcacccagcccaccctggccctcaggttcctagaccaccccagatgcaggggctctggctgtggatgtggcgccatagccacagcaacggtaccaagttcctaaatagtgtggccgagcctgctgctgtgtgaattcaggccttgtggaaaacaccgccccataggcacaggctgtgtgagggtggacgtgatgagtgtatctggggtctgctcccacccatcacaagctgtggaccctggccccccggccactgcagacatctgcgcttttacctgttcctcttctcctggcctttcctccgccgggcccgcatttttgctcggaagaactcatagaggccgttctgctcccagccttcactgtaagacacggcattccgtgtgtgaccacgtgacacccacccacaaggaagtcgtga

SEQ ID NO: 91152 - DNA, 1385 bp, Homo sapiens
tggcgtttgtctggcagtggtagcggggagcaccttgtggcgcgggcggcctgtgtgcgggtgcagcgcgccccagcggcagaaacagccccgggactgagatgcgggtgcagcggttgggtgtctggtcattttgcagcagcatgtggtgcgggctgagagcaggtgcccagcatcctcgcaggcgtcagcgtaggaggcgcctcaacgtggccagggcagcgcctccatggtctgagccagcgctgtgatgctgccgagcgctgtgatgctgccgagcactagggcctagaccacgcagggctcaagcctgtcccttcccttgcagccgccagagcagccaccctacccgcaccaccagggcggcccaccccactgccccccctggaacaacagccatgagggcatgtggggcgagcagcgcggtgaccccggctggaacggccagcgcgacgcgccctggaacaaccagcccgacgccgcctggaacagccagttcgagggcccctggaacagccagcacgagcagccgccctggggcgggggccagcgcgagccacccttccgcatgcagcggcccccacacttccgggggcccttcccgccccaccagcagcacccgcagttcaaccagcctccgcacccccacaacttcaaccgcttcccgccccgcttcatgcaggacgacttcccgccacggcaccccttcgagcggccgccctatccccaccgcttcgactacccccagggggacttccctgccggtgagtgtacgggcgcctgggtagggcctggcggaggcatccacggctcgcctgccgagcaggctggtggcgctgcttgtggccctgccatgctcctgagtgcacagtgacagacacagggtcatgggacgtccgaggagcccggcctgggttctcaggaagtgggggcacagactcagttttgccgccctgatgaggcccggctggctgcagatgaggcagagccagtaggaaaaggttcctgccgtgggtgggcgtggcgagggcagggcggggcctcgttctttttactgctgctgcttgttttttgcatcagttttcccgttgtattagttcgtttaaaaaatcaatacttggcgtggtgtcgggcgcctatggtcctagctgctcagaaggctgaggttgcggtgagctgtgatcgcaccactgtactccaccctgggcgacagaccgctgtctcaaaaaaaaaaaacaaaaaactacttttcttttttaaaaaaattttattttattttaaatagagatggggtcttgctatgttggccaggctactttcaaactcctgagctcaagcagtcatcccacctcagcctctagagtagctgggtctacagatgtgag

SEQ ID NO: 91153 - DNA, 1311 bp, Homo sapiens
ccgcctcagcctcccaaagtgctgggattacaggcatgagccaccgcgccccgcctttgttttttgttgagttggtttgcagaggttgtttgttcctctgggctgcagtgttttccttggttacctggagggcaggtgttgtctcctggtatgtcctgtcagtgccctgcccactccaggagggactgtcacagattcacggcaggcatgagagacagaatctcctcctgctggggacaagcaagggagctgatggccagagcagcccagagtccgggcatcgccaccatgtccccaccccgcccctgctgagccaggccggagggctcaggctgcgggtccctcctcatgtgttctcgaccccaccgacccccgcccgcaggagcaagtgacagcggccgtggcccacgcggtggagcagcagatgcagaagcttctggaggagacccagctagacatgaacgagtttgacaacctcctgcagcccatcatcgacacgtgcaccaaggacgccatctcggtgaggggccagcacttcccagagcccagctttcccttggtccctccctgaggcagggcctgtcgtagccaatctgggctaagggctgttacaatgggtgcccttccctcccgcctggagctcctgaggctgtgggaccctgtgccccccacgctcatggtgtgtccttccctgagctgatggtgacgcgctctcagggatgcagtgggtgcctgggggagccgcggccctgctcactcgtcattggctcggttgttgcaggccgggaagaactggatgttcagcaatgccaagtccccgccgcactgtgagctgatggccggccacctccggaaccgcatcacggctgatggggcacacttcgagctgcggctgcacctcatctacctgatcaatgacgtgctgcaccactggtgagcgccgccaccccgtgcccagagcgccacttcctcgcgctcctcctcaaccctcctgggtggccgcttgctccggtcggtagcttggcttggcctgtcccgagactagggggcacttgtccggggaccccgggtggggggtctctgtgagccaccaggcttctgtctccaggactgcgaggtctaggtgtcctgtgcaccttcgctgcatgccctgtcctctcccctagaccccggcctcacctgtcacattgctgtctcctgggggccactgtcccctgcactccttcctctcatggggcagcttcttggcgtctccttgttgccttctcagccacggcctccttggcctctgtgtctgtctcctgccctcgt

SEQ ID NO: 91154 - DNA, 1787 bp, Homo sapiens
cccagttctgctccacctccggtctggccggggagaatgtgacagtcgccgcagcccgggatccacccggacgcacctcacctcgcagtctcctcactgtgcccgcgaaaggaaagagaccctggcccaggcacgaagtccccaggcccctggtcgcccggaggtagcaaccagccagcccatcgggctgcgacgccgaccaaggggcacgccccgcgccccccggtctcgactaacacccacccgcgccgttccagcctttccgcggcgccgcgcgacggggacccactctgcgaaagtgtcaggaaacttctgcgcgtgcgcgtcgctagcccctcccgcgcgccaggcatcgcgcggcttcttcccgcctgcctcccgctctcacttccggagtttcccagcgacggccgtaagtggcgggcggaagcggccctagaagcccgccgtaaacggctccctcgcgccacttccggccggcttccgcagacggcgctggtggtcgatcgtgtggcgccggaggacgttccccgcggccggagccatggagatgccgctgccccccgatggtgagacccaaaccggccgagagaccgtttctctctccccggaacctcctattggccggccccgcctcccggagtccccgggtctgggagggggcggggctcggcctcgcggcttcgcctgcggcctctcccgtgggtccccgcattcccggcgagcgtgtggcccctatcgggacccgtacaagggcggcctcttcggggcccacccccttggggtccccggcaaggcggacgggggctggggcgccgagtcccccggctttgggcggtcctcgctgacgccccgcgtggccttttctccgtcctccagaccaggagcttcgaaatgtcatcgacaagctcgcccagttcgtggctcgcaatgggcccgagtttgagaagatgactatggagaagcagaaggacaaccccaaattctcgtttcttttcggaggcgaattctacagttactacaagtgcaagctggcgctggagcagcagcagcgtgagtcccctccggcactcaggccgtcccatcgagcgcttcctttctcggattccagtccgggctctgccacaaacctctttctttcgggtcgtttattctttgaagtggagcagctcggtccacacgatccctgttccgctgttcccacggccctgcacagagcggctgctgggtgccactgtaatggagaacaacgaggttttcgatcctcccccctgggctctggatcagggattttgctgttgttttgcagactgatgacggagattagcaggagtagcgtgattgttttagtgttttctagggaggaagtgatagaggccggatgggagtccatgggacaggcactgtccagccccctttgccgtctccctgtgggtccagcaaggttttgtgcatttcagatgcctgcagcagaaatcaaaaagaattatccctctgagttttagttattggcaagtgtttatcaatgttcgttcatttaggcaacaggattccagtcctgctctaaagaagtttaaagttaggaagcagagctggcctttgaataatggatagtcaccaggtggtgcggctgctcagggcaggtatcacatctgtcacgttcagtacccaaccccgtctctagattgtttaaatgaataactaggagtttgccaggtagatggacattgagaggtggttgtccgctgtttgatcgaacgccaattgtgtgttatgtattaaggtac

SEQ ID NO: 91155 - DNA, 1754 bp, Homo sapiens
gactggccccccaccctgtttggcggtgagtttccgcaccaccggcctcagaagtgtccctcttgcttcgtctcttgttcgcttgctttgtaaatactttggtcccaagctgagacaattgctgtgtaaaacgtgaagagtcaatcccaaagggtgttatttgtcagaagaacttgccgtgtgccttcaccgaaggcagtcaagtctgcagttggatttttctcactggtgaatgacaagaaacagggataattttgcactgcggagatattacgggagttgtctatatgattatatatagtacctgattctttgaacatattattgaactccaaaatgaattcgacctccattcaggcttcctgaaatctctgaagttgctgaaatttgtatattattttccttttccaatgcaagatctgctggtgacgggaaatgactgtctggttttattatggtttataaattaataaatgggctatttaattctgtatataaatttacagcaagtacgtacactggaatgaatgaggcaatcacgttacaccaaatcagcagatcaaaagacaaacacatatttctgagacttgaaggtccacatccccccgccccctgccaagatggagtcttgctttgttgctcaggctggagtgcagtggcgcagtctcagctcactacaacctccatcccccgggttcaggtgattctcgtgcctcagcctcccgagtagctgggattacaggcatgcaccaccacggctggctaattttttgtgtttttagtagagacagggtttcaccatgttggccaggctggtctcgaactcctggcctcaaatgatccgcccaccttggcctcccaaagtgctaggatgacaggcatgagccaccgtgcccagcctgattgacaatggcctcttgaaggctgggttttcccagccggacagtgcccgccccacatgctccactcccacgctttcatctgcaggcctgccttcctctcagccacctcactgctgagctctgtggtagagaatttcctttacccatcagggtatggtctggctggtaatactgactccaacccagctccttcattttatagaaggaggcatttctgaatcatgtttgttcaccatggcgagactcactgcagaatttttaaccaccttattttaagtcattcattctaggaacagtcaagcccctaccacaaaggggccagatccgttcaagtgaggaagcacttgcagtttctgaattttgctgtatatttgtcctatgtcacccaacaggccctttgctatagctgggacattaccagaccccaataccttagggtctcacagcctgaaggacacagagcattgaattattaaaagacctgaaaatattataatgtttttcaattgtcacctgttttcaagacttaaatgctatagacttttctgcaggaatgacgtgtatattcctcactggcatttaccaaaaataaatgatggtttccagggaatcaaaattggtcccgatttgtcagcgagggtctctttttgagtggccctgtcttcagtgtgcccagcaacaaaatgtggaaggaggagaaagagcaagccaacttggctgtcacgtctggatttactgcaacctttgttttttcttctgagccaaaaataaggacgtgcaatttgtgaattgattagatgatacaatgaaaataggatcacagctaaattaatgacgtgactttattgaacg

SEQ ID NO: 91156 - DNA, 1022 bp, Homo sapiens
ttttcaggtaccacagttaatgcagtctctctattggaaataccacttatttccaacttttcattgtaatgtagaaacaatcacgtgtgtgatgttttcctgtctcagttatttcattatgataggcttacagttctcaggttagagggtatgaaacgttaatcactcttaatatggtttgtctggtcgtattttagaaaggttataccaattcagcctcaaaccagtggaatttcagagtgcctacttcacttcatcctcaccagcactgagtgttactgttttatttttgttttcttttctcagtcgtttatgcgtggagcatggtgcttgtttcaggcctgtgctgtgtatgtcctcacaaatgcacttgcaggtttggtgtccaagctcagatgtcagggttaatgtccagtcactgtgtttggggcctgagtcactggagccctttttgccacatatagttttaatcaccctctaaagaggctttccctttccaggtcttgcgagattcacggatccaccatctccggctgctcaacatcctgggctgccacgccgtcttctttatgatccccacctgggttctggtggacctctcggctttcctggtcagcagcgacttggtgagttgtacagcaccaagaacacgccattttcttggctagttccagaataggtgctttgttgaggagctgtagctgcatgttaacattgtggtatcttttgggcacctgacagccagcgctttcagcagtcagtcctctgtaatgcctcacggtgacgatgcacgccatcgaggaagtgggtttcctgtgtatttccttctctggtgtgcttgatcccaggtgctgatagctgctgtgtgtgcgccagtagcgtcaaggaagagaaggtgactctttcacctcctgacagtatagtccagatagcacattgactttttatttttactcattttttattttaaatgtttattttttagagacagaacctcgctctgttgccagggctggagtgca

SEQ ID NO: 91157 - DNA, 1125 bp, Homo sapiens
ggggagtctgaggcaggagaatcgcttgaacccgggaagcagaggttgcagtgagccacgattgtgccactacactccagcctgggcgacagagcgagactttgtctcaaaaaaactattttttaaaaagagggaatgggggagccttatagaggatcagggcttcaaaccctggtgcgtcagtggcagctgaacagatctgtggagttaggaccagccccgggctgtggccctgagcagaggctcttaatgggggtgacggtatggggatggggctacccacaaataagccctgcccctggcgctctgataaccacctgcccccagccacccaccagagcgtcactggcacagcaaacaccactttcaaagtgttaggtggtatccctttgctgagggaggagaggggctcttccctgggcatctgtggcatgtggcccagctctagtctggcctgtgagcccttcttgatgacctcttcctgcaggtatacttgtcactcatccccatcatcagcggtgtcctgctggccaccgtcaccgagttgtcttttgacatgtggggactcgtcagcgccctcgccgccacgctgtgcttctcgcttcagaacattttctccaaaaaggtatttggtcaccatcagcggacatgcatggggtttcaggggtgtgcgggcagcaaactggtggcattgggaaaacaggcggagtagaaatttctttgctattagagcagaaaaatcttgattgccattctgctgattttctgtttgtcattttgctttttaaatagtttgtttttctggccgggcgcagtggctcatgcctataatcccagcactttgggaggccaaggcgggcggttcacttgaggccaggagttcaacaccagcctgaccaatatggcaaaaccccatctctactaaaaacataaaaattagccaggcacgcatctgtaatcccagctactccagacactgaggcacaagaattgcttgaacccaggaagcggggcttgcagtgagctgagattttgcatcactgcactccaacctgggcaagagtgagtctccatctcaaaaacaaaaaaaagtttttctattataaagttaatgtgctcaataag

SEQ ID NO: 91158 - DNA, 1010 bp, Homo sapiens
ggggcccagctgcctcctgcgctgggaactcggggagtccggcccaggcgggagggagggggcgggagtcacgcggtctctctgcgctcttccctcaaaactctttttgtgaaatgctgctaccagtttactaacaaaattgcgaagaaggaccgcgtggaaggaaggacggcaaagtgagttcagaactctatagcaaaccagctataaaaagcgttagtccctcacccccaaagaggtgcggacactttccagcacctgaaagctggggcctcagttgcaggcaggcacagaaaacctgtgggagaggtcacctttaacacagcaacagaagcacgcatctcatctctcttgcattttctgttctttaatttggccctgagtgtcttgagacagtgggccatgccactgcctctgtttgctccctacccagccactgtcaggccagtgttgtctgtcatgtgccagaagcttctcagctgtggtgagccactggcattgggcaggcgggccagctggccagccagtgtgacccacactccatgggcagccacctgtttatatctggtttcagttataacccagtttttaaagaaatgctgcaaaaatttaagttttctcatgtttattttaaacaattcctcttccatcagaccaccagacaaaaaaacctttcctttcttcctcccttttcttttttcccttcctgtacacatctagaaaacttcacctttctagagtccccccaaaacaacacaaaagttattgtgggtgctactggttttatgctgtactgtggggcgagggggaagacctgtctgtacgctggaaacactcataaccattcctttagattcgtttgccttatggttatttgtcataaacgcgatttgcaaaaacaaggagccttagtgaatgtacagtacctagacttctgtgttctcaggacgcagaagggagcaactttgctatttggtccagtaagtggacaccttgtgatataaatgtgg

SEQ ID NO: 91159 - DNA, 1030 bp, Homo sapiens
cggacaggactgtatctcccctcatatcacccgtccacccccaccatgacacagcttgaagcagggttttcagggtcatttggagccctgaatggagaacattgcaaggcaaggccgttgttgccaaagagcaaatgggcccattggcagggcagctttgtgggagttctgcggggactgctgtcgtggctctgcaactttacacccagaggagacaacacgggaagggagggagtggcagtggctgcctcccactggaagtggggcagaagagtagaaaagccagaatccatgaggccagcagaattaacagccctcaaggacgtccacattctagtcctggagcctgggcacatggtaccgtacatgacagatgtgactaagggaacagcctggagatggggaggtgatccgagatcatctgggcaggccctgcctagtcagggagtccttagagatggcacctatcctggctgggtcagagagatgccgggtgaggactcagcctgtagctggctttgagcataaggggagggggtgtgagctggatgcagtgccctccagaagctgggaatggcttcggatgacaaccagcaagaaaatgggcctcattcctgtagtgtaaagagctgaactctgggccgggtgcagtggctcacgcttgtaatcccagcactttgggaggccgaggagggcagatcacctgaggtcaggagttcaagaccagccttcaacatggtgaaaccctgtccctactaaaaaaaaatacaaaaattagctgggcgtggtggcgggtgcctataatctcagctactcgggaggctgaggcaggagaattgcttgaacccaggagacggaggttgcagtgagccgagatcgtgccattgcactccagcctgggcgacaagagtgaaacttcatctcaaaaaaaaaaacaaaataagagctgaactctgctaacacctgaaggagcaggaaatggatcctctagagaggatcccagcccagtgagactcagacctgatttctg

SEQ ID NO: 91160 - DNA, 1339 bp, Homo sapiens
tgtgaagggcgaagggagtggcgtggaagaggggctagatctgctcttgcctcttccacttcaaccccgcatcctgcccagcatcccaggaacatccccaccctgtgccagcatgttcctgaaggaatgtaacctgctccaggtagagcaacaatggcattgacacatgcctgtctgagttagagctgggtgtggcagcgtgcagccgagttgtctgcatctctccacgcaaggaggtgtcccacgtatgcactcgatggctgaggctgtggtcagcaattgtgggcagtatggcttcagtgccagtcctaggaaattatttatgaatgtctgtgccagatcctctctcttgcctgactggccttcacgtttggagacacactgccatacctgtgcagagtcaagggaaacataaggagggcaggataacagctctgacgcagcatggggttgctttctgggacccttggcagggcacagcagatttaactgctttctccctcccttttgtgatggggtcattgcactgtggaagccaagagccaaaaacagttgaagcatggctgggcacagtggcttgcctgtaatcttagcacttggggaggctgaggcaggaggatcacttgagctcaagtgaggtcgaagctgcagtgagccacgatggtgccactgcactccaatctgggcaacagggcgagaccctgtctcaagaaaaacaaaaagaaaaaagttgaggcagtaccagttgccatgacagtatttgaactctcttggagtaaagtttaacacctgggaattgattcctaaggaaaaaatgagagaaggaagcatgtttgaagatgttcattccagtactggttgcagcaggagaacctagaaagaagtgaactgcccagcaatcggagaaggttaagggaattatgatacattaatagaacatttagctgttagacatgatcttgaagattatgtagcaacaagaagtgttaaatgaaaaaagaatgcagtatctgtgatgcagtgatataattgttactggcactggactaggacgggaaagtcacccaggaaagcattgctgttgggggagtgaagggtgtgagttggctccacactttgttctgtgcagagcttggcctctgaggtcagacctgagcactggtctccattcttgggtctgctgggcactctcagcctgaagccaccacaggatgtcatcccttcctgagtttccaggtgtccatttgtgcaatgacaatgttcatctcacctcctgaggctgctggggttcaagacagcgcacatctgacaacagcagtggctcagtagatgctctcag

SEQ ID NO: 91161 - DNA, 1035 bp, Homo sapiens
gagccgagttcatgccattgcattccagcctgggaaacgagtgaaactctgtctcaaaaaaaaaaaaaaagtcagtgtttgtaaccaggctgcctgggccccagacccagctgtgtgacctcaggtagattagctgacctctctgtgccttagctgcttgtaaaagggctggagtgcagtagcacagtctcagctcactgctgcctcaacctcctgggttcaattttcgtgcctcagcctccccagtagctgtgtctacaggcgtgcgccaccacacctggctaatttttgtgttttttgtagaggcagggttttgccatgtgggccaggctggccttgaactcctggccccaagtgatccacccgcctggcctcccaaagtgttgggattacaggtgtcagccactgctcccggccaagaatttcttaataaataaaatagtgcctgatcggcctcactgaggctgtgaagaaccagctcttcctagtccatcttcagcagagctcctacagcaagcaggagggcctgtgggattctctttgggaggagcaggttggggaggagaatcccagaggcctcatcttacacttggggtcagtgggggtggtgcagttcaaggcagtcttggaggccactggcaggaggctgagaacccagggagctgataggggcttagaaagtgaggttgaggcttcctcacagggcctctggggtctgtggggagaggcagggttgtcaaattctggcagtattagcagatgtgcagttggatagggggattgctgggcatacctgaaaaggagagggcaggcccccctgcaccccaacgatcagtgaagctccaggtaaaagtggattttgaggccagatccagcttcagggccaggggtcccagtcattgatcagtgttaatgcatcactagagggggtggtatctgctctcctttcctcagcctggcacaattccagggctgtgccaagaggaggtggaagtagagcccatgcaaggctgtgcggagcaggagggggctgct

SEQ ID NO: 91162 - DNA, 1033 bp, Homo sapiens
caggagttcgataggaagacaactttgaaaaagcactttgtgactggcagggtgccatgcagcctcagctgttcatttccaagggtcatccatttacaggatgaatgctcaagcctcttcctcccggtgccatggagtctgcctgtcagtcccctccttgcccagcatctcccgcctgcctccttgttcccctatgccttcaccaagccatgtctcccaccctgttcacccgagcctctcctctcctttcctctagtgccgcctggctgggacagtgcagaaacactgctcctggcagggcgccctgtgcctgtcccctttcctgctgctctctctgactgtgtgtgtgcagtgagtggggcagcctggccaatcctacctgcctcaggtggatggtggccccaggtgctgctgccactgtctctgtgttctatccatttcccctttccatgggcgttgttcattcacctggtcactcatggccttcagttctcatctcagtctgaggaccccctttggcctcatcagtgtgtcctgcccacactggtgtctcaaactccaggcattaaaaaccatacttagggactttcctctcagctgtctttctgattctacctccaacaatttaaaaactgcctttagtgaggtctaatttacatacagtacaatgtgcctatttcaggtgtacatttggcagtggaagtccctcattaaacagttatgtctgtcttgctttcacatttgtctttttatttagctctacgctacattttgatgcatttttgacaaattcgtatacctgtgtaactactccagttgaggtgtagaatatttccgtaacttaaaaagttctccctccccccactgaggggctaccaccaatccccagttcaccccgccaccggcaccacattggcactgctggtgggtgctgtcgagtactgcaggtaggtactgattttcttacctgtggtgggaaaatggggtaacagcacccatatgaacagatgaggctcacagaggcttgggacgg

SEQ ID NO: 91163 - DNA, 1014 bp, Homo sapiens
gcatagttaatactgaacttgtgttgaataacattatgattattattatttttagaggcaaggttttgcttattattattattttttagagacagagtcttgctctaaaaactttacttgtccaggctggagtgcaatagcgcaatcatagctcactacagccttgagctactgggctcaagggatcctcctgcctcagcctcccaagtagctggaactacaagtgctagccaccacacctcactaatttttgtattttttatagagacggtctcgctgtgttgcccaggctggtcttgaactcctggccgccttggcatcccaaagggttggggttacatgtgtgagcgaccacacccggcttgaataacattactgaaataacattgcctttttttttttttttttttttttttaaagagtgcttgtgtccaagaacataacttttatatgttagggtgtgggttttgtttttgtttctgttttgcttgactttgataattgttgtggagaaattttgtttgcacaagaaggtgataaaacttggaagcattttttttagtaaacattgaaaaatttatgagttggcatttctaaaaaatccagattctttaatcttttcatttatatgtaatgttgaaatacaataatgcaaatggactttagtttcattcagactctatttcaagcacttcaaaataatgaagctctaatttacataaggcatatactaaggtatagacagtggtgtgctggtgaaaatttgacaaccagctctcaggaaaaagaaaagaaatccatacatatacatatgtaaatatgcatgtaagtttatgagttttactagtataaaggatgggtggcatataatttgcaaataataatgaaatatacaacactgttgtcagttccatatagccaattgcttctcaccagctgcttccgttgatttttgctgagcttttgtatcagcttctgattggttttgacatgactttggttaatatcttattc

SEQ ID NO: 91164 - DNA, 1073 bp, Homo sapiens
tctcagggtccagagcctccataagcatccctgtcttctgactattgcaggcatcctggtctgatctttcccgcagtgcttcctgtaaccggtctgacttgcctgtcatttcccccacccccattccccttgaagcaaagactggttggttgttttcttgctggtatttagagagccattcattctgttagggccagtgaccagtttacaaatggatgtgggtccatttctgacttcagattacagaagtagcattgcctaacctgggaggacccagttgggcttgggggtaagaattcaggcttagtggggcttagtcatttagctgattagtattggggttgaggtggctgcggctggatttggccagacccctggaggaagcccccttcctgtgatggttacttggctctctccaaccttcagccctttggattcctcccatggttcgaggggtctgttggagccatactggcatggtctgcacccaggcgctgagcctgtcctgtgtgtatcgctcagttccgttaggtttggggattccagaagccgtcgacaggacccagtggcctggtgaacccctcaggcccacatgagcctgcacgtgcctcctccctccaggcctgggcagacactccccacccaccccccacctttttattttattttattttattttgaaatggggtcttactctgtcacccaggctggagtgcagtggcacaatcggctcactgcaacctctacgtccccggctcaagtgatcctcctacctcagccttctgagtagctaagactacagacacacgctaccacacccagctaattttttgtaatttttgtagagttggggtttcaccatgttgcccaggctggtctcaaattcctgagctcaagcgatctgcctgcttcggcctcccagagtgctggaattacaggtgtgagaccgtgcgccgggccagacactacccttagcacagcttctggaccttagctggaaggcttcaggtccttctcagctgcttctactttggtgaccttggagcagatcacttaatgtctccgagcctcag

SEQ ID NO: 91165 - DNA, 1046 bp, Homo sapiens
cttagggaagtggtggattattgtcagagctgacttaacacagtctgggggcactgtgagatggctatgtggacatacccaggcccttggattctgtgtataggcctttggattctgtgaccatccaagtaccgggaggttctgcgattctctgtggagcctattcaaaaggagaggggtcatgtcaggtgaagtaccagcagccctctgggaactcacatcccaaggattgccaggcaattggggttaaaggcctttggatgttactgtgactgcagcaaagtttcctgggttcatccactgcaggaaaatgaatcttggaaaacgtcagggggctcatcaggtttcccctgcatgcagagttaggctcggtctcctgtgtgccagcagcagtctctgttgggcagcagaggctgcaagacgaacagccgctgtttactgagcacttacacagtgccagacactactgtgtggagtgtctcattgcttctttgaattacttctagggtaggtgcttcatcttcattttaggggctaggagagattcaccgatttgtctggtattgcagacaagggaaccagaagccttgggtctgaatccatcactgggtggttctgatgtcagagggcttaactacgacagtcttccgcttcccacatcggtggtgcccagcatggaagctgaactccattgcgtcttccaaggtgtacccttgcaaacatgaagtgttttcacatgttacattttgaattccattccttcccagttcctacaacttttccccctttaaattcctctagcctagtggctccaaacctttttgagtatgagggttcatttttatcatcagaaaccttctggaagcttcacataacaacaggtgtgctttgagtaactgttttaaagaaaattcgaggacagaacctactcctaatccagtcatgcttcgaaatgaagttctgtcttgtcatcaaaacagcatcagtgtaactctgagagcaggccttacctgtatgtgtgtgacacctggaatttgacctttgtg

SEQ ID NO: 91166 - DNA, 1012 bp, Homo sapiens
caactagcaaccgatgtggaacttttcatgaatctgtgtgaccagtttgctctctacttcaacattacagcacttttgatattaacttaaaatgccatttattctgcagaaaagcagaatggtgtaaattgcaaaatgaaggactcttgattctgaccctatccaaaatagtagaggaccctaaacccaaacatgtaaatgccacctgatccacaattgcccagattcagggactctcctgtctttactctgtatattgtggccaggacacaggagaggagcagcgtggtgttctctgacttcgggaaatggaaaggtagcaagtatcacctgtgacacaggtgtatgtccttgtctttgactcattctgtccctcaggagaaagtggactttacagtctctcctcactgaggtttctgggtggtcctcagaatatgttgtcctggttggaggtcccagagccctggaggactgtccaagaccagcatgtggtcaggggctttgttctggatacagatgtaaaaaggcaccatggtcacgtcagcccctgggcagctgtgtaagataggacatgtagcttaagggcgccaaggtctcttaggtgaaggaggacacttggctttccttttcttggttttggggtctgcgagcatcttctcagatggagctctagtttaaccaggctgactccaggtgactccagtccagcgggaggggtcccctggccacttccccactatcatctccttctggaaactgggtgctttgttactgcacgttgtgcttttcctttgtattcctagtggtaggctgtcccacgtctgcctggttcctttggggaccaggagctggttgtcagaatgggtggccaagtttgtggcacagtgagtaaaggagaggcagcacatttcattccagtgtggtctcgctagcacccatgcttggagcaccttccaaaacagccgcttttcactcttagagcagggtgtggatttgccatcgggattccctg

SEQ ID NO: 91167 - DNA, 2099 bp, Homo sapiens
gtctgagaggttgctgagatattagcactgatccttaatgccacctcagagagctttgggatcaggcggcactttgacaggcgatcacagtgttgtagattaggtcactccagtgacctcacagtttccagtattgtatagggttctaatctaaagggttccttgaggcagaagaaaggaggatggaacaaatcttagttttgtgtgtcttagcacatgcagaaatgctatataggtccctggttatgttagctggcatggaatttgcatttcataccgcttattttcagggactttagtgatgatcttgggcagagtcctactaacatggggtggatggatttgggaagttatcttcttgactatgaacaatgaggaaagtgcctcctttgtgattgaccctctgagcgctgttatgggccatttgacaggaccgtttgctttgagcaaacaccatgcagaaacacagagccgcggtggacaggattgctggcggaggtgatggtgagagccgggcatgtcagtgcgtctgcagtttctcttggatcaatgtgggctcaggtgagagcaggtggctccagcacaggtgctgccggcgtgccgctctctcctctctgccctgcccaatgatgaactccactactggatatttagttgacacatatttaagatgctcatgaaaaaaaaaaaaacggggacagtgttgaagagccaacactaaaattaaacctcttctgagagaagcggcagagaattgtgtcatgtaatgcttacctttatgggcatgcaattatggttaacaaacttagctattgcttgcaaaatcggtgtcaggaactgacctaatatccacaagtatctggaaagttagggaagtgacgaagtcgtgtttaccaaccatctccttgacaaaggaattcttaggaggaaagtagtttctgtgctctcacttttagcccctggagtatgcatttgaattcctatagcagcaggctcagagttaataatttctgccaattcagtaataaagtaaatcctctactctccttttgaaaaggctactaacagtttttcagagcagttggagcttttcttttcgtcgtgcaccctttcagcccagggtgttgaaaatctctccgaagcgcagtgtgtgcatgattgttccagcttactctcactgcattgtgggtaaagtgaaggactgtgtcttactctcgcacagcagtcatagtgagcagtctcctcagcaggtgattcggttcccatctgcctgggacactcgttctgtggaggtatgagctttatcttcctgtgcagcacgcaagcttcttggggatgtttcctgtcttgtcttctccctctagagcagaagcattaggcacactttctacctgctgcttaaactgactgaaccctagcatccatcttggacctgtgcctgaggagctacatttgagccccattttaccaagaagcctttgtgaccactttatgcccaagagttcagtcgtggaatattctaatgcagaactttggagagtggaagaatcacaggtggcttgagatgctactcagtagaactgtgaggaacacagatgttaagtgatgattaacaaacttagcttttagaggaaaggtccgacgaatagtagacggtgtactgcatcctcatggcaagtaaaataaccgcacagggcagggcttgctagctgcaggtgaatgccctgtgttcagaccagggagaggcctgagaaggtcccgcagcaaagagggacttgaactagccctggccgcgtgtgtcagtgcctccagctgccaggctctgagcgggaaacgtccttgggagctgctttctttttcacagctcttcaggcaacagagaccaagggagaggtgaccgaggcactctgcagagagacacagcaagaaagatcattttcccacctaagaattggaaggttggatgttgcttaccttggtttgcctgcagatttcttgtccacagggtgggattgggaactggtgtatgcaccccataaagctccttccagatctaagttcagatcctagaagggacagcagagactaatgtcaattgt

SEQ ID NO: 91168 - DNA, 1048 bp, Homo sapiens
gggacccgtctggcgcccacctcccctcgagggccgctgccatccctgcctctcgcttctcgggcccgggccgggggcaggtcgggcagcccggcagcgctcggtacgtgaggccgaggcttccgtgcggcctgggcggaggaagcagacgggggagctgaggctagagtttttcctccctttctgctccagctctacgaccctcactgctctggacgaagcttctctgcctcgccctccctccgggacccgagacccccgggaagccctcccggagcgggaaggggagggagaagggctgtgaagcaactggtgtccggggtatgactcggggaacctatgtctcccatgtcttggcctcctgggtgatcagggaagtccttcttccccctcctctcggctggcagcaccttcctggcttcggagagaacccccagtctgttttgcccctggccgggtacctagggtacgtggagagtctgtctcccttctgtgactagacacgcctttgccaaaaccctcttggggtcgctgccgacgatagatgatctcggggagggtgggatccttcctgttgcctttctgggcctcagtacccattgcgtctctgaccaagccagagctccattttttaggtagtgaattaaagaggacttttctctcccgtttacccaagagctctgtttcagtaggctctttccctcacctgggggtctcagcctggtggtttttgacccagactgtcggggttaactccagagtgtcgcttcctcgggtgcccctttgctgaggctactgtttgcggagggaccgccccctccccttccgtgtgtgtgtgtgtgttgttgcgggggtgggggggtgggggggaagactgatctattctcatattttctccaagagtttcttggcagtaggggtcattcttcccgcggcaggagcagggcggtaggaagatgcagtagcatccaggtatgaggggaggccctgcttcccaggaagtggccattgagatcactttttaatgtgctgtgaatggaagaaaaat

SEQ ID NO: 91169 - DNA, 1067 bp, Homo sapiens
cgtctacgcggcggcttctccacctcggcaccactggcatttgggcgggatcgctctgtcttcggggcgggtcccccgatctgtcggaagttgagcggcatctctggcctccgaagcgccccctcccccaatctgcagtcattgccgccgtcccttgtgggggcacagtccccccgcccccccaccggcagagaaccccgtgattgaaagacccttctacccgcctctgccttgagattctgtaaaactgagatgctcattctcttaaccaaacacgtcacagaggaggaaacggaggcccaaggtcacctagacttcggggttaagcccagaaccgcagatgtcaagtttaagggcgcccctcctccctccaccctgtttattgccttggtaattgctcccctctctctgggagctctgttggaaatgctcttgtgagacgggatggaaaggcaagctcggcggcctcgggagaaatcttttttttcccactgttacaggaagacctagatttaaaacaggaggaagacagctgatgagaaccacatgtgtgccttggagctgcccgacacctgttagtcttgtatttgttgtgcttctgggaaatattttcatttgcaaaaacggctgcttctgcacgtggctatggttgcgtgcttctgcacatgtgaaaagttttacatcacacttggaggagaaaagaaacacgggcaaaacacttgtcatttactgctcccaacctcgcccctcccagaatgcggtgcattgtgtacatggtgtacatggtccaagttggaaactggcccattcggagataattctctcatttctgataagcaaaataagcaaagccttcctcaggcatattctggtcttgcctctctcttaatttctaactcggatgtacagtatctttttttttttttaataaagtattacataggaggcaatttattttgcatgggtcaggttattttaagaaacatttgggccggacgtggtggctcaagcctgtaatcccagcacttcagcaggcggaggtgggcgatcacttgagctcaggagtt

SEQ ID NO: 91170 - DNA, 1064 bp, Homo sapiens
ggtgttggctgtgcggagtggctcacgcctgtaatcccagcactttgggaggctgaggcgggtggatcacttgaggtcaggagttcgaaaccagcccagccaacatggtgaaaccccatttctactaaaaatacaaaaattaatctggcttggtggcaggcgcctgtaattgcagctactcagcaggttgaggcaggagaatcgcttgaatctcggatgcagaggttgcagcgagctgagatcgcaccactgtactccagcctgggcggcagagccagactctgtctaaaaaaaaaaaaagagtatattcttcttttaactgtgtagttcagtattgttaattatattcacaggtggatcacaggttactttaaaaaatcagacaatcatgtaaaatcatctaagtaataggtaatagtcatgtaaaataatcgctgacaatatttttagaacagtcacctcctatcctcacagacatttctgccctctgacttctccaggctgttcggctcttgaatcccagcgatgaaaccaggaactcactttcccgggatgccgagtctccattcctccattcctgatgacttcaagaatgtttttgaccagaaaaccgacaaccttcccagaaagtccaagctcgtggtgggtggaaaagtgttcgccgaggtgtgcatggtttcccagccacgtccctgttttcaaagatagtttcactttggtctctgaattgaaatgctgtctactgaaagggtttcaggagcgtttatgtaaggggctgtgatgaaattgcattccccatagataaaagaaaaatcatttctatccagagatctgagcagaaggattggcttgttagtttaacacagccgtatttttggacattcagtgttacttgctgagtctgacagcctctgggcccggccaggggccctgttaacaaactgctttcacatcccaacagggtctgcttggccactcagtgcagctgcgattaaccctaaaggctttaaggaacgggccacctgtaacagagacaccagccttcctgtatagacactaaattg
